United States Patent Application Publication US 2011/0183924 A1 - sequence listing, part 93

SEQ ID NO: 301756 - DNA, 3146 bp, Homo sapiens
ttgatgggtacagagcagacccctacctgtctaccctccttcggacccctaggaagcttcgcaggccttccaggctgccagacagctgccctggcgttgccgtctgcttcttccctggccccactctgaggggctcagagctgaggcagaatccctttttcattcatttcctgcagaataaaacaacatacagaaaagtgaataaaacataaatgcacaacctaacacactgttaggaagtgaacgatctgcaaccaccatcaggaaatagttttgccagcacccaagtgccctcccctcacagtgtcacttccggcctctctgccctggcttatgtgagtcttgtgttcttgtttttctaaaaagtcttcagcacccaattatgcaggcattgcagtattttcctgtttctgtgctttatccccttgaatcatacagatgcaaattctggcagctggcttctttggctcgttattatgtctgtgagatttattcatgttgctgtgcgtagtatagtttgtgcatgttcattgctaaaaacttccattgtttggctgtatcgtagttcacagattcatttcactgtcagtcaagcttgtccaatgcatgcagcccaggatgcctttgaatgtggcccaacacaaatttgtaaactttcttaaaacattataaagatttttgtttgcgattttttttttttagctcatcagctatagttagtggtagtgtattttatgcgtgacccgagacagttcttccggtatggtccatggaagccaaaagattggacatgcctgctgtagatggacagttggtttgtttctagtttggggtaactacacacaatgctgctagcaacagttttgtccatgtctctgatgcacgtgtgttttttgcaaatggtgcacaaatttttctagggtttgtactcaggagtctgactcctgggttctagggtatgaagatctttctaaatattgttctagtttacgtgcccaccagcagtaaaacagaattcccttgccttcccatccttggcagacatttcacttttgccagtctggtggggtgtatagttatggccttaatttgcatttagctaattaccaaggagattgagcatatttttatgtttttattaaccattttgattttgtctcctgtgaagtgtctatcatcttttgcccattttttaacttgttgtctttttctttttcttttctttttttttttttctgagacagggtctcactctgttgccctggctggagtgcagtggtgcaatctcagctcactgcagccttgagtcaggctcaggtgattctctcacctcagcctcccaagtagctgggaccacaggcccacaccaccaagcccagctaattttttgtatttttaagtagagacgggtttcatcatgttatgcaggctgctctcaaactcttgagctcaagcgatctgctggcctcagcctcccaaagttgggattataggcgtgagctaccagattttttcttattaatctaataattctttgtgatagtcttgatattatccataatgtgattgcaaatatcttctctaactctggcttgactgtttatggtgtccttttttttggggggggttttttgagacagggtcttgctctgtcacccaggctggagtgttgtggcacagtcttggcttattgcagcctcaattcctgggcttaaacagtcctcccacctcagcctcctgagtagccggaactacagtcacgcacttccatgtccagataattttttttttttttttagagataggatcttactatgccccagctggtctcaaactcctagactcaatgagcctcccatcttgacctcccaaagtgctgggagtacaggcatgagccactgtgcatgccagttcttatttttaatgcagttgaattgatcagtgttttcattttggttagtgctttttgtggcttaagaaattctttccaggctgggtacagtggctcacacctgtaatgccagcactttgggggcagaggcaggaggattacttgagctcaggagtttgagaccaacctggacaacatggcgaaacaccatctctacaaaaaatacaaaaattagctggacatggtggtgcgtgcctgtagtcccggctactcgggtggctggggtgagaggattgcttgagcccagaaggtcaaggctgcagtgagctgtgattgtgccactgcacttcagcctgtgagacagagtgagaccctatctcaaaaaaaaccaaaaaaaaaaaaaaaaaaaaagaaaaccactgaaattatttccactccaaggtcatgaagatagtctcttagattatattctgaaatccttataaatgtaaatttcatatttaggcctttaattcacctagatttggttttttgcatatggtgtgaggtaaggattcactttcatttttttctctccatagggttacacacctgtcctatcattgtttgtaatctaactttctgcgcccatctgcaatgccacctctgtcatatgtccacatatgacatatgtagatctgttgttggattctttcctctgttccattagtctgtctgttcttgtgccaatatcaagctgtcttcattattatcaattatgtattgagatctgataaagtaagtcttttccaccttatttttcttctttgagagtgtcttgactattctggctctttgtattttcatgtaaggtttttctcccatataagttttaaaatcagcttgtcaattccaacaacaatgatgcacttgatagtttgggaatttattatagctatcaatcagttttgggaaaattgacgtctttacaatattgagttttctgattcatgaacatggtttacctctctttccatttgggtcttctttaaggtttaccaataggattttatatttttgtccattgtggtcttgcttatcttaagtttgatttgtaaatattttatgtttcttttagtctattgtaaattgtgtatttttaatttcatttttttttttgttaatagcatataaaacacaccttgtcttttaactggagcattttgtccattgtgtatttaatgtaattaaatctaccatcttattttatgctaca

SEQ ID NO: 301757 - DNA, 3092 bp, Homo sapiens
ttgatgggtacagagcagacccctacctgtctaccctccttcggacccctaggaagcttcgcaggccttccaggctgccagacagctgccctggcgttgccgtctgcttcttccctggccccactctgaggggctcagagctgaggcagaatccctttttcattcatttcctgcagaataaaacaacatacagaaaagtgaataaaacataaatgcacaacctaacacactgttaggaagtgaacgatctgcaaccaccatcaggaaatagttttgccagcacccaagtgccctcccctcacagtgtcacttccggcctctctgccctggcttatgtgagtcttgtgttcttgtttttctaaaaagtcttcagcacccaattatgcaggcattgcagtattttcctgtttctgtgctttatccccttgaatcatacagatgcaaattctggcagctggcttctttggctcgttattatgtctgtgagatttattcatgttgctgtgcgtagtatagtttgtgcatgttcattgctaaaaacttccattgtttggctgtatcgtagttcacagattcatttcactgtcagtcaagcttgtccaatgcatgcagcccaggatgcctttgaatgtggcccaacacaaatttgtaaactttcttaaaacattataaagatttttgtttgcgattttttttttttagctcatcagctatagttagtggtagtgtattttatgcgtgacccgagacagttcttccggtatggtccatggaagccaaaagattggacatgcctgctgtagatggacagttggtttgtttctagtttggggtaactacacacaatgctgctagcaacagttttgtccatgtctctgatgcacgtgtgttttttgcaaatggtgcacaaatttttctagggtttgtactcaggagtctgactcctgggttctagggtatgaagatctttctaaatattgttctagtttacgtgcccaccagcagtaaaacagaattcccttgccttcccatccttggcagacatttcacttttgccagtctggtggggtgtatagttatggccttaatttgcatttagctaattaccaaggagattgagcatatttttatgtttttattaaccattttgattttgtctcctgtgaagtgtctatcatcttttgcccattttttaacttgttgtctttttctttttcttttctttttttttttttctgagacagggtctcactctgttgccctggctggagtgcagtggtgcaatctcagctcactgcagccttgagtcaggctcaggtgattctctcacctcagcctcccaagtagctgggaccacaggcccacaccaccaagcccagctaattttttgtatttttaagtagagacgggtttcatcatgttatgcaggctgctctcaaactcttgagctcaagcgatctgctggcctcagcctcccaaagttgggattataggcgtgagctaccagattttttcttattaatctaataattctttgtgatagtcttgatattatccataatgtgattgcaaatatcttctctaactctggcttgactgtttatggtgtccttttttttggggggggttttttgagacagggtcttgctctgtcacccaggctggagtgttgtggcacagtcttggcttattgcagcctcaattcctgggcttaaacagtcctcccacctcagcctcctgagtagccggaactacagtcacgcacttccatgtccagataattttttttttttttttagagataggatcttactatgccccagctggtctcaaactcctagactcaatgagcctcccatcttgacctcccaaagtgctgggagtacaggcatgagccactgtgcatgccagttcttatttttaatgcagttgaattgatcagtgttttcattttggttagtgctttttgtggcttaagaaattctttccaggctgggtacagtggctcacacctgtaatgccagcactttgggggcagaggcaggaggattacttgagctcaggagtttgagaccaacctggacaacatggcgaaacaccatctctacaaaaaatacaaaaattagctggacatggtggtgcgtgcctgtagtcccggctactcgggtggctggggtgagaggattgcttgagcccagaaggtcaaggctgcagtgagctgtgattgtgccactgcacttcagcctgtgagacagagtgagaccctatctcaaaaaaaaccaaaaaaaaaaaaaaaaaaaaaatattctgaaatccttataaatgtaaatttcatatttaggcctttaattcacctagatttggttttttgcatatggtgtgaggtaaggattcactttcatttttttctctccatagggttacacacctgtcctatcattgtttgtaatctaactttctgcgcccatctgcaatgccacctctgtcatatgtccacatatgacatatgtagatctgttgttggattctttcctctgttccattagtctgtctgttcttgtgccaatatcaagctgtcttcattattatcaattatgtattgagatctgataaagtaagtcttttccaccttatttttcttctttgagagtgtcttgactattctggctctttgtattttcatgtaaggtttttctcccatataagttttaaaatcagcttgtcaattccaacaacaatgatgcacttgatagtttgggaatttattatagctatcaatcagttttgggaaaattgacgtctttacaatattgagttttctgattcatgaacatggtttacctctctttccatttgggtcttctttaaggtttaccaataggattttatatttttgtccattgtggtcttgcttatcttaagtttgatttgtaaatattttatgtttcttttagtctattgtaaattgtgtatttttaatttcatttttttttttgttaatagcatataaaacacaccttgtcttttaactggagcattttgtccattgtgtatttaatgtaattaaatctaccatcttattttatgctaca

SEQ ID NO: 301758 - DNA, 3608 bp, Homo sapiens
cgtgggtttcatgtactcagccagcatttacttgccagtcaaggtctaggatggctacctgtcctctgcaggagccccaagcctattcattaatttcatttacaattttatagtcataattatttctttgtataatagcattctgagattttccaaaatttcccactgtttttgttttacagtgggcagaattcactttgctctaacttgactccaagatgacacaatttcccagttttttttttaacggctaggggatgggggtatgcggaacagaacacagtggtctagctaaccgatttccgctagacgtccagctatctttcaaaatattttgtttctgcacggcaacttcagccgctaatggccccgccccatgggaccgggcggcgtgggcgtgagaggcggggcggggccgcgctctgcttgccaatgtctttataggtcacccggaaggcacgcggaacctcggcgcggtgcttccagcagggtctctccgccactccagccccgcgcccctcgccgcggccctcgggcgtctgcgccgcagctgccgcccccgcctctttggagtctctcgcggcctcaaagcgcggcctgcgtcgcttccggcagttcccgaccgcgggcgatggctgccgctgggggcgcccggctgctgcgcgccgcttctgctgtcctcggcggcccggccggccggtggctgcaccacgctgggtcccgcgctggatccagcggcctgctgaggaaccgggggccgggcgggagcgcggaggcgagccggtcgctgagcgtgtcggcgcgggcccggagcagctcagaagataaaataacagtccactttataaaccgtgatggtgaaacattaacaaccaaaggaaaagttggtgattctctgctagatgttgtggttgaaaataatctagatattgatggctttggtgcatgtgagggaaccctggcttgttcaacctgtcacctcatctttgaagatcacatatatgagaagttagatgcaatcactgatgaggagaatgacatgctcgatctggcatatggactaacagacagatcacggttgggctgccaaatctgtttgacaaaatctatggacaatatgactgttcgagtgcctgaaacagtggctgatgccagacaatccattgatgtgggcaagacctcctgaactagaacaaataggaatattttcatggaattttacctatttttataattattatttcttaaagtgattaaatgagaacatggatgagtggacttcatattatgactagctttactattttaattcaccttgcataactactgaattttgtcattcttgaaagtatgcaatttttattttggttatattacaaaaatgtcaatcaaatattaaaaaatagttaatgtgatagaaaaaccttacatatttttttcttatgtttgtttagcgactttagcaaaatgttttcatataatctcatctgtttacctagaagataggttaaggaaatatattattattcctgtttgatgtgggtgaaggcagagatctaacctggcttgtttagggccataccactaattagaaaatctgtgctagaacctgtgtcttattcctataagctatgtgttcagactgaaactggagaaattatgactattttatttatagtagtagttaaatctgaatgtgtatggacaaaaatatttaattgctcagtaaactgcttaacttcaaagatagttattgaccttataaataaatatttcaaaattttgattcggaagactaagtctggacgtagacattataatgctatcaaagaagtttgatctctgttttgactaaactagaggaaaaatgattggatgtgtttattcttttctaagcagaatggtttaactttgtactctttgaaaaataatgctgatttataaatctctgcctataacagaatggaaaccttatgaatgaattgtgtttctctgtcctgagctggagaagggaatgagcaggctgacacgttgcacagccccaggtggcgccattctctcacgcaaggatggggctgcagggtgagcagcgtgggctgcagtgtgtcagtcccaggagtgagggagtggcaagcaccacagattaccacgtatgtgtggaagacattcgtactcttatctttactataaataaattcataaaagttaacaaaggggtacacagtatggtctttggaaatataataaaacatcaactaacttggactaattgtgaggaagagcagaacaaattagtagaaagaggttataagacaattgagttagcttcatgtgtattattgcagcttgatcatttatataaatatttgtctagtacaatgcttgacatacagcattgtgttatgcccattggggacacagaggtgaacaagacaaggaatgccatcagggaattcaccttttattaggaaaatataaaatatgtatgtatgtgcagataatttgcttgaactaaactgactagttctgctaaataagattttaaactaattcatatgtaaaaagtgattaggaagaacttgaagtatcatttgatgcttaataactattgagtagttttttttttttttttttggtggggggagcgggggacagggtcttactctgtcactcaggccagagtacaatagtatgatctcggctcactgcaacttctgcctcccagtttcaagggattctcgtgcctcagcctcccaggtagctggtactacaggcacggaccaccacgcctggctaatttttgtattttttctagggacagggttttaccacgttgcccaggctggtcttgaacttttgagctcgagtgatccacccacctcagcctcccaaaatgctgggattacagatgtgagccaccgtgcttggccataactattgaatgctttctatgtggagagtgcttgtcttaattttctgttgctataatagaataacacagactgggtaatttataaagaaaagagatttatttggatcatggttctggaggctgggaggtccaagagcatggtaccagcatctgcttggcatctggtgacagctttcttgctgcatcattacatggtggaagggcaagagaatgcgagtgagagcaagagggcaaaatgattatccttttatcaggagcccacttctgacataactaacccacacctgagataacggcattaatccattcatgaggtctctgctcttaaaggagatcacctcttaaaggacccacctttcaatgccattacactggcaatttaatttcaagatgagttttggaggggacattcaaaccatagcagtgctataattttaaagtacttcaaagccaatttattctcttaattagcttcattattcttgtctttgtgtgtggattacctaaactctccttccagagctactttaatgattatattcaaccaaagcactctaaaatttagagtataaattgtcttatatttcaaattagaaaagttcaaatgaagtttaattgtgttattttataaaaccttctaaaattattaaatggaggatataatctataaatggtt

SEQ ID NO: 301759 - DNA, 2208 bp, Homo sapiens
cgtgggtttcatgtactcagccagcatttacttgccagtcaaggtctaggatggctacctgtcctctgcaggagccccaagcctattcattaatttcatttacaattttatagtcataattatttctttgtataatagcattctgagattttccaaaatttcccactgtttttgttttacagtgggcagaattcactttgctctaacttgactccaagatgacacaatttcccagttttttttttaacggctaggggatgggggtatgcggaacagaacacagtggtctagctaaccgatttccgctagacgtccagctatctttcaaaatattttgtttctgcacggcaacttcagccgctaatggccccgccccatgggaccgggcggcgtgggcgtgagaggcggggcggggccgcgctctgcttgccaatgtctttataggtcacccggaaggcacgcggaacctcggcgcggtgcttccagcagggtctctccgccactccagccccgcgcccctcgccgcggccctcgggcgtctgcgccgcagctgccgcccccgcctctttggagtctctcgcggcctcaaagcgcggcctgcgtcgcttccggcagttcccgaccgcgggcgatggctgccgctgggggcgcccggctgctgcgcgccgcttctgctgtcctcggcggcccggccggccggtggctgcaccacgctgggtcccgcgctggatccagcggcctgctgaggaaccgggggccgggcgggagcgcggaggcgagccggtcgctgagcgtgtcggcgcgggcccggagcagctcagaagataaaataacagtccactttataaaccgtgatggtgaaacattaacaaccaaaggaaaagttggtgattctctgctagatgttgtggttgaaaataatctagatattgatggctttggtgcatgtgagggaaccctggcttgttcaacctgtcacctcatctttgaagatcacatatatgagaagttagatgcaatcactgatgaggagaatgacatgctcgatctggcatatggactaacagacagatcacggttgggctgccaaatctgtttgacaaaatctatggacaatatgactgttcgagtgcctgaaacagtggctgatgccagacaatccattgatgtgggcaagacctcctgaactagaacaaataggaatattttcatggaattttacctatttttataattattatttcttaaagtgattaaatgagaacatggatgagtggacttcatattatgactagctttactattttaattcaccttgcataactactgaattttgtcattcttgaaagtatgcaatttttattttggttatattacaaaaatgtcaatcaaatattaaaaaatagttaatgtgatagaaaaaccttacatatttttttcttatgtttgtttagcgactttagcaaaatgttttcatataatctcatctgtttacctagaagataggttaaggaaatatattattattcctgtttgatgtgggtgaaggcagagatctaacctggcttgtttagggccataccactaattagaaaatctgtgctagaacctgtgtcttattcctataagctatgtgttcagactgaaactggagaaattatgactattttatttatagtagtagttaaatctgaatgtgtatggacaaaaatatttaattgctcagtaaactgcttaacttcaaagatagttattgaccttataaataaatatttcaaaattttgattcggaagactaagtctggacgtagacattataatgctatcaaagaagtttgatctctgttttgactaaactagaggaaaaatgattggatgtgtttattcttttctaagcagaatggtttaactttgtactctttgaaaaataatgctgatttataaatctctgcctataacagaatggaaaccttatgaatgaattgtgtttctctgtcctgagctggagaagggaatgagcaggctgacacgttgcacagccccaggtggcgccattctctcacgcaaggatggggctgcagggtgagcagcgtgggctgcagtgtgtcagtcccaggagtgagggagtggcaagcaccacagattaccacgtatgtgtggaagacattcgtactcttatctttactataaataaattcataaaagtta

SEQ ID NO: 301760 - DNA, 3555 bp, Homo sapiens
cgtgggtttcatgtactcagccagcatttacttgccagtcaaggtctaggatggctacctgtcctctgcaggagccccaagcctattcattaatttcatttacaattttatagtcataattatttctttgtataatagcattctgagattttccaaaatttcccactgtttttgttttacagtgggcagaattcactttgctctaacttgactccaagatgacacaatttcccagttttttttttaacggctaggggatgggggtatgcggaacagaacacagtggtctagctaaccgatttccgctagacgtccagctatctttcaaaatattttgtttctgcacggcaacttcagccgctaatggccccgccccatgggaccgggcggcgtgggcgtgagaggcggggcggggccgcgctctgcttgccaatgtctttataggtcacccggaaggcacgcggaacctcggcgcggtgcttccagcagggtctctccgccactccagccccgcgcccctcgccgcggccctcgggcgtctgcgccgcagctgccgcccccgcctctttggagtctctcgcggcctcaaagcgcggcctgcgtcgcttccggcagttcccgaccgcgggcgatggctgccgctgggggcgcccggctgctgcgcgccgcttctgctgtcctcggcggcccggccggccggtggctgcaccacgctgggtcccgcgctggatccagcggcctgctgaggaaccgggggccgggcgggagcgcggaggcgagccggtcgctgagcgtgtcggcgcgggcccggagcagctcagaagataaaataacagtccactttataaaccgtgatggtgaaacattaacaaccaaaggaaaagttggtgattctctgctagatgttgtggttgaaaataatctagatattgatggctttggtgcatgtgagggaaccctggcttgttcaacctgtcacctcatctttgaagatcacatatatgagaagttagatgcaatcactgatgaggagaatgacatgctcgatctggcatatggactaacagacagatcacggttgggctgccaaatctgtttgacaaaatctatggacaatatgactgttcgagtgcctgaaacagtggctgatgccagacaatccattgatgtgggcaagacctcctgaactagaacaaataggaatattttcatggaattttacctatttttataattattatttcttaaagtgattaaatgagaacatggatgagtggacttcatattatgactagctttactattttaattcaccttgcataactactgaattttgtcattcttgaaagtatgcaatttttattttggttatattacaaaaatgtcaatcaaatattaaaaaatagttaatgtgatagaaaaaccttacatatttttttcttatgtttgtttagcgactttagcaaaatgttttcatataatctcatctgtttacctagaagataggttaaggaaatatattattattcctgtttgatgtgggtgaaggcagagatctaacctggcttgtttagggccataccactaattagaaaatctgtgctagaacctgtgtcttattcctataagctatgtgttcagactgaaactggagaaattatgactattttatttatagtagtagttaaatctgaatgtgtatggacaaaaatatttaattgctcagtaaactgcttaacttcaaagatagttattgaccttataaataaatatttcaaaattttgattcggaagactaagtctggacgtagacattataatgctatcaaagaagtttgatctctgttttgactaaactagaggaaaaatgattggatgtgtttattcttttctaagcagaatggtttaactttgtactctttgaaaaataatgctgatttataaatctctgcctataacagaatggaaaccttatgaatgaattgtgtttctctgtcctgagctggagaagggaatgagcaggctgacacgttgcacagccccaggtggcgccattctctcacgcaaggatggggctgcagggtgagcagcgtgggctgcagtgtgtcagtcccaggagtgagggagtggcaagcaccacagattaccacgtatgtgtggaagacattcgtactcttatctttactataaataaattcataaaagttaacaaaggggtacacagtatggtctttggaaatataataaaacatcaactaacttggactaattgtgaggaagagcagaacaaattagtagaaagaggttataagacaattgagttagcttcatgtgtattattgcagcttgatcatttatataaatatttgtctagtacaatgcttgacatacagcattgtgttatgcccattggggacacagaggtgaacaagacaaggaatgccatcagggaattcaccttttattaggaaaatataaaatatgtatgtatgtgcagataatttgcttgaactaaactgactagttctgctaaataagattttaaactaattcatatgtaaaaagtgattaggaagaacttgaagtatcatttgatgcttaataactattgagtagttttttttttttttttttggtggggggagcgggggacagggtcttactctgtcactcaggccagagtacaatagtatgatctcggctcactgcaacttctgcctcccagtttcaagggattctcgtgcctcagcctcccaggtagctggtactacaggcacggaccaccacgcctggctaatttttgtattttttctagggacagggttttaccacgttgcccaggctggtcttgaacttttgagctcgagtgatccacccacctcagcctcccaaaatgctgggattacagatgtgagccaccgtgcttggccataactattgaatgctttctatgtggagagtgcttgtcttaattttctgttgctataatagaataacacagactgggtaatttataaagaaaagagatttatttggatcatggttctggaggctgggaggtccaagagcatggtaccagcatctgcttggcatctggtgacagctttcttgctgcatcattacatggtggaagggcaagagaatgcgagtgagagcaagagggctgagataacggcattaatccattcatgaggtctctgctcttaaaggagatcacctcttaaaggacccacctttcaatgccattacactggcaatttaatttcaagatgagttttggaggggacattcaaaccatagcagtgctataattttaaagtacttcaaagccaatttattctcttaattagcttcattattcttgtctttgtgtgtggattacctaaactctccttccagagctactttaatgattatattcaaccaaagcactctaaaatttagagtataaattgtcttatatttcaaattagaaaagttcaaatgaagtttaattgtgttattttataaaaccttctaaaattattaaatggaggatataatctataaatggtt

SEQ ID NO: 301761 - DNA, 1784 bp, Homo sapiens
cgtgggtttcatgtactcagccagcatttacttgccagtcaaggtctaggatggctacctgtcctctgcaggagccccaagcctattcattaatttcatttacaattttatagtcataattatttctttgtataatagcattctgagattttccaaaatttcccactgtttttgttttacagtgggcagaattcactttgctctaacttgactccaagatgacacaatttcccagttttttttttaacggctaggggatgggggtatgcggaacagaacacagtggtctagctaaccgatttccgctagacgtccagctatctttcaaaatattttgtttctgcacggcaacttcagccgctaatggccccgccccatgggaccgggcggcgtgggcgtgagaggcggggcggggccgcgctctgcttgccaatgtctttataggtcacccggaaggcacgcggaacctcggcgcggtgcttccagcagggtctctccgccactccagccccgcgcccctcgccgcggccctcgggcgtctgcgccgcagctgccgcccccgcctctttggagtctctcgcggcctcaaagcgcggcctgcgtcgcttccggcagttcccgaccgcgggcgatggctgccgctgggggcgcccggctgctgcgcgccgcttctgctgtcctcggcggcccggccggccggtggctgcaccacgctgggtcccgcgctggatccagcggcctgctgaggaaccgggggccgggcgggagcgcggaggcgagccggtcgctgagcgtgtcggcgcgggcccggagcagctcagaagataaaataacagtccactttataaaccgtgatggtgaaacattaacaaccaaaggaaaagttggtgattctctgctagatgttgtggttgaaaataatctagatattgatggctttggtgcatgtgagggaaccctggcttgttcaacctgtcacctcatctttgaagatcacatatatgagaagttagatgcaatcactgatgaggagaatgacatgctcgatctggcatatggactaacagacagatcacggttgggctgccaaatctgtttgacaaaatctatggacaatatgactgttcgagtgcctgaaacagtggctgatgccagacaatccattgatgtgggcaagacctcctgaactagaacaaataggaatattttcatggaattttacctatttttataattattatttcttaaagtgattaaatgagaacatggatgagtggacttcatattatgactagctttactattttaattcaccttgcataactactgaattttgtcattcttgaaagtatgcaatttttattttggttatattacaaaaatgtcaatcaaatattaaaaaatagttaatgtgatagaaaaaccttacatatttttttcttatgtttgtttagcgactttagcaaaatgttttcatataatctcatctgtttacctagaagataggttaaggaaatatattattattcctgtttgatgtgggtgaaggcagagatctaacctggcttgtttagggccataccactaattagaaaatctgtgctagaacctgtgtcttattcctataagctatgtgttcagactgaaactggagaaattatgactattttatttatagtagtagttaaatctgaatgtgtatggacaaaaatatttaattgctcagtaaactgcttaacttcaaagatagttattgaccttataaataaatatttcaaaatttt

SEQ ID NO: 301762 - DNA, 3548 bp, Homo sapiens
cgtgggtttcatgtactcagccagcatttacttgccagtcaaggtctaggatggctacctgtcctctgcaggagccccaagcctattcattaatttcatttacaattttatagtcataattatttctttgtataatagcattctgagattttccaaaatttcccactgtttttgttttacagtgggcagaattcactttgctctaacttgactccaagatgacacaatttcccagttttttttttaacggctaggggatgggggtatgcggaacagaacacagtggtctagctaaccgatttccgctagacgtccagctatctttcaaaatattttgtttctgcacggcaacttcagccgctaatggccccgccccatgggaccgggcggcgtgggcgtgagaggcggggcggggccgcgctctgcttgccaatgtctttataggtcacccggaaggcacgcggaacctcggcgcggtgcttccagcagggtctctccgccactccagccccgcgcccctcgccgcggccctcgggcgtctgcgccgcagctgccgcccccgcctctttggagtctctcgcggcctcaaagcgcggcctgcgtcgcttccggcagttcccgaccgcgggcgatggctgccgctgggggcgcccggctgctgcgcgccgcttctgctgtcctcggcggcccggccggccggtggctgcaccacgctgggtcccgcgctggatccagcggcctgctgaggaaccgggggccgggcgggagcgcggaggcgagccggtcgctgagcgtgtcggcgcgggcccggagcagctcagaagataaaataacagtccactttataaaccgtgatggtgaaacattaacaaccaaaggaaaagttggtgattctctgctagatgttgtggttgaaaataatctagatattgatggctttggtgcatgtgagggaaccctggcttgttcaacctgtcacctcatctttgaagatcacatatatgagaagttagatgcaatcactgatgaggagaatgacatgctcgatctggcatatggactaacagacagatcacggttgggctgccaaatctgtttgaccattgatgtgggcaagacctcctgaactagaacaaataggaatattttcatggaattttacctatttttataattattatttcttaaagtgattaaatgagaacatggatgagtggacttcatattatgactagctttactattttaattcaccttgcataactactgaattttgtcattcttgaaagtatgcaatttttattttggttatattacaaaaatgtcaatcaaatattaaaaaatagttaatgtgatagaaaaaccttacatatttttttcttatgtttgtttagcgactttagcaaaatgttttcatataatctcatctgtttacctagaagataggttaaggaaatatattattattcctgtttgatgtgggtgaaggcagagatctaacctggcttgtttagggccataccactaattagaaaatctgtgctagaacctgtgtcttattcctataagctatgtgttcagactgaaactggagaaattatgactattttatttatagtagtagttaaatctgaatgtgtatggacaaaaatatttaattgctcagtaaactgcttaacttcaaagatagttattgaccttataaataaatatttcaaaattttgattcggaagactaagtctggacgtagacattataatgctatcaaagaagtttgatctctgttttgactaaactagaggaaaaatgattggatgtgtttattcttttctaagcagaatggtttaactttgtactctttgaaaaataatgctgatttataaatctctgcctataacagaatggaaaccttatgaatgaattgtgtttctctgtcctgagctggagaagggaatgagcaggctgacacgttgcacagccccaggtggcgccattctctcacgcaaggatggggctgcagggtgagcagcgtgggctgcagtgtgtcagtcccaggagtgagggagtggcaagcaccacagattaccacgtatgtgtggaagacattcgtactcttatctttactataaataaattcataaaagttaacaaaggggtacacagtatggtctttggaaatataataaaacatcaactaacttggactaattgtgaggaagagcagaacaaattagtagaaagaggttataagacaattgagttagcttcatgtgtattattgcagcttgatcatttatataaatatttgtctagtacaatgcttgacatacagcattgtgttatgcccattggggacacagaggtgaacaagacaaggaatgccatcagggaattcaccttttattaggaaaatataaaatatgtatgtatgtgcagataatttgcttgaactaaactgactagttctgctaaataagattttaaactaattcatatgtaaaaagtgattaggaagaacttgaagtatcatttgatgcttaataactattgagtagttttttttttttttttttggtggggggagcgggggacagggtcttactctgtcactcaggccagagtacaatagtatgatctcggctcactgcaacttctgcctcccagtttcaagggattctcgtgcctcagcctcccaggtagctggtactacaggcacggaccaccacgcctggctaatttttgtattttttctagggacagggttttaccacgttgcccaggctggtcttgaacttttgagctcgagtgatccacccacctcagcctcccaaaatgctgggattacagatgtgagccaccgtgcttggccataactattgaatgctttctatgtggagagtgcttgtcttaattttctgttgctataatagaataacacagactgggtaatttataaagaaaagagatttatttggatcatggttctggaggctgggaggtccaagagcatggtaccagcatctgcttggcatctggtgacagctttcttgctgcatcattacatggtggaagggcaagagaatgcgagtgagagcaagagggcaaaatgattatccttttatcaggagcccacttctgacataactaacccacacctgagataacggcattaatccattcatgaggtctctgctcttaaaggagatcacctcttaaaggacccacctttcaatgccattacactggcaatttaatttcaagatgagttttggaggggacattcaaaccatagcagtgctataattttaaagtacttcaaagccaatttattctcttaattagcttcattattcttgtctttgtgtgtggattacctaaactctccttccagagctactttaatgattatattcaaccaaagcactctaaaatttagagtataaattgtcttatatttcaaattagaaaagttcaaatgaagtttaattgtgttattttataaaaccttctaaaattattaaatggaggatataatctataaatggtt

SEQ ID NO: 301763 - DNA, 2651 bp, Homo sapiens
agttgctctgatactgagtcactgatgggagctaagccagacacggcatcaacggtaggtcgatgccgtggatcattgattctgactaacacatcgtaatgatccaagtatcgacttgttcagatgctgctcctgcaacattcagctcgagctgaatgccacgaccaggtccaattgcactgatgcggctacatgaactccttcacacgtatagacaaactagagagtcatttacagtggtcatattcaccatagtattccataatgtagtcactgtatcttcaaagtgactgtcaacactggagaacatggatgagtggacttcatattatgactagctttactattttaattcaccttgcataactactgaattttgtcattcttgaaagtatgcaatttttattttggttatattacaaaaatgtcaatcaaatattaaaaaatagttaatgtgatagaaaaaccttacatatttttttcttatgtttgtttagcgactttagcaaaatgttttcatataatctcatctgtttacctagaagataggttaaggaaatatattattattcctgtttgatgtgggtgaaggcagagatctaacctggcttgtttagggccataccactaattagaaaatctgtgctagaacctgtgtcttattcctataagctatgtgttcagactgaaactggagaaattatgactattttatttatagtagtagttaaatctgaatgtgtatggacaaaaatatttaattgctcagtaaactgcttaacttcaaagatagttattgaccttataaataaatatttcaaaattttgattcggaagactaagtctggacgtagacattataatgctatcaaagaagtttgatctctgttttgactaaactagaggaaaaatgattggatgtgtttattcttttctaagcagaatggtttaactttgtactctttgaaaaataatgctgatttataaatctctgcctataacagaatggaaaccttatgaatgaattgtgtttctctgtcctgagctggagaagggaatgagcaggctgacacgttgcacagccccaggtggcgccattctctcacgcaaggatggggctgcagggtgagcagcgtgggctgcagtgtgtcagtcccaggagtgagggagtggcaagcaccacagattaccacgtatgtgtggaagacattcgtactcttatctttactataaataaattcataaaagttaacaaaggggtacacagtatggtctttggaaatataataaaacatcaactaacttggactaattgtgaggaagagcagaacaaattagtagaaagaggttataagacaattgagttagcttcatgtgtattattgcagcttgatcatttatataaatatttgtctagtacaatgcttgacatacagcattgtgttatgcccattggggacacagaggtgaacaagacaaggaatgccatcagggaattcaccttttattaggaaaatataaaatatgtatgtatgtgcagataatttgcttgaactaaactgactagttctgctaaataagattttaaactaattcatatgtaaaaagtgattaggaagaacttgaagtatcatttgatgcttaataactattgagtagttttttttttttttttttggtggggggagcgggggacagggtcttactctgtcactcaggccagagtacaatagtatgatctcggctcactgcaacttctgcctcccagtttcaagggattctcgtgcctcagcctcccaggtagctggtactacaggcacggaccaccacgcctggctaatttttgtattttttctagggacagggttttaccacgttgcccaggctggtcttgaacttttgagctcgagtgatccacccacctcagcctcccaaaatgctgggattacagatgtgagccaccgtgcttggccataactattgaatgctttctatgtggagagtgcttgtcttaattttctgttgctataatagaataacacagactgggtaatttataaagaaaagagatttatttggatcatggttctggaggctgggaggtccaagagcatggtaccagcatctgcttggcatctggtgacagctttcttgctgcatcattacatggtggaagggcaagagaatgcgagtgagagcaagagggcaaaatgattatccttttatcaggagcccacttctgacataactaacccacacctgagataacggcattaatccattcatgaggtctctgctcttaaaggagatcacctcttaaaggacccacctttcaatgccattacactggcaatttaatttcaagatgagttttggaggggacattcaaaccatagcagtgctataattttaaagtacttcaaagccaatttattctcttaattagcttcattattcttgtctttgtgtgtggattacctaaactctccttccagagctactttaatgattatattcaaccaaagcactctaaaatttagagtataaattgtcttatatttcaaattagaaaagttcaaatgaagtttaattgtgttattttataaaaccttctaaaattattaaatggaggatataatctataaatggtt

SEQ ID NO: 301764 - DNA, 1723 bp, Homo sapiens
cgtgggtttcatgtactcagccagcatttacttgccagtcaaggtctaggatggctacctgtcctctgcaggagccccaagcctattcattaatttcatttacaattttatagtcataattatttctttgtataatagcattctgagattttccaaaatttcccactgtttttgttttacagtgggcagaattcactttgctctaacttgactccaagatgacacaatttcccagttttttttttaacggctaggggatgggggtatgcggaacagaacacagtggtctagctaaccgatttccgctagacgtccagctatctttcaaaatattttgtttctgcacggcaacttcagccgctaatggccccgccccatgggaccgggcggcgtgggcgtgagaggcggggcggggccgcgctctgcttgccaatgtctttataggtcacccggaaggcacgcggaacctcggcgcggtgcttccagcagggtctctccgccactccagccccgcgcccctcgccgcggccctcgggcgtctgcgccgcagctgccgcccccgcctctttggagtctctcgcggcctcaaagcgcggcctgcgtcgcttccggcagttcccgaccgcgggcgatggctgccgctgggggcgcccggctgctgcgcgccgcttctgctgtcctcggcggcccggccggccggtggctgcaccacgctgggtcccgcgctggatccagcggcctgctgaggaaccgggggccgggcgggagcgcggaggcgagccggtcgctgagcgtgtcggcgcgggcccggagcagctcagaagataaaataacagtccactttataaaccgtgatggtgaaacattaacaaccaaaggaaaagttggtgattctctgctagatgttgtggttgaaaataatctagatattgatggctttggtgcatgtgagggaaccctggcttgttcaacctgtcacctcatctttgaagatcacatatatgagaagttagatgcaatcactgatgaggagaatgacatgctcgatctggcatatggactaacagacagatcacggttgggctgccaaatctgtttgacaaaatctatggacaatatgactgttcgagtgcctgaaacagtggctgatgccagacaatcctatttttataattattatttcttaaagtgattaaatgagaacatggatgagtggacttcatattatgactagctttactattttaattcaccttgcataactactgaattttgtcattcttgaaagtatgcaatttttattttggttatattacaaaaatgtcaatcaaatattaaaaaatagttaatgtgatagaaaaaccttacatatttttttcttatgtttgtttagcgactttagcaaaatgttttcatataatctcatctgtttacctagaagataggttaaggaaatatattattattcctgtttgatgtgggtgaaggcagagatctaacctggcttgtttagggccataccactaattagaaaatctgtgctagaacctgtgtcttattcctataagctatgtgttcagactgaaactggagaaattatgactattttatttatagtagtagttaaatctgaatgtgtatggacaaaaatatttaattgctcagtaaactgcttaacttcaaagatagttattgaccttataaataaatatttcaaaatttt

SEQ ID NO: 301765 - DNA, 1199 bp, Homo sapiens
cgtgggtttcatgtactcagccagcatttacttgccagtcaaggtctaggatggctacctgtcctctgcaggagccccaagcctattcattaatttcatttacaattttatagtcataattatttctttgtataatagcattctgagattttccaaaatttcccactgtttttgttttacagtgggcagaattcactttgctctaacttgactccaagatgacacaatttcccagttttttttttaacggctaggggatgggggtatgcggaacagaacacagtggtctagctaaccgatttccgctagacgtccagctatctttcaaaatattttgtttctgcacggcaacttcagccgctaatggccccgccccatgggaccgggcggcgtgggcgtgagaggcggggcggggccgcgctctgcttgccaatgtctttataggtcacccggaaggcacgcggaacctcggcgcggtgcttccagcagggtctctccgccactccagccccgcgcccctcgccgcggccctcgggcgtctgcgccgcagctgccgcccccgcctctttggagtctctcgcggcctcaaagcgcggcctgcgtcgcttccggcagttcccgaccgcgggcgatggctgccgctgggggcgcccggctgctgcgcgccgcttctgctgtcctcggcggcccggccggccggtggctgcaccacgctgggtcccgcgctggatccagcggcctgctgaggaaccgggggccgggcgggagcgcggaggcgagccggtcgctgagcgtgtcggcgcgggcccggagcagctcagaagataaaataacagtccactttataaaccgtgatggtgaaacattaacaaccaaaggaaaagttggtgattctctgctagatgttgtggttgaaaataatctagatattgatggctttgaacaacctctgagctgcctcactctgggcacactgcctatgggatagctgtgctccacaaggagtcctacttctgctgctgctgtatgctgctgcttcaatgaaagttgctatttaacacgaccgacccgccctgaatcgtttcctgggcaaagctaagaaccttcctgggctaagccccaattttggggcctgtctaccctgcatcaattctatatgaattttagaatagtttttttataattctgtgaaaaatgat

SEQ ID NO: 301766 - DNA, 763 bp, Homo sapiens
aaagtgtagctttcttttatagtctgtgtggttttaattatctaggaattgattaatcattttcttggccttgctaataacctcagttctccaccattgtgccttctgattgtttccttgcttgtcagctctttgaccaaaaagtagtggtctggtgaaacagttaatagataataggaaccaaaggctaaaatgaagctttggtacaccaagtttattgtattcatatttaccttttgttattctctagttgatagggttggttatatctgttttgacataaaggaaatttaaaaggttaataagttccctgactgctttgggtaagaaaatataaagactatcttaaacaactgcattgccttgtgaatatatatacgtaatactaaaccataccttcccccttttccatacagatcacggttgggctgccaaatctgtttgacaaaatctatggacaatatgactgttcgagtgcctgaaacagtggctgatgccagacaatccattgatgtgggcaagacctcctgaactagaacaaataggaatattttcatggaattttacctatttttataattattatttcttaaagtgattaaatgagaacatggatgagtggacttcatattatgactagctttactattttaattcaccttgcataactactgaattttgtcattcttgaaagtatgcaatttttattttggttatattacaaaaatgtcaatcaaatattaaaaaatagttaatgtgatag

SEQ ID NO: 301767 - DNA, 481 bp, Homo sapiens
gggtatgcggaacagaacacagtggtctagctaaccgatttccgctagacgtccagctatctttcaaaatattttgtttctgcacggcaacttcagccgctaaaaaagcatccagcttacaacggaacctggagggttggtaaaggccccctgcgctggccccgccccatgggaccgggcggcgtgggcgtgagaggcggggcggggccgcgctctgcttgccaatgtctttataggtcacccggaaggcacgcggaacctcggcgcggtgcttccagcagggtctctccgccactccagccccgcgcccctcgccgcggccctcgggcgtctgcgccgcagctgccgcccccgcctctttggagtctctcgcggcctcaaagcgcggcctgcgtcgcttccggcagttcccgaccgcgggcgatggctgccgctgggggcgcccggctgctgcgcgccgcttctgctgtcctcggcggcc

SEQ ID NO: 301768 - DNA, 1894 bp, Homo sapiens
  misc_feature (786)..(786): n is a, c, g, or t
  misc_feature (789)..(789): n is a, c, g, or t
  misc_feature (794)..(795): n is a, c, g, or t
  misc_feature (816)..(816): n is a, c, g, or t
  misc_feature (818)..(819): n is a, c, g, or t
  misc_feature (823)..(823): n is a, c, g, or t
  misc_feature (836)..(836): n is a, c, g, or t
  misc_feature (840)..(840): n is a, c, g, or t
  misc_feature (855)..(855): n is a, c, g, or t
  misc_feature (858)..(858): n is a, c, g, or t
tctaagatgacctctactgggatgacaggggtgagttgacaaagcttcgcacatcattcatcctccagcagtctcacccaggcatgatttcatgggagtggcagaggagcgagggtgcttttgcagaaaggtacaagagctttttcaggtcttggcttgcatcacatccttatccaatgaaccaaagcaagtgacatggctgagagtccctgtaggaggtgcagggagtgtggggactctacaaggtgacatgtcaaaaggcaggaatacagggaacagtaaagcactgggactgttattacaaccagtaacttgtttctagaagtctgcttgatgaaaccttcaagccacatggaggagtcctcaaagatgtgcttgagatattcatataatttcttctgctctaagaaccatgaggtgaacttgacctcaaagtgagaccttgacattggggcatttaagtcagtatctgtgtcttccaccccacacctgatccctgacccaaagtctccacagagactaatagaacccatcattagaggaatggggacctactgcactcttcgtagtgccagggttggatgtgttgcttctcctaagctgtttccctgcagggcagcacagcactgcctcggaactcaaggttagcctcgtgcctctcggccgaatctgttactcaaggattcctgaaaggcagtctgcctagaaatggaggtcaaatgaaagaaaggcctaagggttttttttgtcttgttttgttttgggttttttttgagacagagtctngcnctgtnnccaggctggagtgcagtggcncnntctnggctcactgcaanctcngcctcccaggttcangcnattctcctgcctcggcctcccaaggtgctgggactacaggcatgagccactgtgcctgaccttacagcagtattttttaaaaatcaaaattaatgcaaaaatccatgatgaggccaggcttggtggctcatgcctgtaattccagcactttgggaggatcccttgagcccaggtgtttgagaccagtttgggtaacataggaagagcttgtctctacaaacaaaaatttaaaaacaatgagctgggcatggaactcacacctctagccccagctactcgggctgaggtgggaggatggcttgagcccaggagttcaaggatgcagtgtgctttgattgcactactgcgcttcaccctgggcaacagagtgagaccccatctctttaaaaaaaaaaaaaaatccatgatgaacaaaacaagtatttgtttgagacggggtctcgctctgtcgcccaggctggagtgcagtggtgccatctcagctcactgcaacctccgccttctgggttcaagcgactctcctgcctcagcctcccgagtagctgggattacaggagcctggcactatgcctggctaatttttgtatttttattggagacaccatgttggtcgtggctggtctccaactcctgacctcgggtgatccgcgccccgcggcctccgaaagtgctgggattacaagcgtgagccaccgtgcccggcctaaataaaattttgaagaggctagaaccccgcacttgtgccttgagcttactgacctcaacaccctggttccactaaaactttatttacaaaattatgctgccggtctgcaggatgtagtttaacaatttgattattttggatattaaaatattttttaagtcttgaaaatattgtttactattaccaaagtttttgaaccttcttaaattctgtaccagaggtgagtgccacaccctaacctagtctgagtttttatgtgtaaagatcataaaacgttgtaagttttctaaaacacataagctctcaataaacgttagcttatcattgtca

SEQ ID NO: 301769 - DNA, 1745 bp, Homo sapiens
  misc_feature (1620)..(1620): n is a, c, g, or t
caagtgcgcgcggaccgctagctccctctgagttgcgctgggcttggctgctgcaccatgaccctggaggcgatccgctactcgcggggctccctgcagatcctagaccagctgctgctgcccaagcagagccgctacgaggcggtgggctcggtgcaccaggcctgggaggccatccgcgccatgaaggtgcggggcgccccggccatagccctggtgggctgtctcagcctcgccgtggagctgcaggcgggcgccgggggaccgggactcgccgcgctcgtggccttcgtgcgcgacaagctgagcttcctcgtcaccgcccggcccaccgctgtcaacatggcccgcgccgcccgcgacctggctgatgttgcagcccgggaggccgaacgggagggcgctacggaagaggcggtccgggagagagtgatctgctgcaccgaggacatgctggagaaagacctcagagacaaccgaagcattggggacctaggagcccgccacctcctggagcgggtggcccccagcggtggcaaggtgactgtgctgacccactgtaacactggtgctctggccaccgctggctatggtacagccctaggtgtgattcgctcactgcacagcctgggccgcctggagcatgccttctgcacagagacccggccctacaaccagggagcccggctgacggcctttgagctggtctatgagcagatccccgccacccttatcaccgacagcatggtggctgctgccatggcccataggggcgtgtcagctgtggtcgtgggagctgaccgcgtggttgccaacggcgacacagccaacaaggtgggcacctaccagctggccattgtcgccaagcaccatggcattcccttctacgtggctgcccccagctcttcatgtgacctccgtctggagaccggcaaggagatcattattgaagagcgaccgggccaggagctgaccgatgttaatggggtccggattgcagcacctgggattggagtttggaatcctgccttcgatgtcaccccccacgacctcatcactggtggcatcatcacagaactgggggtctttgcccctgaggagctccggacagccctaaccaccaccatctcttccagggatggaaccctagatggaccccagatgtaaccaactcagctctccctagcctgcctctctaggtttttcaatacatttcttgaatggctacccaaaagctgaccgtccagcccctgaccacacttgttcctagtgcagggagctcagacagggccttccatctagagcccagcacctagagccaggctgcccagattcaaatcctgactccgccacttttcccactgtatgatcttgggcaagtcacttcacctctctgtgccttggtttcctcatttataaaatgtggataacaggccgggcgcagtggctcacgcctgtaatcccagcactttgggaggccgaggcaggtggatcacaagatcaggagattgagaccatcctggctaacatggtgaaaccccatctctgctgaaaatacaaaaaattagccgggtgtggtggtgggcacctgcagtcccagctacttgggaggctgaggcnggagaatggcgtgaaactgggaggcagagcttgcagtgagccgagatagcgccactgcactccagcctgggcaacagagcgagactccgtctcaaaaataaatataattaattaattatttaatt

SEQ ID NO: 301770 - DNA, 583 bp, Homo sapiens
  misc_feature (120)..(120): n is a, c, g, or t
gagatcaagtatcactcgttacccaggctggaatgtagaggcgagatctcagctcactgaaacctgtgcctccccggttcaagcgattctcctgccacagctacttgggaggctgaggcnggagaatggcgtgaaactgggaggcagagcttgcagtgagccgagatagcgccactgcactccagcctgggcaacagagcgagactccgtctcaaaaataaatataattaattaattatttaattaaaaaaataaaaaataaatgtggataatactagtacctccctcttaaggtcagggctggagctagggtgacatctccagggcagaattttaagaggacaccaaaaaagctcagcaaccaagataaaaaatattttaaagcaatattttgttttgggttttttttttttgagatcaagtatcactcgttacccaggctggaatgtagaggcgagatctcagctcactgaaacctgtgcctccccggttcaagcgattctcctgccacagcctcctgagtagctgggattacaggcatgcgccaccatgcccagctaatttttctatttttagtagagac

SEQ ID NO: 301771 - DNA, 2217 bp, Homo sapiens
caagtgcgcgcggaccgctagctccctctgagttgcgctgggcttggctgctgcaccatgaccctggaggcgatccgctactcgcggggctccctgcagatcctagaccagctgctgctgcccaagcagagccgctacgaggcggtgggctcggtgcaccaggcctgggaggccatccgcgccatgaaggtgcggggcgccccggccatagccctggtgggctgtctcagcctcgccgtggagctgcaggcgggcgccgggggaccgggactcgccgcgctcgtggccttcgtgcgcgacaagctgagcttcctcgtcaccgcccggcccaccgctgtcaacatggcccgcgccgcccgcgacctggctgatgttgcagcccgggaggccgaacgggagggcgctacggaagaggcggtccgggagagagtgatctgctgcaccgaggacatgctggagaaagacctcagagacaaccgaagcattggggacctaggagcccgccacctcctggagcgggtggcccccagcggtggcaaggtgactgtgctgacccactgtaacactggtgctctggccaccgctggctatggtacagccctaggtgtgattcgctcactgcacagcctgggccgcctggagcatgccttctgcacagagacccggccctacaaccagggagcccggctgacggcctttgagctggtctatgagcagatccccgccacccttatcaccgacagcatggtggctgctgccatggcccataggggcgtgtcagctgtggtcgtgggagctgaccgcgtggttgccaacggcgacacagccaacaaggtgggcacctaccagctggccattgtcgccaagcaccatggcattcccttctacgtggctgcccccagctcttcatgtgacctccgtctggagaccggcaaggagatcattattgaagagcgaccgggccaggagctgaccgatgttaatggggtccggattgcagcacctgggattggagtttggaatcctgccttcgatgtcaccccccacgacctcatcactggtggcatcatcacagaactgggggtctttgcccctgaggagctccggacagccctaaccaccaccatctcttccagggatggaaccctagatggaccccagatgtaaccaactcagctctccctagcctgcctcggcctcccaaggtgctgggactacaggcatgagccactgtgcctgaccttacagcagtattttttaaaaatcaaaattaatgcaaaaatccatgatgaggccaggcttggtggctcatgcctgtaattccagcactttgggaggatcccttgagcccaggtgtttgagaccagtttgggtaacataggaagagcttgtctctacaaacaaaaatttaaaaacaatgagctgggcatggaactcacacctctagccccagctactcgggctgaggtgggaggatggcttgagcccaggagttcaaggatgcagtgtgctttgattgcactactgcgcttcaccctgggcaacagagtgagaccccatctctttaaaaaaaaaaaaaaatccatgatgaacaaaacaagtatttgtttgagacggggtctcgctctgtcgcccaggctggagtgcagtggtgccatctcagctcactgcaacctccgccttctgggttcaagcgactctcctgcctcagcctcccgagtagctgggattacaggagcctggcactatgcctggctaatttttgtatttttattggagacaccatgttggtcgtggctggtctccaactcctgacctcgggtgatccgcgccccgcggcctccgaaagtgctgggattacaagcgtgagccaccgtgcccggcctaaataaaattttgaagaggctagaaccccgcacttgtgccttgagcttactgacctcaacaccctggttccactaaaactttatttacaaaattatgctgccggtctgcaggatgtagtttaacaatttgattattttggatattaaaatattttttaagtcttgaaaatattgtttactattaccaaagtttttgaaccttcttaaattctgtaccagaggtgagtgccacaccctaacctagtctgagtttttatgtgtaaagatcataaaacgttgtaagttttctaaaacacataagctctcaataaacgttagcttatcattgtca

SEQ ID NO: 301772 - DNA, 2378 bp, Homo sapiens
caagtgcgcgcggaccgctagctccctctgagttgcgctgggcttggctgctgcaccatgaccctggaggcgatccgctactcgcggggctccctgcagatcctagaccagctgctgctgcccaagcagagccgctacgaggcggtgggctcggtgcaccaggcctgggaggccatccgcgccatgaaggtgcggggcgccccggccatagccctggtgggctgtctcagcctcgccgtggagctgcaggcgggcgccgggggaccgggactcgccgcgctcgtggccttcgtgcgcgacaagctgagcttcctcgtcaccgcccggcccaccgctgtcaacatggcccgcgccgcccgcgacctggctgatgttgcagcccgggaggccgaacgggagggcgctacggaagaggcggtccgggagagagtgatctgctgcaccgaggacatgctggagaaagacctcagagacaaccgaagcattggggacctaggagcccgccacctcctggagcgggtggcccccagcggtggcaaggtgactgtgctgacccactgtaacactggtgctctggccaccgctggctatggtacagccctaggtgtgattcgctcactgcacagcctgggccgcctggagcatgccttctgcacagagacccggccctacaaccagggagcccggctgacggcctttgagctggtctatgagcagatccccgccacccttatcaccgacagcatggtggctgctgccatggcccataggggcgtgtcagctgtggtcgtgggagctgaccgcgtggttgccaacggcgacacagccaacaaggtgggcacctaccagctggccattgtcgccaagcaccatggcattcccttctacgtggctgcccccagctcttcatgtgacctccgtctggagaccggcaaggagatcattattgaagagcgaccgggccaggagctgaccgatgttaatggggtccggattgcagcacctgggattggagtttggaatcctgccttcgatgtcaccccccacgacctcatcactggtggcatcatcacagaactgggggtctttgcccctgaggagctccggacagccctaaccaccaccatctcttccagggatggaaccctagatggaccccagatgtaaccaactcagctctccctagcctgcctctctaggtttttcaatacatttcttgaatggctacccaaaagctgaccgtccagcccctgaccacacttgttcctagtgcagggagctcagacagggccttccatctagagcccagcacctagagccaggctgcccagattcaaatcctgactccgccactcggcctcccaaggtgctgggactacaggcatgagccactgtgcctgaccttacagcagtattttttaaaaatcaaaattaatgcaaaaatccatgatgaggccaggcttggtggctcatgcctgtaattccagcactttgggaggatcccttgagcccaggtgtttgagaccagtttgggtaacataggaagagcttgtctctacaaacaaaaatttaaaaacaatgagctgggcatggaactcacacctctagccccagctactcgggctgaggtgggaggatggcttgagcccaggagttcaaggatgcagtgtgctttgattgcactactgcgcttcaccctgggcaacagagtgagaccccatctctttaaaaaaaaaaaaaaatccatgatgaacaaaacaagtatttgtttgagacggggtctcgctctgtcgcccaggctggagtgcagtggtgccatctcagctcactgcaacctccgccttctgggttcaagcgactctcctgcctcagcctcccgagtagctgggattacaggagcctggcactatgcctggctaatttttgtatttttattggagacaccatgttggtcgtggctggtctccaactcctgacctcgggtgatccgcgccccgcggcctccgaaagtgctgggattacaagcgtgagccaccgtgcccggcctaaataaaattttgaagaggctagaaccccgcacttgtgccttgagcttactgacctcaacaccctggttccactaaaactttatttacaaaattatgctgccggtctgcaggatgtagtttaacaatttgattattttggatattaaaatattttttaagtcttgaaaatattgtttactattaccaaagtttttgaaccttcttaaattctgtaccagaggtgagtgccacaccctaacctagtctgagtttttatgtgtaaagatcataaaacgttgtaagttttctaaaacacataagctctcaataaacgttagcttatcattgtca

SEQ ID NO: 301773 - DNA, 2120 bp, Homo sapiens
caagtgcgcgcggaccgctagctccctctgagttgcgctgggcttggctgctgcaccatgaccctggaggcgatccgctactcgcggggctccctgcagatcctagaccagctgctgctgcccaagcagagccgctacgaggcggtgggctcggtgcaccaggcctgggaggccatccgcgccatgaaggtgcggggcgccccggccatagccctggtgggctgtctcagcctcgccgtggagctgcaggcgggcgccgggggaccgggactcgccgcgctcgtggccttcgtgcgcgacaagctgagcttcctcgtcaccgcccggcccaccgctgtcaacatggcccgcgccgcccgcgacctggctgatgttgcagcccgggaggccgaacgggagggcgctacggaagaggcggtccgggagagagtgatctgctgcaccgaggacatgctggagaaagacctcagagacaaccgaagcattggggacctaggagcccgccacctcctggagcgggtggcccccagcggtggcaaggtgactgtgctgacccactgtaacactggtgctctggccaccgctggctatggtacagccctaggtgtgattcgctcactgcacagcctgggccgcctggagcatgccttctgcacagagacccggccctacaaccagggagcccggctgacggcctttgagctggtctatgagcagatccccgccacccttatcaccgacagcatggtggctgctgccatggcccataggggcgtgtcagctgtggtcgtgggagctgaccgcgtggttgccaacggcgacacagccaacaaggtgggcacctaccagctggccattgtcgccaagcaccatggcattcccttctacgtggctgcccccagctcttcatgtgacctccgtctggagaccggcaaggagatcattattgaagagcgaccgggccaggagctgaccgatgttaatggggtccggattgcagcacctgggattggagtttggaatcctgccttcgatgtcaccccccacgacctcatcactggtggcatcatcacagaactgggggtctttgcccctgaggagctccggacagccctaaccaccaccatctcttccagggatggaaccctagatggaccccagatgtaaccaactcagctctccctagcctgcctctctaggtttttcaatacatttcttgaatggctacccaaaagctgaccgtccagcccctgaccacacttgttcctagtgcagggagctcagacagggccttccatctagagcccagcacctagagccaggctgcccagattcaaatcctgactccgccactcggcctcccaaggtgctgggactacaggcatgagccactgtgcctgaccttacagcagtattttttaaaaatcaaaattaatgcaaaaatccatgatgaggccaggcttggtggctcatgcctgtaattccagcactttgggaggatcccttgagcccaggtgtttgagaccagtttgggtaacataggaagagcttgtctctacaaacaaaaatttaaaaacaatgagctgggcatggaactcacacctctagccccagcctcccgagtagctgggattacaggagcctggcactatgcctggctaatttttgtatttttattggagacaccatgttggtcgtggctggtctccaactcctgacctcgggtgatccgcgccccgcggcctccgaaagtgctgggattacaagcgtgagccaccgtgcccggcctaaataaaattttgaagaggctagaaccccgcacttgtgccttgagcttactgacctcaacaccctggttccactaaaactttatttacaaaattatgctgccggtctgcaggatgtagtttaacaatttgattattttggatattaaaatattttttaagtcttgaaaatattgtttactattaccaaagtttttgaaccttcttaaattctgtaccagaggtgagtgccacaccctaacctagtctgagtttttatgtgtaaagatcataaaacgttgtaagttttctaaaacacataagctctcaataaacgttagcttatcattgtca

SEQ ID NO: 301774 - DNA, 2419 bp, Homo sapiens
caagtgcgcgcggaccgctagctccctctgagttgcgctgggcttggctgctgcaccatgaccctggaggcgatccgctactcgcggggctccctgcagatcctagaccagctgctgctgcccaagcagagccgctacgaggcggtgggctcggtgcaccaggcctgggaggccatccgcgccatgaaggtgcggggcgccccggccatagccctggtgggctgtctcagcctcgccgtggagctgcaggcgggcgccgggggaccgggactcgccgcgctcgtggccttcgtgcgcgacaagctgagcttcctcgtcaccgcccggcccaccgctgtcaacatggcccgcgccgcccgcgacctggctgatgttgcagcccgggaggccgaacgggagggcgctacggaagaggcggtccgggagagagtgatctgctgcaccgaggacatgctggagaaagacctcagagacaaccgaagcattggggacctaggagcccgccacctcctggagcgggtggcccccagcggtggcaaggtgactgtgctgacccactgtaacactggtgctctggccaccgctggctatggtacagccctagacgtgaaacggagctatgcgagcattgggaagagcataccaggcagagggaactgccactgcgagggcccctgggcgggactgtgctcggtaagcctttggcaatccacgcccagactaggagcctgcacccctaaccaatggaccaccctgtctgtttgcccctccccggggccttctcctggtgggtggggcccccgcaggtgtgattcgctcactgcacagcctgggccgcctggagcatgccttctgcacagagacccggccctacaaccagggagcccggctgacggcctttgagctggtctatgagcagatccccgccacccttatcaccgacagcatggtggctgctgccatggcccataggggcgtgtcagctgtggtcgtgggagctgaccgcgtggttgccaacggcgacacagccaacaaggtgggcacctaccagctggccattgtcgccaagcaccatggcattcccttctacgtggctgcccccagctcttcatgtgacctccgtctggagaccggcaaggagatcattattgaagagcgaccgggccaggagctgaccgatgttaatggggtccggattgcagcacctgggattggagtttggaatcctgccttcgatgtcaccccccacgacctcatcactggtggcatcatcacagaactgggggtctttgcccctgaggagctccggacagccctaaccaccaccatctcttccagggatggaaccctagatggaccccagatgtaaccaactcagctctccctagcctgcctcggcctcccaaggtgctgggactacaggcatgagccactgtgcctgaccttacagcagtattttttaaaaatcaaaattaatgcaaaaatccatgatgaggccaggcttggtggctcatgcctgtaattccagcactttgggaggatcccttgagcccaggtgtttgagaccagtttgggtaacataggaagagcttgtctctacaaacaaaaatttaaaaacaatgagctgggcatggaactcacacctctagccccagctactcgggctgaggtgggaggatggcttgagcccaggagttcaaggatgcagtgtgctttgattgcactactgcgcttcaccctgggcaacagagtgagaccccatctctttaaaaaaaaaaaaaaatccatgatgaacaaaacaagtatttgtttgagacggggtctcgctctgtcgcccaggctggagtgcagtggtgccatctcagctcactgcaacctccgccttctgggttcaagcgactctcctgcctcagcctcccgagtagctgggattacaggagcctggcactatgcctggctaatttttgtatttttattggagacaccatgttggtcgtggctggtctccaactcctgacctcgggtgatccgcgccccgcggcctccgaaagtgctgggattacaagcgtgagccaccgtgcccggcctaaataaaattttgaagaggctagaaccccgcacttgtgccttgagcttactgacctcaacaccctggttccactaaaactttatttacaaaattatgctgccggtctgcaggatgtagtttaacaatttgattattttggatattaaaatattttttaagtcttgaaaatattgtttactattaccaaagtttttgaaccttcttaaattctgtaccagaggtgagtgccacaccctaacctagtctgagtttttatgtgtaaagatcataaaacgttgtaagttttctaaaacacataagctctcaataaacgttagcttatcattgtca

SEQ ID NO: 301775 - DNA, 1607 bp, Homo sapiens
caagtgcgcgcggaccgctagctccctctgagttgcgctgggcttggctgctgcaccatgaccctggaggcgatccgctactcgcggggctccctgcagatcctagaccagctgctgctgcccaagcagagccgctacgaggcggtgggctcggtgcaccaggcctgggaggccatccgcgccatgaaggtgcggggcgccccggccatagccctggtgggctgtctcagcctcgccgtggagctgcaggcgggcgccgggggaccgggactcgccgcgctcgtggccttcgtgcgcgacaagctgagcttcctcgtcaccgcccggcccaccgctgtcaacatggcccgcgccgcccgcgacctggctgatgttgcagcccgggaggccgaacgggagggcgctacggaagaggcggtccgggagagagtgatctgctgcaccgaggacatgctggagaaagacctcagagacaaccgaagcattggggacctaggagcccgccacctcctggagcgggtggcccccagcggtggcaaggtgactgtgctgacccactgtaacactggtgctctggccaccgctggctatggtacagccctaggtgtgattcgctcactgcacagcctgggccgcctggagcatgccttctgcacagagacccggccctacaaccagggagcccggctgacggcctttgagctggtctatgagcagatccccgccacccttatcaccgacagcatggtggctgctgccatggcccataggggcgtgtcagctgtggtcgtgggagctgaccgcgtggttgccaacggcgacacagccaacaaggtgggcacctaccagctggccattgtcgccaagcaccatggcattcccttctacgtggctgcccccagctcttcatgtgacctccgtctggagaccggcaaggagatcattattgaagagcgaccgggccaggagctgaccgatgttaatggggtccggattgcagcacctgggattggagtttggaatcctgccttcgatgtcaccccccacgacctcatcactggtggcatcatcacagaactgggggtctttgcccctgaggagcctcccgagtagctgggattacaggagcctggcactatgcctggctaatttttgtatttttattggagacaccatgttggtcgtggctggtctccaactcctgacctcgggtgatccgcgccccgcggcctccgaaagtgctgggattacaagcgtgagccaccgtgcccggcctaaataaaattttgaagaggctagaaccccgcacttgtgccttgagcttactgacctcaacaccctggttccactaaaactttatttacaaaattatgctgccggtctgcaggatgtagtttaacaatttgattattttggatattaaaatattttttaagtcttgaaaatattgtttactattaccaaagtttttgaaccttcttaaattctgtaccagaggtgagtgccacaccctaacctagtctgagtttttatgtgtaaagatcataaaacgttgtaagttttctaaaacacataagctctcaataaacgttagcttatcattgtca

SEQ ID NO: 301776 - DNA, 2009 bp, Homo sapiens
caagtgcgcgcggaccgctagctccctctgagttgcgctgggcttggctgctgcaccatgaccctggaggcgatccgctactcgcggggctccctgcagatcctagaccagctgctgctgcccaagcagagccgctacgaggcggtgggctcggtgcaccaggcctgggaggccatccgcgccatgaaggtgcggggcgccccggccatagccctggtgggctgtctcagcctcgccgtggagctgcaggcgggcgccgggggaccgggactcgccgcgctcgtggccttcgtgcgcgacaagctgagcttcctcgtcaccgcccggcccaccgctgtcaacatggcccgcgccgcccgcgacctggctgatgttgcagcccgggaggccgaacgggagggcgctacggaagaggcggtccgggagagagtgatctgctgcaccgaggacatgctggagaaagacctcagagacaaccgaagcattggggacctaggagcccgccacctcctggagcgggtggcccccagcggtggcaaggtgactgtgctgacccactgtaacactggtgctctggccaccgctggctatggtacagccctaggtgtgattcgctcactgcacagcctgggccgcctggagcatgccttctgcacagagacccggccctacaaccagggagcccggctgacggcctttgagctggtctatgagcagatccccgccacccttatcaccgacagcatggtggctgctgccatggcccataggggcgtgtcagctgtggtcgtgggagctgaccgcgtggttgccaacggcgacacagccaacaaggtgggcacctaccagctggccattgtcgccaagcaccatggcattcccttctacgtggctgcccccagctcttcatgtgacctccgtctggagaccggcaaggagatcattattgaagagcgaccgggccaggagctgaccgatgttaatggggtccggattgcagcacctgggattggagtttggaatcctgccttcgatgtcaccccccacgacctcatcactggtggcatcatcacagaactgggggtctttgcccctgaggagctccggacagccctaaccaccaccatctcttccagggatggaaccctagatggaccccagatgtaaccaactcagctctccctagcctgcctctctaggtttttcaatacatttcttgaatggctacccaaaagctgaccgtccagcccctgaccacacttgttcctagtgcagggagctcagacagggccttccatctagagcccagcacctagagccaggctgcccagattcaaatcctgactccgccacttttcccactgtatgatcttgggcaagtcacttcacctctctgtgccttggtttcctcatttataaaatgtggataacaggccgggcgcagtggctcacgcctgtaatcccagcactttgggaggccgaggcaggtggatcacaagatcaggagattgagaccatcctggctaacatggtgaaaccccatctggctaatttttgtatttttattggagacaccatgttggtcgtggctggtctccaactcctgacctcgggtgatccgcgccccgcggcctccgaaagtgctgggattacaagcgtgagccaccgtgcccggcctaaataaaattttgaagaggctagaaccccgcacttgtgccttgagcttactgacctcaacaccctggttccactaaaactttatttacaaaattatgctgccggtctgcaggatgtagtttaacaatttgattattttggatattaaaatattttttaagtcttgaaaatattgtttactattaccaaagtttttgaaccttcttaaattctgtaccagaggtgagtgccacaccctaacctagtctgagtttttatgtgtaaagatcataaaacgttgtaagttttctaaaacacataagctctcaataaacgttagcttatcattgtca

SEQ ID NO: 301777 - DNA, 2477 bp, Homo sapiens
agcacctagagccaggctgcccagattcaaatcctgactccgccacttttcccactgtatgatcttgggcaagtcacttcacctctctgtgccttggtttcctcatttataaaatgtggataacaggccgggcgcagtggctcacgcctgtagtcccagcactttgggaggccgaggcaggtggatcacaagatcaggagattgagaccatcctggctaacatggtgaaacccatctctgctaaaaataaaaaaattggccgggtgtggtggtgggcacctgcggtctccgcctctcgagtagctgggactacaggtgcccgccaccacgcccggctaattttttgaacttttagtagagatggggtttcaccgtgttagccaggatggtctcgatctcctgacctcgtgatccatctgcctgggcctcccaaagtgctgggattacaggcgtgagccaccacgcccagcccaaatattttcaatccacatggttgagtccatggatggagaacccatagaaaaggggggctgcctgtacacatgaggtgttagaaggtgataaatgctaaggacagagagcaggaaactgaaagtgtggggattgctatgcaaaactgatatatcagggaaggcttcaccgagaaggtgtcctttaaacagacgtgaaacggagctatgcgagcattgggaagagcataccaggcagagggaactgccactgcgagggcccctgggcgggactgtgctcggtaagcctttggcaatccacgcccagactaggagcctgcacccctaaccaatggaccaccctgtctgtttgcccctccccggggccttctcctggtgggtggggcccccgcaggtgtgattcgctcactgcacagcctgggccgcctggagcatgccttctgcacagagacccggccctacaaccagggagcccggctgacggcctttgagctggtctatgagcagatccccgccacccttatcaccgacagcatggtggctgctgccatggcccataggggcgtgtcagctgtggtcgtgggagctgaccgcgtggttgccaacggcgacacagccaacaaggtgggcacctaccagctggccattgtcgccaagcaccatggcattcccttctacgtggctgcccccagctcttcatgtgacctccgtctggagaccggcaaggagatcattattgaagagcgaccgggccaggagctgaccgatgttaatggggtccggattgcagcacctgggattggagtttggaatcctgccttcgatgtcaccccccacgacctcatcactggtggcatcatcacagaactgggggtctttgcccctgaggagctccggacagccctaaccaccaccatctcttccagggatggaaccctagatggaccccagatgtaaccaactcagctctccctagcctgcctcggcctcccaaggtgctgggactacaggcatgagccactgtgcctgaccttacagcagtattttttaaaaatcaaaattaatgcaaaaatccatgatgaggccaggcttggtggctcatgcctgtaattccagcactttgggaggatcccttgagcccaggtgtttgagaccagtttgggtaacataggaagagcttgtctctacaaacaaaaatttaaaaacaatgagctgggcatggaactcacacctctagccccagctactcgggctgaggtgggaggatggcttgagcccaggagttcaaggatgcagtgtgctttgattgcactactgcgcttcaccctgggcaacagagtgagaccccatctctttaaaaaaaaaaaaaaatccatgatgaacaaaacaagtatttgtttgagacggggtctcgctctgtcgcccaggctggagtgcagtggtgccatctcagctcactgcaacctccgccttctgggttcaagcgactctcctgcctcagcctcccgagtagctgggattacaggagcctggcactatgcctggctaatttttgtatttttattggagacaccatgttggtcgtggctggtctccaactcctgacctcgggtgatccgcgccccgcggcctccgaaagtgctgggattacaagcgtgagccaccgtgcccggcctaaataaaattttgaagaggctagaaccccgcacttgtgccttgagcttactgacctcaacaccctggttccactaaaactttatttacaaaattatgctgccggtctgcaggatgtagtttaacaatttgattattttggatattaaaatattttttaagtcttgaaaatattgtttactattaccaaagtttttgaaccttcttaaattctgtaccagaggtgagtgccacaccctaacctagtctgagtttttatgtgtaaagatcataaaacgttgtaagttttctaaaacacataagctctcaataaacgttagcttatcattgtca

SEQ ID NO: 301778 - DNA, 2232 bp, Homo sapiens
caagtgcgcgcggaccgctagctccctctgagttgcgctgggcttggctgctgcaccatgaccctggaggcgatccgctactcgcggggctccctgcagatcctagaccagctgctgctgcccaagcagagccgctacgaggcggtgggctcggtgcaccaggcctgggaggccatccgcgccatgaaggtgcggggcgccccggccatagccctggtgggctgtctcagcctcgccgtggagctgcaggcgggcgccgggggaccgggactcgccgcgctcgtggccttcgtgcgcgacaagctgagcttcctcgtcaccgcccggcccaccgctgtcaacatggcccgcgccgcccgcgacctggctgatgttgcagcccgggaggccgaacgggagggcgctacggaagaggcggtccgggagagagtgatctgctgcaccgaggacatgctggagaaagacctcagagacaaccgaagcattggggacctaggagcccgccacctcctggagcgggtggcccccagcggtggcaaggtgactgtgctgacccactgtaacactggtgctctggccaccgctggctatggtacagccctagacgtgaaacggagctatgcgagcattgggaagagcataccaggcagagggaactgccactgcgagggcccctgggcgggactgtgctcgggagcccggctgacggcctttgagctggtctatgagcagatccccgccacccttatcaccgacagcatggtggctgctgccatggcccataggggcgtgtcagctgtggtcgtgggagctgaccgcgtggttgccaacggcgacacagccaacaaggtgggcacctaccagctggccattgtcgccaagcaccatggcattcccttctacgtggctgcccccagctcttcatgtgacctccgtctggagaccggcaaggagatcattattgaagagcgaccgggccaggagctgaccgatgttaatggggtccggattgcagcacctgggattggagtttggaatcctgccttcgatgtcaccccccacgacctcatcactggtggcatcatcacagaactgggggtctttgcccctgaggagctccggacagccctaaccaccaccatctcttccagggatggaaccctagatggaccccagatgtaaccaactcagctctccctagcctgcctcggcctcccaaggtgctgggactacaggcatgagccactgtgcctgaccttacagcagtattttttaaaaatcaaaattaatgcaaaaatccatgatgaggccaggcttggtggctcatgcctgtaattccagcactttgggaggatcccttgagcccaggtgtttgagaccagtttgggtaacataggaagagcttgtctctacaaacaaaaatttaaaaacaatgagctgggcatggaactcacacctctagccccagctactcgggctgaggtgggaggatggcttgagcccaggagttcaaggatgcagtgtgctttgattgcactactgcgcttcaccctgggcaacagagtgagaccccatctctttaaaaaaaaaaaaaaatccatgatgaacaaaacaagtatttgtttgagacggggtctcgctctgtcgcccaggctggagtgcagtggtgccatctcagctcactgcaacctccgccttctgggttcaagcgactctcctgcctcagcctcccgagtagctgggattacaggagcctggcactatgcctggctaatttttgtatttttattggagacaccatgttggtcgtggctggtctccaactcctgacctcgggtgatccgcgccccgcggcctccgaaagtgctgggattacaagcgtgagccaccgtgcccggcctaaataaaattttgaagaggctagaaccccgcacttgtgccttgagcttactgacctcaacaccctggttccactaaaactttatttacaaaattatgctgccggtctgcaggatgtagtttaacaatttgattattttggatattaaaatattttttaagtcttgaaaatattgtttactattaccaaagtttttgaaccttcttaaattctgtaccagaggtgagtgccacaccctaacctagtctgagtttttatgtgtaaagatcataaaacgttgtaagttttctaaaacacataagctctcaataaacgttagcttatcattgtca

SEQ ID NO: 301779 - DNA, 1983 bp, Homo sapiens
caagtgcgcgcggaccgctagctccctctgagttgcgctgggcttggctgctgcaccatgaccctggaggcgatccgctactcgcggggctccctgcagatcctagaccagctgctgctgcccaagcagagccgctacgaggcggtgggctcggtgcaccaggcctgggaggccatccgcgccatgaaggtgcggggcgccccggccatagccctggtgggctgtctcagcctcgccgtggagctgcaggcgggcgccgggggaccgggactcgccgcgctcgtggccttcgtgcgcgacaagctgagcttcctcgtcaccgcccggcccaccgctgtcaacatggcccgcgccgcccgcgacctggctgatgttgcagcccgggaggccgaacgggagggcgctacggaagaggcggtccgggagagagtgatctgctgcaccgaggacatgctggagaaagacctcagagacaaccgaagcattggggacctaggagcccgccacctcctggagcgggtggcccccagcggtggcaaggtgactgtgctgacccactgtaacactggtgctctggccaccgctggctatggtacagccctaggtgtgattcgctcactgcacagcctgggccgcctggagcatgccttctgcacagagacccggccctacaaccagggagcccggctgacggcctttgagctggtctatgagcagatccccgccacccttatcaccgacagcatggtggctgctgccatggcccataggggcgtgtcagctgtggtcgtgggagctgaccgcgtggttgccaacggcgacacagccaacaaggtgggcacctaccagctggccattgtcgccaagcaccatggcattcccttctacgtggctgcccccagctcttcatgtgacctccgtctggagaccggcaaggagatcattattgaagagcgaccgggccaggagctgaccgatgttaatggggtccggattgcagcacctgggattggagtttggaatcctgccttcgatgtcaccccccacgacctcatcactggtggcatcatcacagaactgggggtctttgcccctgaggagctccggacagccctaaccaccaccatctcttccagggatggaaccctagatggaccccagatgtaaccaactcagctctccctagcctgcctctctaggtttttcaatacatttcttgaatggctacccaaaagctgaccgtccagcccctgaccacacttgttcctagtgcagggagctcagacagggccttccatctagagcccagcacctagagccaggctgcccagattcaaatcctgactccgccacttttcccactgtatgatcttgggcaagtcacttcacctctctgtgccttggtttcctcatttataaaatgtggataacaggccgggcgcagtggctcacgcctgtaatcccagcactttgggaggccgaggcaggtggatcacaagatcaggagattgagaccatcggctaatttttgtatttttattggagacaccatgttggtcgtggctggtctccaactcctgacctcgggtgatccgcgccccgcggcctccgaaagtgctgggattacaagcgtgagccaccgtgcccggcctaaataaaattttgaagaggctagaaccccgcacttgtgccttgagcttactgacctcaacaccctggttccactaaaactttatttacaaaattatgctgccggtctgcaggatgtagtttaacaatttgattattttggatattaaaatattttttaagtcttgaaaatattgtttactattaccaaagtttttgaaccttcttaaattctgtaccagaggtgagtgccacaccctaacctagtctgagtttttatgtgtaaagatcataaaacgttgtaagttttctaaaacacataagctctcaataaacgttagcttatcattgtca

SEQ ID NO: 301780 - DNA, 2355 bp, Homo sapiens
caagtgcgcgcggaccgctagctccctctgagttgcgctgggcttggctgctgcaccatgaccctggaggcgatccgctactcgcggggctccctgcagatcctagaccagctgctgctgcccaagcagagccgctacgaggcggtgggctcggtgcaccaggcctgggaggccatccgcgccatgaaggtgcggggcgccccggccatagccctggtgggctgtctcagcctcgccgtggagctgcaggcgggcgccgggggaccgggactcgccgcgctcgtggccttcgtgcgcgacaagctgagcttcctcgtcaccgcccggcccaccgctgtcaacatggcccgcgccgcccgcgacctggctgatgttgcagcccgggaggccgaacgggagggcgctacggaagaggcggtccgggagagagtgatctgctgcaccgaggacatgctggagaaagacctcagagacaaccgaagcattggggacctaggagcccgccacctcctggagcgggtggcccccagcggtggcaagacgtgaaacggagctatgcgagcattgggaagagcataccaggcagagggaactgccactgcgagggcccctgggcgggactgtgctcggtaagcctttggcaatccacgcccagactaggagcctgcacccctaaccaatggaccaccctgtctgtttgcccctccccggggccttctcctggtgggtggggcccccgcaggtgtgattcgctcactgcacagcctgggccgcctggagcatgccttctgcacagagacccggccctacaaccagggagcccggctgacggcctttgagctggtctatgagcagatccccgccacccttatcaccgacagcatggtggctgctgccatggcccataggggcgtgtcagctgtggtcgtgggagctgaccgcgtggttgccaacggcgacacagccaacaaggtgggcacctaccagctggccattgtcgccaagcaccatggcattcccttctacgtggctgcccccagctcttcatgtgacctccgtctggagaccggcaaggagatcattattgaagagcgaccgggccaggagctgaccgatgttaatggggtccggattgcagcacctgggattggagtttggaatcctgccttcgatgtcaccccccacgacctcatcactggtggcatcatcacagaactgggggtctttgcccctgaggagctccggacagccctaaccaccaccatctcttccagggatggaaccctagatggaccccagatgtaaccaactcagctctccctagcctgcctcggcctcccaaggtgctgggactacaggcatgagccactgtgcctgaccttacagcagtattttttaaaaatcaaaattaatgcaaaaatccatgatgaggccaggcttggtggctcatgcctgtaattccagcactttgggaggatcccttgagcccaggtgtttgagaccagtttgggtaacataggaagagcttgtctctacaaacaaaaatttaaaaacaatgagctgggcatggaactcacacctctagccccagctactcgggctgaggtgggaggatggcttgagcccaggagttcaaggatgcagtgtgctttgattgcactactgcgcttcaccctgggcaacagagtgagaccccatctctttaaaaaaaaaaaaaaatccatgatgaacaaaacaagtatttgtttgagacggggtctcgctctgtcgcccaggctggagtgcagtggtgccatctcagctcactgcaacctccgccttctgggttcaagcgactctcctgcctcagcctcccgagtagctgggattacaggagcctggcactatgcctggctaatttttgtatttttattggagacaccatgttggtcgtggctggtctccaactcctgacctcgggtgatccgcgccccgcggcctccgaaagtgctgggattacaagcgtgagccaccgtgcccggcctaaataaaattttgaagaggctagaaccccgcacttgtgccttgagcttactgacctcaacaccctggttccactaaaactttatttacaaaattatgctgccggtctgcaggatgtagtttaacaatttgattattttggatattaaaatattttttaagtcttgaaaatattgtttactattaccaaagtttttgaaccttcttaaattctgtaccagaggtgagtgccacaccctaacctagtctgagtttttatgtgtaaagatcataaaacgttgtaagttttctaaaacacataagctctcaataaacgttagcttatcattgtca

SEQ ID NO: 301781 - DNA, 1753 bp, Homo sapiens
ggacgcgtgggtcgacccacgcgtcgcggacgcgtgggtcggccctacaaccaggagcccggctgacggcctttgagctggtctatgagcagatccccgccacccttatcaccgacagcatggtggctgctgccatggcccataggggcgtgtcagctgtggtcgtgggagctgaccgcgtggttgccaacggcgacacagccaacaaggtgggcacctaccagctggccattgtcgccaagcaccatggcattcccttctacgtggctgcccccagctcttcatgtgacctccgtctggagaccggcaaggagatcattattgaagagcgaccgggccaggagctgaccgatgttaatggggtccggattgcagcacctgggattggagtttggaatcctgccttcgatgtcaccccccacgacctcatcactggtggcatcatcacagaactgggggtctttgcccctgaggagctccggacagccctaaccaccaccatctcttccagggatggaaccctagatggaccccagatgtaaccaactcagctctccctagcctgcctctctaggtttttcaatacatttcttgaatggctacccaaaagctgaccgtccagcccctgaccacacttgttcctagtgcagggagctcagacagggccttccatctagagcccagcacctagagccaggctgcccagattcaaatcctgactccgccactcggcctcccaaggtgctgggactacaggcatgagccactgtgcctgaccttacagcagtattttttaaaaatcaaaattaatgcaaaaatccatgatgaggccaggcttggtggctcatgcctgtaattccagcactttgggaggatcccttgagcccaggtgtttgagaccagtttgggtaacataggaagagcttgtctctacaaacaaaaatttaaaaacaatgagctgggcatggaactcacacctctagccccagctactcgggctgaggtgggaggatggcttgagcccaggagttcaaggatgcagtgtgctttgattgcactactgcgcttcaccctgggcaacagagtgagaccccatctctttaaaaaaaaaaaaaaatccatgatgaacaaaacaagtatttgtttgagacggggtctcgctctgtcgcccaggctggagtgcagtggtgccatctcagctcactgcaacctccgccttctgggttcaagcgactctcctgcctcagcctcccgagtagctgggattacaggagcctggcactatgcctggctaatttttgtatttttattggagacaccatgttggtcgtggctggtctccaactcctgacctcgggtgatccgcgccccgcggcctccgaaagtgctgggattacaagcgtgagccaccgtgcccggcctaaataaaattttgaagaggctagaaccccgcacttgtgccttgagcttactgacctcaacaccctggttccactaaaactttatttacaaaattatgctgccggtctgcaggatgtagtttaacaatttgattattttggatattaaaatattttttaagtcttgaaaatattgtttactattaccaaagtttttgaaccttcttaaattctgtaccagaggtgagtgccacaccctaacctagtctgagtttttatgtgtaaagatcataaaacgttgtaagttttctaaaacacataagctctcaataaacgttagcttatcattgtca

SEQ ID NO: 301782 - DNA, 1622 bp, Homo sapiens
caagtgcgcgcggaccgctagctccctctgagttgcgctgggcttggctgctgcaccatgaccctggaggcgatccgctactcgcggggctccctgcagatcctagaccagctgctgctgcccaagcagagccgctacgaggcggtgggctcggtgcaccaggcctgggaggccatccgcgccatgaaggtgcggggcgccccggccatagccctggtgggctgtctcagcctcgccgtggagctgcaggcgggcgccgggggaccgggactcgccgcgctcgtggccttcgtgcgcgacaagctgagcttcctcgtcaccgcccggcccaccgctgtcaacatggcccgcgccgcccgcgacctggctgatgttgcagcccgggaggccgaacgggagggcgctacggaagaggcggtccgggagagagtgatctgctgcaccgaggacatgctggagaaagacctcagagacaaccgaagcattggggacctaggagcccgccacctcctggagcgggtggcccccagcggtggcaaggtgactgtgctgacccactgtaacactggtgctctggccaccgctggctatggtacagccctagacgtgaaacggagctatgcgagcattgggaagagcataccaggcagagggaactgccactgcgagggcccctgggcgggactgtgctcgggagcccggctgacggcctttgagctggtctatgagcagatccccgccacccttatcaccgacagcatggtggctgctgccatggcccataggggcgtgtcagctgtggtcgtgggagctgaccgcgtggttgccaacggcgacacagccaacaaggtgggcacctaccagctggccattgtcgccaagcaccatggcattcccttctacgtggctgcccccagctcttcatgtgacctccgtctggagaccggcaaggagatcattattgaagagcgaccgggccaggagctgaccgatgttaatggggtccggattgcagcacctgggattggagtttggaatcctgccttcgatgtcaccccccacgacctcatcactggtggcatcatcacagaactgggggtctttgcccctgaggagcctcccgagtagctgggattacaggagcctggcactatgcctggctaatttttgtatttttattggagacaccatgttggtcgtggctggtctccaactcctgacctcgggtgatccgcgccccgcggcctccgaaagtgctgggattacaagcgtgagccaccgtgcccggcctaaataaaattttgaagaggctagaaccccgcacttgtgccttgagcttactgacctcaacaccctggttccactaaaactttatttacaaaattatgctgccggtctgcaggatgtagtttaacaatttgattattttggatattaaaatattttttaagtcttgaaaatattgtttactattaccaaagtttttgaaccttcttaaattctgtaccagaggtgagtgccacaccctaacctagtctgagtttttatgtgtaaagatcataaaacgttgtaagttttctaaaacacataagctctcaataaacgttagcttatcattgtca

SEQ ID NO: 301783 - DNA, 1384 bp, Homo sapiens
ggacgcgtgggtcgacccacgcgtcgcggacgcgtgggtcggccctacaaccaggagcccggctgacggcctttgagctggtctatgagcagatccccgccacccttatcaccgacagcatggtggctgctgccatggcccataggggcgtgtcagctgtggtcgtgggagctgaccgcgtggttgccaacggcgacacagccaacaaggtgggcacctaccagctggccattgtcgccaagcaccatggcattcccttctacgtggctgcccccagctcttcatgtgacctccgtctggagaccggcaaggagatcattattgaagagcgaccgggccaggagctgaccgatgttaatggggtccggattgcagcacctgggattggagtttggaatcctgccttcgatgtcaccccccacgacctcatcactggtggcatcatcacagaactgggggtctttgcccctgaggagctccggacagccctaaccaccaccatctcttccagggatggaaccctagatggaccccagatgtaaccaactcagctctccctagcctgcctctctaggtttttcaatacatttcttgaatggctacccaaaagctgaccgtccagcccctgaccacacttgttcctagtgcagggagctcagacagggccttccatctagagcccagcacctagagccaggctgcccagattcaaatcctgactccgccacttttcccactgtatgatcttgggcaagtcacttcacctctctgtgccttggtttcctcatttataaaatgtggataacaggccgggcgcagtggctcacgcctgtaatcccagcactttgggaggccgaggcaggtggatcacaagatcaggagattgagaccatcctggctaacatggtgaaaccccatctggctaatttttgtatttttattggagacaccatgttggtcgtggctggtctccaactcctgacctcgggtgatccgcgccccgcggcctccgaaagtgctgggattacaagcgtgagccaccgtgcccggcctaaataaaattttgaagaggctagaaccccgcacttgtgccttgagcttactgacctcaacaccctggttccactaaaactttatttacaaaattatgctgccggtctgcaggatgtagtttaacaatttgattattttggatattaaaatattttttaagtcttgaaaatattgtttactattaccaaagtttttgaaccttcttaaattctgtaccagaggtgagtgccacaccctaacctagtctgagtttttatgtgtaaagatcataaaacgttgtaagttttctaaaacacataagctctcaataaacgttagcttatcattgtca

SEQ ID NO: 301784 - DNA, 2083 bp, Homo sapiens
  misc_feature (1620)..(1620): n is a, c, g, or t
caagtgcgcgcggaccgctagctccctctgagttgcgctgggcttggctgctgcaccatgaccctggaggcgatccgctactcgcggggctccctgcagatcctagaccagctgctgctgcccaagcagagccgctacgaggcggtgggctcggtgcaccaggcctgggaggccatccgcgccatgaaggtgcggggcgccccggccatagccctggtgggctgtctcagcctcgccgtggagctgcaggcgggcgccgggggaccgggactcgccgcgctcgtggccttcgtgcgcgacaagctgagcttcctcgtcaccgcccggcccaccgctgtcaacatggcccgcgccgcccgcgacctggctgatgttgcagcccgggaggccgaacgggagggcgctacggaagaggcggtccgggagagagtgatctgctgcaccgaggacatgctggagaaagacctcagagacaaccgaagcattggggacctaggagcccgccacctcctggagcgggtggcccccagcggtggcaaggtgactgtgctgacccactgtaacactggtgctctggccaccgctggctatggtacagccctaggtgtgattcgctcactgcacagcctgggccgcctggagcatgccttctgcacagagacccggccctacaaccagggagcccggctgacggcctttgagctggtctatgagcagatccccgccacccttatcaccgacagcatggtggctgctgccatggcccataggggcgtgtcagctgtggtcgtgggagctgaccgcgtggttgccaacggcgacacagccaacaaggtgggcacctaccagctggccattgtcgccaagcaccatggcattcccttctacgtggctgcccccagctcttcatgtgacctccgtctggagaccggcaaggagatcattattgaagagcgaccgggccaggagctgaccgatgttaatggggtccggattgcagcacctgggattggagtttggaatcctgccttcgatgtcaccccccacgacctcatcactggtggcatcatcacagaactgggggtctttgcccctgaggagctccggacagccctaaccaccaccatctcttccagggatggaaccctagatggaccccagatgtaaccaactcagctctccctagcctgcctctctaggtttttcaatacatttcttgaatggctacccaaaagctgaccgtccagcccctgaccacacttgttcctagtgcagggagctcagacagggccttccatctagagcccagcacctagagccaggctgcccagattcaaatcctgactccgccacttttcccactgtatgatcttgggcaagtcacttcacctctctgtgccttggtttcctcatttataaaatgtggataacaggccgggcgcagtggctcacgcctgtaatcccagcactttgggaggccgaggcaggtggatcacaagatcaggagattgagaccatcctggctaacatggtgaaaccccatctctgctgaaaatacaaaaaattagccgggtgtggtggtgggcacctgcagtcccagctacttgggaggctgaggcnggagaatggcgtgaaactgggaggcagagcttgcagtgagccgagatagcgccactgcactccagcctgggcaacagagcgagactccgtctcaaaaataaatataattaattaattatttaattaaaaaaataaaaaataaatgtggataatactagtacctccctcttaaggtcagggctggagctagggtgacatctccagggcagaattttaagaggacaccaaaaaagctcagcaaccaagataaaaaatattttaaagcaatattttgttttgggttttttttttttgagatcaagtatcactcgttacccaggctggaatgtagaggcgagatctcagctcactgaaacctgtgcctccccggttcaagcgattctcctgccacagcctcctgagtagctgggattacaggcatgcgccaccatgcccagctaatttttctatttttagtagagac

SEQ ID NO: 301785 - DNA, 1799 bp, Homo sapiens
caagtgcgcgcggaccgctagctccctctgagttgcgctgggcttggctgctgcaccatgaccctggaggcgatccgctactcgcggggctccctgcagatcctagaccagctgctgctgcccaagcagagccgctacgaggcggtgggctcggtgcaccaggcctgggaggccatccgcgccatgaaggtgcggggcgccccggccatagccctggtgggctgtctcagcctcgccgtggagctgcaggcgggcgccgggggaccgggactcgccgcgctcgtggccttcgtgcgcgacaagctgagcttcctcgtcaccgcccggcccaccgctgtcaacatggcccgcgccgcccgcgacctggctgatgttgcagcccgggaggccgaacgggagggcgctacggaagaggcggtccgggagagagtgatctgctgcaccgaggacatgctggagaaagacctcagagacaaccgaagcattggggacctaggagcccgccacctcctggagcgggtggcccccagcggtggcaaggtgactgtgctgacccactgtaacactggtgctctggccaccgctggctatggtacagccctaggtgtgattcgctcactgcacagcctgggccgcctggagcatgccttctgcacagagacccggccctacaaccagggagcccggctgacggcctttgagctggtctatgagcagatccccgccacccttatcaccgacagcatggtggctgctgccatggcccataggggcgtgtcagctgtggtcgtgggagctgaccgcgtggttgccaacggcgacacagccaacaaggtgggcacctaccagctggccattgtcgccaagcaccatggcattcccttctacgtggctgcccccagctcttcatgtgacctccgtctggagaccggcaaggagatcattattgaagagcgaccgggccaggagctgaccgatgttaatggggtccggattgcagcacctgggattggagtttggaatcctgccttcgatgtcaccccccacgacctcatcactggtggcatcatcacagaactgggggtctttgcccctgaggagctccggacagccctaaccaccaccatctcttccagggatggaaccctagatggaccccagatgtaaccaactcagctctccctagcctgcctctctaggtttttcaatacatttcttgaatggctacccaaaagctgaccgtccagcccctgaccacacttgttcctagtgcagggagctcagacagggccttccatctagagcccagcacctagagccaggctgcccagattcaaatcctgactccgccactcggcctcccaaggtgctgggactacaggcatgagccactgtgcctgaccttacagcagtattttttaaaaatcaaaattaatgcaaaaatccatgatgaggccgtgcccggcctaaataaaattttgaagaggctagaaccccgcacttgtgccttgagcttactgacctcaacaccctggttccactaaaactttatttacaaaattatgctgccggtctgcaggatgtagtttaacaatttgattattttggatattaaaatattttttaagtcttgaaaatattgtttactattaccaaagtttttgaaccttcttaaattctgtaccagaggtgagtgccacaccctaacctagtctgagtttttatgtgtaaagatcataaaacgttgtaagttttctaaaacacataagctctcaataaacgttagcttatcattgtca

SEQ ID NO: 301786 - DNA, 2034 bp, Homo sapiens
  misc_feature (1620)..(1620): n is a, c, g, or t
caagtgcgcgcggaccgctagctccctctgagttgcgctgggcttggctgctgcaccatgaccctggaggcgatccgctactcgcggggctccctgcagatcctagaccagctgctgctgcccaagcagagccgctacgaggcggtgggctcggtgcaccaggcctgggaggccatccgcgccatgaaggtgcggggcgccccggccatagccctggtgggctgtctcagcctcgccgtggagctgcaggcgggcgccgggggaccgggactcgccgcgctcgtggccttcgtgcgcgacaagctgagcttcctcgtcaccgcccggcccaccgctgtcaacatggcccgcgccgcccgcgacctggctgatgttgcagcccgggaggccgaacgggagggcgctacggaagaggcggtccgggagagagtgatctgctgcaccgaggacatgctggagaaagacctcagagacaaccgaagcattggggacctaggagcccgccacctcctggagcgggtggcccccagcggtggcaaggtgactgtgctgacccactgtaacactggtgctctggccaccgctggctatggtacagccctaggtgtgattcgctcactgcacagcctgggccgcctggagcatgccttctgcacagagacccggccctacaaccagggagcccggctgacggcctttgagctggtctatgagcagatccccgccacccttatcaccgacagcatggtggctgctgccatggcccataggggcgtgtcagctgtggtcgtgggagctgaccgcgtggttgccaacggcgacacagccaacaaggtgggcacctaccagctggccattgtcgccaagcaccatggcattcccttctacgtggctgcccccagctcttcatgtgacctccgtctggagaccggcaaggagatcattattgaagagcgaccgggccaggagctgaccgatgttaatggggtccggattgcagcacctgggattggagtttggaatcctgccttcgatgtcaccccccacgacctcatcactggtggcatcatcacagaactgggggtctttgcccctgaggagctccggacagccctaaccaccaccatctcttccagggatggaaccctagatggaccccagatgtaaccaactcagctctccctagcctgcctctctaggtttttcaatacatttcttgaatggctacccaaaagctgaccgtccagcccctgaccacacttgttcctagtgcagggagctcagacagggccttccatctagagcccagcacctagagccaggctgcccagattcaaatcctgactccgccacttttcccactgtatgatcttgggcaagtcacttcacctctctgtgccttggtttcctcatttataaaatgtggataacaggccgggcgcagtggctcacgcctgtaatcccagcactttgggaggccgaggcaggtggatcacaagatcaggagattgagaccatcctggctaacatggtgaaaccccatctctgctgaaaatacaaaaaattagccgggtgtggtggtgggcacctgcagtcccagctacttgggaggctgaggcnggagaatggcgtgaaactgggaggcagaagcgagactccgtctcaaaaataaatataattaattaattatttaattaaaaaaataaaaaataaatgtggataatactagtacctccctcttaaggtcagggctggagctagggtgacatctccagggcagaattttaagaggacaccaaaaaagctcagcaaccaagataaaaaatattttaaagcaatattttgttttgggttttttttttttgagatcaagtatcactcgttacccaggctggaatgtagaggcgagatctcagctcactgaaacctgtgcctccccggttcaagcgattctcctgccacagcctcctgagtagctgggattacaggcatgcgccaccatgcccagctaatttttctatttttagtagagac

SEQ ID NO: 301787 - DNA, 554 bp, Homo sapiens
  misc_feature (27)..(27): n is a, c, g, or t
aaagagatggggtctcactctgttgcncagggtgaagcgcagtagtgcaatcaaagcacactgcatccttgaactcctgggctcaagccatcctcccacctcagcccgagtagctggggctagaggtgtgagttccatgcccagctcattgtttttaaatttttgtttgtagagacaagctcttcctatgttacccaaactggtctcaaacacctgggctcaagggatcctcccaaagtgctggaatcacaggcatgagccaccaagcctggcctcatcatggatttttgcattaattttgatttttaaaaaatactgctgtaaggtcaggcatgatgtagtttaacaatttgattattttggatattaaaatattttttaagtcttgaaaatattgtttactattaccaaagtttttgaaccttcttaaattctgtaccagaggtgagtgccacaccctaacctagtctgagtttttatgtgtaaagatcataaaacgttgtaagttttctaaaacacataagctctcaataaacgttagcttatcattgtca

SEQ ID NO: 301788 - DNA, 624 bp, Homo sapiens
atgatttcaccatgttggccaggctggtctcgaactcctgactcaaatgatccccctgcctcctcggcctcccaaggtgctgggactacaggcatgagccactgtgcctgaccttacagcagtattttttaaaaatcaaaattaatgcaaaaatccatgatgaggccaggcttggtggctcatgcctgtaattccagcactttgggaggatcccttgagcccaggtgtttgagaccagtttgggtaacataggaagagcttgtctctacaaacaaaaatttaaaaacaatgagctgggcatggaactcacacctctagccccagctactcgggctgaggtgggaggatggcttgagcccaggagttcaaggatgcagtgtgctttgattgcactactgcgcttcaccctgggcaacagagtgagaccccatctctttaaaaaaaaaaaaaaatccatgatgaacaaaacaagtatttgtttgagacggggtctcgctctgtcgcccaggctggagtgcagtggtgccatctcagctcactgcaacctccgccttctgggttcaagcgactctcctgcctcagcctcccgagtagctgggattacaggagcctggcactatgcct

SEQ ID NO: 301789 - DNA, 374 bp, Homo sapiens
tcccagatacttgggaggctgaggctgaggctgagtctactcaggaggcaacctctgctacccgcttgaacccaggtagcagaagttgcactgagccgagatcttgccagttcattctagcctgggtgaaagagtgaaactctgcctcaaaaaaagaaaagaaaagaaaagaaaagaaaagaaacataaacatatcgtaacactcatttgacataaaaatgatctattttatgatggtccatttctctcagcacatcctgacagctattttaaaaacatgtcatgccagaagatctgttctgtttccctctgtatctccatgtatctgtctttgcgtctgtctgttgtctctctctcagaggaggaggagaaag

SEQ ID NO: 301790 - DNA, 862 bp, Homo sapiens
gagatggggttttgccatgttgcccaggctggccttgaactcctgagctcaagtgatccccctcacctcagccaaagtgctgggattacaggcatgagccaccacgcctggccagaatcaatcactttagatcagtcctcagccatcacctaagagtcccaagtaaactccttataaggctgagaggcaatcgctgatatccctgctttgaacttgaccctcttacaagatttacatactctttaatgatggaatgataaaagtggtggtgtccagcagaactttctgtgataatgaaaatgttctatattctgtaaatgtctataggtgtctataaacatctatacgtgttctatattggccactagccacagttagttgtggagtacttgaaatgtgtcttgtgtgactgaagagctgaattttctattttaattaattgagaatttaaattgcctcatgtggctagtggctgcctattggacagcacagatgtatctcattgctactcaaaatgtggtccccagaccaggagcattgctatcacctgggaacttattagaaatgaggactctcagccgggcatggtggctcacgcctgtaatcctagcactttgggaggccaaggcgggcggattgtctgagctcgggagttcgagaccagcctgggcaacacagtgaaaccctgactctactaaaaaatacaaaaattagctgggcgtggcggcatgcacctgtagtcccagctactcgggaggctgagggaggagaatcacttgaacccaggaggcagagcttgcagtgagctgagatcgctcaactgcactccagcctgggcgacagagggacactccatctccta

SEQ ID NO: 301791 - DNA, 605 bp, Homo sapiens
gcctcctcggagttgcccctctgcaagccaacaattcgggatagaaaacacctccgtggtgttttcccggggccctcccgcgccgcgttcggccgccagcccgctcgagctcccgcgccaacgcctcaggggttcgccctctgacaggactaacccgatataccttctgcaataatgaattagactagaaataactttgcaaggagagccaaagctaagacccccgaaaccagacgagctacctaagaacagctaaaagagcacacccgtctatgtagcaaaatagtgggaagatttataggtagaggcgagaactaccgagtcctggtgataggtggttgtccaagatagaatcttagttcaacttaaattacgcccacagaagcctctaaatccccttgtacagttctaactgttagtccagagaggaacagctcttggacactaggacaacaagcgtgtagagagagtaaaaaattaacagccatagtaggcctaaaagcagacaccaattaagaaaggtcgagctcaacgacaaacaggcacaaagaagaaggggacaaaggacacaccccgcacgcgggctcacccagaagacccaccag

SEQ ID NO: 301792 - DNA, 438 bp, Homo sapiens
ataatgcccagtccagatgttgtatactgtccattgatatgcttcagtatgcatgggaacagagaatgggctccaggacaatgacatcaagctgagggtcagtgagtgggaagtgatccaggagtcgggcacgaaactgaagccaatgtatggtcctggctacacgggtctgaagaacctgggcaacagctgctatctcagctctgtcatgcaggccatcttcagcatcccagaattccagagagcgtatgtaggaaaccttcccagaatatttgactactcgcctttagatccaacacaagatttcaacacacagatgactaagttaggacatggccttctctcaggccagtattcaaagcctccggtgaaatctgaactcattgaacaggtgatgaaggaggagcacaagccacagcagaacgcgatactccgacg

SEQ ID NO: 301793 - DNA, 5944 bp, Homo sapiens
  misc_feature (5915)..(5916): n is a, c, g, or t
cgcggaattccgcggaattccgcgccgccgccgccggcagaccccgcgctccggctccggctcggctcgctcggctccggtgcgcgccgaggccatgcagcgccggggcgccctgttcggcatgccgggcggcagcggaggcaggaagatggctgcaggagacatcggcgagctgctagtgccccacatgcccacgatccgcgtgcccaggtccggcgacagggtctacaagaacgagtgcgccttctcctacgactctcccaattctgaaggtggactctatgtatgcatgaatacatttttggcctttggaagggaacatgttgaaagacattttcgaaaaactggacagagtgtatacatgcacctgaaaagacatgtgcgagagaaggtaagaggggcgtctggtggagcgttaccaaaaaggaggaattccaagatttttttagatctagatactgatgacgatttaaatagcgacgattatgaatatgaagatgaagccaaacttgttatattcccagatcactatgaaatagcactaccaaatattgaggagttaccagccctggtaacaattgcttgtgatgcagttctcagctcaaaatctccatacagaaagcaggacccagacacgtgggaaaatgaattgccagtatctaaatatgccaacaacctcacccagctggacaatggagtcaggattcctccaagtggttggaagtgtgccagatgcgacctgcgagaaaacctctggttgaatctgactgacggctctgtcctgtgtggaaagtggttctttgacagctctgggggcaacgggcatgcgctggagcattacagagacatgggctacccactagccgtgaaactgggaaccatcactcctgacggggcagatgtttattcttttcaagaagaagaacctgttttggatcctcatttggccaagcacttagcgcattttggaattgatatgcttcatatgcatgggacagagaatgggctccaggacaatgacatcaagctgagggtcagtgagtgggaagtgatccaggagtcgggcacgaaactgaagccaatgtatggtcctggctacacgggtctgaagaacctgggcaacagctgctatctcagctctgtcatgcaggccatcttcagcatcccagaattccagagagcgtatgtaggaaaccttcccagaatatttgactactcgcctttagatccaacacaagatttcaacacacagatgactaagttaggacatggccttctctcaggccagtattcaaagcctccggtgaaatctgaactcattgaacaggtgatgaaggaggagcacaagccacagcagaacgggatctctccgcgcatgtttaaggcctttgtaagcaagagccacccggaattctcctctaacaggcagcaagatgcccaggaattcttcttgcacctggtgaatctagtagagaggaaccgcatcggctcagaaaacccaagcgatgtttttcgttttttggtggaagaacgcattcagtgctgtcagacccggaaagtccgctacacggagagggtggattacctgatgcagttacctgtggccatggaggcggcaaccaacaaggatgaactgatcgcttatgaactaacgagaagggaagcagaagcaaacagaagaccccttcctgagttggtacgtgccaagataccatttagtgcctgccttcaggccttctctgaaccagaaaatgttgatgatttctggagcagtgccctacaagcaaagtctgcgggtgtgaaaacatctcgctttgcttcattccctgaatacttggtagtgcagataaagaagttcacttttggtcttgactgggttcccaaaaaatttgatgtttctattgatatgccagacctacttgatatcaaccatctccgagccagggggttacagccaggagaggaagaacttccagacatcagcccccccatagtcattcctgatgactcaaaagatcgcctgatgaaccaattgatagacccatcagacatcgatgagtcatcagtgatgcagctggccgagatgggtttcccgctggaagcatgtcgcaaggctgtgtacttcactggaaatatgggcgccgaggtggccttcaactggatcattgttcacatggaagagccagattttgctgagccgctgaccatgcctggttatggaggggcagcttctgctggagcctctgtttttggtgcttctggactggataaccaacctccagaggaaatcgtagctatcatcacctccatgggatttcagcgaaatcaggctattcaggcactacgagcaacgaataataacctggaaagagcactggattggatctttagccaccctgagtttgaagaagacagtgattttgtgattgagatggagaataatgccaatgcaaacattatttctgaggccaagcccgaaggacctagagtcaaggatggatctggaacatatgagctatttgcattcatcagtcacatgggaacatccacaatgagtggtcattacatttgccatatcaaaaaggaaggaagatgggtgatttacaatgaccacaaagtttgtgcctcagaaaggccccctaaagacctgggctacatgtacttttaccgcaggataccaagctaaacctcaaatataaaaattggcgaaaagaagccatacgcctttttaatttgccaaaaaaaaaaagaagaagaagaagttgaaacaactagacatgaaggaatatatggggtatttatcgtttatttaaagagcacgatcagttgacaccttctgaaatagaactgagaagaaatttctattagtgatgatacactattatattgtagatagtttttataaatgttcaaaaagatgatgatatttaaaaacaaaaaaagtattcatattgctggtggaggatctgccatcagcacatcaaaaatggggatgtgcccccagccctctattttgctttgggggtcagtgatagtggcctctggagaaaccaaataatgtggccagtggtgtggccttacccacaacaaatgaaaagcccacttgtgtttcatatagaaaatcagcagttgggtggggctttatttgtgacataatttttttcatgacatacaataatttctgatgtatccatgtagatattatgctctgtccataatagagcctctgcaatgaaagatatttttaatttgtcacattaaaattcataatacgattgtgtgaatgtgtgtgagactgactgagagtgtgagacttttactagaaaagtgagtccactagaaaatctgtgacaagttggtttttaaagtctgaacagttgatattaagcatatctgaaaaaagcaagtaaatattttaacaaaactatgactcaggaaccttcgagaagattagttccccacttagatttttaaggagtaaaaagggctgagttatgcctttaagtgctgtcaagaattcacttgggtttgggacatttgctggtgtaatgctagatgcccacagcagcataatattgtactttgtcaaaggtaggtaaattctctgtttctcagcagccctttccccaaaaggtatggtgtttatttttagtaaaaatagctaatctctttttaccatctcacatgataactctttggagtcatgtcaagtgccccaaatttgtctgtgattttcccatctctgagctctttatctgcctccgtttccttgtttttctggggccagagtctcatctctgcctttttttggtgtatcaccttctgacttgccttcattgcttgtctgatgtgaccaacagtgtgatcttggacacactaaggattttagatgcaaagaaactttatacaacattatgaaagactatcctttccattttggttatttcagcattttagttgcaacctgggattagattagagtttccaacgtgatgaaaagtggaatgatagcattctataatttccataattttcctactggtccgtaccaaattctagagtctctggagttgctatttcagagtatttggtcaaacgaaaaagaatttattgctgtctgtttaacatgtatttgtttggttgaaaggatctttttagaaactgtaggaaaataaacagaaccaaccaggtgaaacaaagcacagacattgggttaggatgtagtgagttgtgaacaatcaggattctgggtgtgatgggggtccctgtctcataggtgatcctttggtgccatgtgaccgagagacatggtgtctaaggcccatggcctggagacctgggtgctgctcctagctgactgtggaccttgggcaagtccttcatccgtcctgtgcctcactgtcctcatctgaacaatggtatgatgacacctgccctctctttcaatcatgctttgaggatacagtgagattggttacagtgaaccttcaatgagtagaatgtggtatgccatggtgggttgtagtagatggtgctccctgccttttctcctctgttttcctcaatttgggaacaaatgagattggcagaaggagggagctcacggtgcagtacttttctaccaaagtgtgcccactggtgtcacctcctaatgttaacttggatttcctaaagcagtcccactctgttatgagagtcactgactcccgtggacatccccacagtaagcagccttacaaaatccagtccccttagggcagagtgagtgtcatagaataatgactccaaacccacgtcaaaaatggcttgttttcagcgatgttataaaacaaaggcctgttttttggaattgggggtgactgggtggtttggattgaaatgtggacaaagatagcatgtgtattttgaataaaataaaaattttgtaataaaacttttaaaaatcagtgatgtaaaatcaatatttaagactataggctataaattgtttgatttcattaactagcccttttgatgcctagacatgttgtaaaaaaattgtgctatggctgccttttcttctgccccacaacacaaagggctatttctacaaggcaaagttttgtatatgtgctattctttacttcagattgagagttgggaaaaactggagtaaataatgggtttcttacttgcttaaaagcatatttatatgtgtatctcaatatatacaaggcaggttcccctataaaagtctggaatgtactgcttaattttacacttgtgtagacacgattatttgtgactgaaaagtggaataacgtgtggattttgtcaactcattatcagtctgttagcagtcctctatgtgaggcatggtggtctaattgtgaaattctccctgtatatgggtgtctgtgtgaaagacagcactttcttcctgtaaatatcttttgatatccatttatgtagaattccaatgaatatgtctttggaaaaggtaatgtatcaaagtttttattttgccaattgatctaaatgcccatataactaatcagaaatccagtttggttcagattgggattttcttttaaagaaaaaaaaagtatgcagaaaagactattggaagaatcatgtgttagtgacactttacatcaacgttgcttcaatattttggaattgaccaggctgctttctcctacctgcaagagaatgtgcctgacatttcccagtgcttactttgggctataggaagtccagcggggatagctcgagcctcttgctccctgagtcatttattccctttacctgaacagagccttacctgcaattcatagtgagagcacctgggtctgtatcctgactccactctaagtgaggtgggactgaatcactgtacctctctggggacatttcccagtgcacactttggagcnnatctagtctaacccacttgtttcaaatg

SEQ ID NO: 301794 - DNA, 5890 bp, Homo sapiens
  misc_feature (5861)..(5862): n is a, c, g, or t
cgcggaattccgcggaattccgcgccgccgccgccggcagaccccgcgctccggctccggctcggctcgctcggctccggtgcgcgccgaggccatgcagcgccggggcgccctgttcggcatgccgggcggcagcggaggcaggaagatggctgcaggagacatcggcgagctgctagtgccccacatgcccacgatccgcgtgcccaggtccggcgacagggtctacaagaacgagtgcgccttctcctacgactctcccaattctgaaggtggactctatgtatgcatgaatacatttttggcctttggaagggaacatgttgaaagacattttcgaaaaactggacagagtgtatacatgcacctgaaaagacatgtgcgagagaaggtaagaggggcgtctggtggagcgttaccaaaaaggaggaattccaagatttttttagatctagatactgatgacgatttaaatagcgacgattatgaatatgaagatgaagccaaacttgttatattcccagatcactatgaaatagcactaccaaatattgaggagttaccagccctggtaacaattgcttgtgatgcagttctcagctcaaaatctccatacagaaagcaggacccagacacgtgggaaaatgaattgccagtatctaaatatgccaacaacctcacccagctggacaatggagtcaggattcctccaagtggttggaagtgtgccagatgcgacctgcgagaaaacctctggttgaatctgactgacggctctgtcctgtgtggaaagtggttctttgacagctctgggggcaacgggcatgcgctggagcattacagagacatgggctacccactagccgtgaaactgggaaccatcactcctgacggggcagatgtttattcttttcaagaagaagaacctgttttggatcctcatttggccaagcacttagcgcattttggaattgatatgcttcatatgcatgggacagagaatgggctccaggacaatgacatcaagctgagggtcagtgagtgggaagtgatccaggagtcgggcacgaaactgaagccaatgtatggtcctggctacacgggtctgaagaacctgggcaacagctgctatctcagctctgtcatgcaggccatcttcagcatcccagaattccagagagcgtatgtaggaaaccttcccagaatatttgactactcgcctttagatccaacacaagatttcaacacacagatgactaagttaggacatggccttctctcaggccagtattcaaagcctccggtgaaatctgaactcattgaacaggtgatgaaggaggagcacaagccacagcagaacgggatctctccgcgcatgtttaaggcctttgtaagcaagagccacccggaattctcctctaacaggcagcaagatgcccaggaattcttcttgcacctggtgaatctagtagagaggaaccgcatcggctcagaaaacccaagcgatgtttttcgttttttggtggaagaacgcattcagtgctgtcagacccggaaagtccgctacacggagagggtggattacctgatgcagttacctgtggccatggaggcggcaaccaacaaggatgaactgatcgcttatgaactaacgagaagggaagcagaagcaaacagaagaccccttcctgagttggtacgtgccaagataccatttagtgcctgccttcaggccttctctgaaccagaaaatgttgatgatttctggagcagtgccctacaagcaaagtctgcgggtgtgaaaacatctcgctttgcttcattccctgaatacttggtagtgcagataaagaagttcacttttggtcttgactgggttcccaaaaaatttgatgtttctattgatatgccagacctacttgatatcaaccatctccgagccagggggttacagccaggagaggaagaacttccagacatcagcccccccatagtcattcctgatgactcaaaagatcgcctgatgaaccaattgatagacccatcagacatcgatgagtcatcagtgatgcagctggccgagatgggtttcccgctggaagcatgtcgcaaggctgtgtacttcactggaaatatgggcgccgaggtggccttcaactggatcattgttcacatggaagagccagattttgctgagccgctgaccatgcctggttatggaggggcagcttctgctggagcctctgtttttggtgcttctggactggataaccaacctccagaggaaatcgtagctatcatcacctccatgggatttcagcgaaatcaggctattcaggcactacgagcaacgaataataacctggaaagagcactggattggatctttagccaccctgagtttgaagaagacagtgattttgtgattgagatggagaataatgccaatgcaaacattatttctgaggccaagcccgaaggacctagagtcaaggatggatctggaacatatgagctatttgcattcatcagtcacatgggaacatccacaatgagtggtcattacatttgccatatcaaaaaggaaggaagatgggtgatttacaatgaccacaaagtttgtgcctcagaaaggccccctaaagacctgggctacatgtacttttaccgcaggataccaagctaaacctcaaatataaaaattggcgaaaagaagccatacgcctttttaatttgccaaaaaaaaaaagaagaagaagaagttgaaacaactagacatgaaggaatatatggggtatttatcgtttatttaaagagcacgatcagttgacaccttctgaaatagaactgagaagaaatttctattagtgatgatacactattatattgtagatagtttttataaatgttcaaaaagatgatgatatttaaaaacaaaaaaagtattcatattgctggtggaggatctgccatcagcacatcaaaaatggggatgtgcccccagccctctattttgctttgggggtcagtgatagtggcctctggagaaaccaaataatgtggccagtggtgtggccttacccacaacaaatgaaaagcccacttgtgtttcatatagaaaatcagcagttgggtggggctttatttgtgacataatttttttcatgacatacaataatttctgatgtatccatgtagatattatgctctgtccataatagagcctctgcaatgaaagatatttttaatttgtcacattaaaattcataatacgattgtgtgaatgtgtgtgagactgactgagagtgtgagacttttactagaaaagtgagtccactagaaaatctgtgacaagttggtttttaaagtctgaacagttgatattaagcatatctgaaaaaagcaagtaaatattttaacaaaactatgactcaggaaccttcgagaagattagttccccacttagatttttaaggagtaaaaagggctgagttatgcctttaagtgctgtcaagaattcacttgggtttgggacatttgctggtgtaatgctagatgcccacagcagcataatattgtactttgtcaaaggtaggtaaattctctgtttctcagcagccctttccccaaaaggtatggtgtttatttttagtcaagtgccccaaatttgtctgtgattttcccatctctgagctctttatctgcctccgtttccttgtttttctggggccagagtctcatctctgcctttttttggtgtatcaccttctgacttgccttcattgcttgtctgatgtgaccaacagtgtgatcttggacacactaaggattttagatgcaaagaaactttatacaacattatgaaagactatcctttccattttggttatttcagcattttagttgcaacctgggattagattagagtttccaacgtgatgaaaagtggaatgatagcattctataatttccataattttcctactggtccgtaccaaattctagagtctctggagttgctatttcagagtatttggtcaaacgaaaaagaatttattgctgtctgtttaacatgtatttgtttggttgaaaggatctttttagaaactgtaggaaaataaacagaaccaaccaggtgaaacaaagcacagacattgggttaggatgtagtgagttgtgaacaatcaggattctgggtgtgatgggggtccctgtctcataggtgatcctttggtgccatgtgaccgagagacatggtgtctaaggcccatggcctggagacctgggtgctgctcctagctgactgtggaccttgggcaagtccttcatccgtcctgtgcctcactgtcctcatctgaacaatggtatgatgacacctgccctctctttcaatcatgctttgaggatacagtgagattggttacagtgaaccttcaatgagtagaatgtggtatgccatggtgggttgtagtagatggtgctccctgccttttctcctctgttttcctcaatttgggaacaaatgagattggcagaaggagggagctcacggtgcagtacttttctaccaaagtgtgcccactggtgtcacctcctaatgttaacttggatttcctaaagcagtcccactctgttatgagagtcactgactcccgtggacatccccacagtaagcagccttacaaaatccagtccccttagggcagagtgagtgtcatagaataatgactccaaacccacgtcaaaaatggcttgttttcagcgatgttataaaacaaaggcctgttttttggaattgggggtgactgggtggtttggattgaaatgtggacaaagatagcatgtgtattttgaataaaataaaaattttgtaataaaacttttaaaaatcagtgatgtaaaatcaatatttaagactataggctataaattgtttgatttcattaactagcccttttgatgcctagacatgttgtaaaaaaattgtgctatggctgccttttcttctgccccacaacacaaagggctatttctacaaggcaaagttttgtatatgtgctattctttacttcagattgagagttgggaaaaactggagtaaataatgggtttcttacttgcttaaaagcatatttatatgtgtatctcaatatatacaaggcaggttcccctataaaagtctggaatgtactgcttaattttacacttgtgtagacacgattatttgtgactgaaaagtggaataacgtgtggattttgtcaactcattatcagtctgttagcagtcctctatgtgaggcatggtggtctaattgtgaaattctccctgtatatgggtgtctgtgtgaaagacagcactttcttcctgtaaatatcttttgatatccatttatgtagaattccaatgaatatgtctttggaaaaggtaatgtatcaaagtttttattttgccaattgatctaaatgcccatataactaatcagaaatccagtttggttcagattgggattttcttttaaagaaaaaaaaagtatgcagaaaagactattggaagaatcatgtgttagtgacactttacatcaacgttgcttcaatattttggaattgaccaggctgctttctcctacctgcaagagaatgtgcctgacatttcccagtgcttactttgggctataggaagtccagcggggatagctcgagcctcttgctccctgagtcatttattccctttacctgaacagagccttacctgcaattcatagtgagagcacctgggtctgtatcctgactccactctaagtgaggtgggactgaatcactgtacctctctggggacatttcccagtgcacactttggagcnnatctagtctaacccacttgtttcaaatg

SEQ ID NO: 301795 - DNA, 6320 bp, Homo sapiens
  misc_feature (6291)..(6292): n is a, c, g, or t
gcctcctcggagttgcccctctgcaagccaacaattcgggatagaaaacacctccgtggtgttttcccggggccctcccgcgccgcgttcggccgccagcccgctcgagctcccgcgccaacgcctcaggggttcgccctccgccccccgccgccgcgcccggcccacgcgcagggcccctctccagcgccccctccccggcacgctgcggctggcgctccccagccccgcctgacgctgcagctgggccggagactcgccattggattaaaaatagcgtcgccagtccgccccaagcccgcggtgcccgctcccgccccgcagcccgctctccccgcccgccccggctcggccggctgccgttgcccgcgcagcccgcccgtcagcccgctcgctggcgccgccgccgccggcagaccccgcgctccggctccggctcggctcgctcggctccggtgcgcgccgaggccatgcagcgccggggcgccctgttcggcatgccgggcggcagcggaggcaggaagatggctgcaggagacatcggcgagctgctagtgccccacatgcccacgatccgcgtgcccaggtccggcgacagggtctacaagaacgagtgcgccttctcctacgactctcccaattctgaaggtggactctatgtatgcatgaatacatttttggcctttggaagggaacatgttgaaagacattttcgaaaaactggacagagtgtatacatgcacctgaaaagacatgtgcgagagaaggtaagaggggcgtctggtggagcgttaccaaaaaggaggaattccaagatttttttagatctagatactgatgacgatttaaatagcgacgattatgaatatgaagatgaagccaaacttgttatattcccagatcactatgaaatagcactaccaaatattgaggagttaccagccctggtaacaattgcttgtgatgcagttctcagctcaaaatctccatacagaaagcaggacccagacacgtgggaaaatgaattgccagtatctaaatatgccaacaacctcacccagctggacaatggagtcaggattcctccaagtggttggaagtgtgccagatgcgacctgcgagaaaacctctggttgaatctgactgacggctctgtcctgtgtggaaagtggttctttgacagctctgggggcaacgggcatgcgctggagcattacagagacatgggctacccactagccgtgaaactgggaaccatcactcctgacggggcagatgtttattcttttcaagaagaagaacctgttttggatcctcatttggccaagcacttagcgcattttggaattgatatgcttcatatgcatgggacagagaatgggctccaggacaatgacatcaagctgagggtcagtgagtgggaagtgatccaggagtcgggcacgaaactgaagccaatgtatggtcctggctacacgggtctgaagaacctgggcaacagctgctatctcagctctgtcatgcaggccatcttcagcatcccagaattccagagagcgtatgtaggaaaccttcccagaatatttgactactcgcctttagatccaacacaagatttcaacacacagatgactaagttaggacatggccttctctcaggccagtattcaaagcctccggtgaaatctgaactcattgaacaggtgatgaaggaggagcacaagccacagcagaacgggatctctccgcgcatgtttaaggcctttgtaagcaagagccacccggaattctcctctaacaggcagcaagatgcccaggaattcttcttgcacctggtgaatctagtagagaggaaccgcatcggctcagaaaacccaagcgatgtttttcgttttttggtggaagaacgcattcagtgctgtcagacccggaaagtccgctacacggagagggtggattacctgatgcagttacctgtggccatggaggcggcaaccaacaaggatgaactgatcgcttatgaactaacgagaagggaagcagaagcaaacagaagaccccttcctgagttggtacgtgccaagataccatttagtgcctgccttcaggccttctctgaaccagaaaatgttgatgatttctggagcagtgccctacaagcaaagtctgcgggtgtgaaaacatctcgctttgcttcattccctgaatacttggtagtgcagataaagaagttcacttttggtcttgactgggttcccaaaaaatttgatgtttctattgatatgccagacctacttgatatcaaccatctccgagccagggggttacagccaggagaggaagaacttccagacatcagcccccccatagtcattcctgatgactcaaaagatcgcctgatgaaccaattgatagacccatcagacatcgatgagtcatcagtgatgcagctggccgagatgggtttcccgctggaagcatgtcgcaaggctgtgtacttcactggaaatatgggcgccgaggtggccttcaactggatcattgttcacatggaagagccagattttgctgagccgctgaccatgcctggttatggaggggcagcttctgctggagcctctgtttttggtgcttctggactggataaccaacctccagaggaaatcgtagctatcatcacctccatgggatttcagcgaaatcaggctattcaggcactacgagcaacgaataataacctggaaagagcactggattggatctttagccaccctgagtttgaagaagacagtgattttgtgattgagatggagaataatgccaatgcaaacattatttctgaggccaagcccgaaggacctagagtcaaggatggatctggaacatatgagctatttgcattcatcagtcacatgggaacatccacaatgagtggtcattacatttgccatatcaaaaaggaaggaagatgggtgatttacaatgaccacaaagtttgtgcctcagaaaggccccctaaagacctgggctacatgtacttttaccgcaggataccaagctaaacctcaaatataaaaattggcgaaaagaagccatacgcctttttaatttgccaaaaaaaaaaagaagaagaagaagttgaaacaactagacatgaaggaatatatggggtatttatcgtttatttaaagagcacgatcagttgacaccttctgaaatagaactgagaagaaatttctattagtgatgatacactattatattgtagatagtttttataaatgttcaaaaagatgatgatatttaaaaacaaaaaaagtattcatattgctggtggaggatctgccatcagcacatcaaaaatggggatgtgcccccagccctctattttgctttgggggtcagtgatagtggcctctggagaaaccaaataatgtggccagtggtgtggccttacccacaacaaatgaaaagcccacttgtgtttcatatagaaaatcagcagttgggtggggctttatttgtgacataatttttttcatgacatacaataatttctgatgtatccatgtagatattatgctctgtccataatagagcctctgcaatgaaagatatttttaatttgtcacattaaaattcataatacgattgtgtgaatgtgtgtgagactgactgagagtgtgagacttttactagaaaagtgagtccactagaaaatctgtgacaagttggtttttaaagtctgaacagttgatattaagcatatctgaaaaaagcaagtaaatattttaacaaaactatgactcaggaaccttcgagaagattagttccccacttagatttttaaggagtaaaaagggctgagttatgcctttaagtgctgtcaagaattcacttgggtttgggacatttgctggtgtaatgctagatgcccacagcagcataatattgtactttgtcaaaggtaggtaaattctctgtttctcagcagccctttccccaaaaggtatggtgtttatttttagtaaaaatagctaatctctttttaccatctcacatgataactctttggagtcatgtcaagtgccccaaatttgtctgtgattttcccatctctgagctctttatctgcctccgtttccttgtttttctggggccagagtctcatctctgcctttttttggtgtatcaccttctgacttgccttcattgcttgtctgatgtgaccaacagtgtgatcttggacacactaaggattttagatgcaaagaaactttatacaacattatgaaagactatcctttccattttggttatttcagcattttagttgcaacctgggattagattagagtttccaacgtgatgaaaagtggaatgatagcattctataatttccataattttcctactggtccgtaccaaattctagagtctctggagttgctatttcagagtatttggtcaaacgaaaaagaatttattgctgtctgtttaacatgtatttgtttggttgaaaggatctttttagaaactgtaggaaaataaacagaaccaaccaggtgaaacaaagcacagacattgggttaggatgtagtgagttgtgaacaatcaggattctgggtgtgatgggggtccctgtctcataggtgatcctttggtgccatgtgaccgagagacatggtgtctaaggcccatggcctggagacctgggtgctgctcctagctgactgtggaccttgggcaagtccttcatccgtcctgtgcctcactgtcctcatctgaacaatggtatgatgacacctgccctctctttcaatcatgctttgaggatacagtgagattggttacagtgaaccttcaatgagtagaatgtggtatgccatggtgggttgtagtagatggtgctccctgccttttctcctctgttttcctcaatttgggaacaaatgagattggcagaaggagggagctcacggtgcagtacttttctaccaaagtgtgcccactggtgtcacctcctaatgttaacttggatttcctaaagcagtcccactctgttatgagagtcactgactcccgtggacatccccacagtaagcagccttacaaaatccagtccccttagggcagagtgagtgtcatagaataatgactccaaacccacgtcaaaaatggcttgttttcagcgatgttataaaacaaaggcctgttttttggaattgggggtgactgggtggtttggattgaaatgtggacaaagatagcatgtgtattttgaataaaataaaaattttgtaataaaacttttaaaaatcagtgatgtaaaatcaatatttaagactataggctataaattgtttgatttcattaactagcccttttgatgcctagacatgttgtaaaaaaattgtgctatggctgccttttcttctgccccacaacacaaagggctatttctacaaggcaaagttttgtatatgtgctattctttacttcagattgagagttgggaaaaactggagtaaataatgggtttcttacttgcttaaaagcatatttatatgtgtatctcaatatatacaaggcaggttcccctataaaagtctggaatgtactgcttaattttacacttgtgtagacacgattatttgtgactgaaaagtggaataacgtgtggattttgtcaactcattatcagtctgttagcagtcctctatgtgaggcatggtggtctaattgtgaaattctccctgtatatgggtgtctgtgtgaaagacagcactttcttcctgtaaatatcttttgatatccatttatgtagaattccaatgaatatgtctttggaaaaggtaatgtatcaaagtttttattttgccaattgatctaaatgcccatataactaatcagaaatccagtttggttcagattgggattttcttttaaagaaaaaaaaagtatgcagaaaagactattggaagaatcatgtgttagtgacactttacatcaacgttgcttcaatattttggaattgaccaggctgctttctcctacctgcaagagaatgtgcctgacatttcccagtgcttactttgggctataggaagtccagcggggatagctcgagcctcttgctccctgagtcatttattccctttacctgaacagagccttacctgcaattcatagtgagagcacctgggtctgtatcctgactccactctaagtgaggtgggactgaatcactgtacctctctggggacatttcccagtgcacactttggagcnnatctagtctaacccacttgtttcaaatg

SEQ ID NO: 301796 - DNA, 1045 bp, Homo sapiens
gcctcctcggagttgcccctctgcaagccaacaattcgggatagaaaacacctccgtggtgttttcccggggccctcccgcgccgcgttcggccgccagcccgctcgagctcccgcgccaacgcctcaggggttcgccctccgccccccgccgccgcgcccggcccacgcgcagggcccctctccagcgccccctccccggcacgctgcggctggcgctccccagccccgcctgacgctgcagctgggccggagactcgccattggattaaaaatagcgtcgccagtccgccccaagcccgcggtgcccgctcccgccccgcagcccgctctccccgcccgccccggctcggccggctgccgttgcccgcgcagcccgcccgtcagcccgctcgctggcgccgccgccgccggcagaccccgcgctccggctccggctcggctcgctcggctccggtgcgcgccgaggccatgcagcgccggggcgccctgttcggcatgccgggcggcagcggaggcaggaagatggctgcaggagacatcggcgagctgctagtgccccacatgcccacgatccgcgtgcccaggtccggcgacagggtctacaagaacgagtgcgccttctcctacgactctcccaattctgaaggtggactctatgtatgcatgaatacatttttggcctttggaagggaacatgttgaaagacattttcgaaaaactggacagagtgtatacatgcacctgaaaagacatgtgcgagagatctagatactgatgacgatttaaatagcgacgattatgaatatgaagatgaagccaaacttgttatattcccagatcactatgaaatagcactaccaaatattgaggagttaccagccctggtaacaattgcttgtgatgcagttctcagctcaaaatctccatacagaaagcaggacccagacacgtgggaaaatgaattgccagtatctaaatatgccaacaacctcacccagctggacaatggagtcaggattcctccaaggtgagagtcagatagc

SEQ ID NO: 301797 - DNA, 568 bp, Homo sapiens
gcatgtcgcaaggctgtgtacttcactggaaatatgggcgccgaggtggccttcaactggatcattgttcacatggaagagccaggtaggtggcgagaaaatggaatggctttggagtctgatgtgaccctcagtgatgctgagtcctggtccttccaaggtccctgtggatgtatccctagaaaatgactttatagttcctaatctcctgcagtggaggagaaagccagtctttttcttcttctttttttttttaaaaacagcagctttaggccaggcgtgggggctcatgcctgtaatcccagcactttgggaggccaaggcaggcggatcacgaagtcaagagatgaagaccatcctggccaacatagtgaaaccccatctctactaaagatacaaaaattagctgggcatggtggtgcgtacctgtagtcccagctactcaggaggctgaggcaggagaatcgcttgaacgcaggaggcggaggctgcagtgagccaagattgcaccactgcactctggcctgagtgacagagcgagactctgtctcaaaaaaacaaacaaaca

SEQ ID NO: 301798 - DNA, 134 bp, Homo sapiens
tcctgactgtgcttgcaggtggacgtgccccatgtgaaatgcaaagaccaggaaccgcagcccttgggggagagcaaggagcatccgcggtgggaagagaactgcgaggaggaagctggtggagggccagctag

SEQ ID NO: 301799 - DNA, 616 bp, Homo sapiens
gaattgtaatataaattcgtattattgccaccacgtaggacacagaacagctccatcgccctgtacatgtcctgttgctgcctttgtgtagtcactggagatgtgggttttatttttattattttctccatttgatagatagtgccgacttgattcacttcatccattccagggccaatttttcactgttgattgtcaggggctctgctctgctgtttctccagccctctccagtgaaagagatgtaactgcagtgccatagttgtcagcttgttagttattggcaagtcttggttggattttctattcttcattgtgggctgtccttgcctgtacacctagcatgctctggaaccctttgtggatttatgagaattcaagctaattccaacagtggccaaagaaaaaaatagccagggaaatatgttattgctaaccatataggcctcagagtgaaaacggcttttggagtattctgctttgaattatttattttagtctttctcagatgtcaggacagatttttaagatttgggcataatgtttaaaatgaagatggtatgtctgtagattttattgacccaacttggtccccccaggctgtcctcacctgccc

SEQ ID NO: 301800 - DNA, 225 bp, Homo sapiens
tatacgggtgcgagaagacgacagccagaaggggtgaaagggttgcaggtcccgaccactgacccttcccggctgccctccctccccagcttacacctcaagcccagcacgcagtgcaccttgaacagagggaggggaggacccatggctctcccccctagcccgggagaccaggggccttcctcttcctctgcttttatttaataaaaactaaaaacagaaaca

SEQ ID NO: 301801 - DNA, 630 bp, Homo sapiens
tatacgggtgcgagaagacgacagccagaaggggtgaaagggttgcaggtcccgaccactgacccttcccggctgccctccctccccagcttacacctcaagcccagcacgcagtgcaccttgaacagagggaggggaggacccatggctctcccccctagcccgggagaccaggggccttcctcttcctctgcttttatttaataaaaactaaaaacagaaacaggaaaataaaatatgaatacaatccagcccggagctggagtgcaagatggagagggcgcgggcttctagggacctcagtgacactgggtgcccgaacctgattgagcaggtgggactgggtgtccccaggctgttgggaaaagggtggcacatagggtcccagtgttgggtggtgtgtcgcctgctgtgaaagttcaggacagaggcctcagcctcagggtcacctccctggacaaggtgaatcagaactcacccttgaaggataaacaggatttaagtgaatgaggggacctggacttctgtccgaacaacaagtgtttgctgaggcctcctgtgggccaggcactgggttggccattctagagatggagacattcacccaataaatgtttccagagcattaac

SEQ ID NO: 301802 - DNA, 2028 bp, Homo sapiens
gctcttccggacgtgacgcaagggcggggttgccggaagaagtggcgaagttacttttgagggtatttgagtagcggcggtgtgtcaggggctaaagaggaggacgaagaaaagcagagcaagggaacccagggcaacaggagtagttcactccgcgagaggccgtccacgagacccccgcgcgcagccatgagccccgccccccgctgttgcttggagaggggcgggacctggagagaggctgctccgtgaccccaccatgtcctctcctaccacgagttccctggatacccccctgcctggaaatggcccccctcagcctggcgccccttcttcttcacccactgtaaaggaggagggtccggagccgtggcccgggggtccggaccctgatgtcccaggcactgatgaggccagctcagcctgcagcacagactgggtcatcccagatcccgaagaggaaccagagcgcaagcgaaagaagggcccagccccgaagatgctgggccacgagctttgccgtgtctgtggggacaaggcctccggcttccactacaacgtgctcagctgcgaaggctgcaagggcttcttccggcgcagtgtggtccgtggtggggccaggcgctatgcctgccggggtggcggaacctgccagatggacgctttcatgcggcgcaagtgccagcagtgccggctgcgcaagtgcaaggaggcagggatgagggagcagtgcgtcctttctgaagaacagatccggaagaagaagattcggaaacaacagcagcaggagtcacagtcacagtcgcagtcacctgtggggccgcagggcagcagcagctcagcctctgggcctggggcttcccctggtggatctgaggcaggcagccagggctccggggaaggcgagggtgtccagctaacagcggctcaagaactaatgatccagcagttggtggcggcccaactgcagtgcaacaaacgctccttctccgaccagcccaaagtcacgccctggcccctgggcgcagacccccagtcccgagatgcccgccagcaacgctttgcccacttcacggagctggccatcatctcagtccaggagatcgtggacttcgctaagcaagtgcctggtttcctgcagctgggccgggaggaccagatcgccctcctgaaggcatccactatcgagatcatgctgctagagacagccaggcgctacaaccacgagacagagtgtatcaccttcttgaaggacttcacctacagcaaggacgacttccaccgtgcaggcctgcaggtggagttcatcaaccccatcttcgagttctcgcgggccatgcggcggctgggcctggacgacgctgagtacgccctgctcatcgccatcaacatcttctcggccgaccggcccaacgtgcaggagccgggccgcgtggaggcgttgcagcagccctacgtggaggcgctgctgtcctacacgcgcatcaagaggccgcaggaccagctgcgcttcccgcgcatgctcatgaagctggtgagcctgcgcacgctgagctctgtgcactcggagcaggtcttcgccttgcggctccaggacaagaagctgccgcctctgctgtcggagatctgggacgtccacgagtgaggggctggccacccagccccacagccttgcctgaccaccctccagcagatagacgccggcaccccttcctcttcctagggtggaaggggccctgggccgagcctgtagacctatcggctctcatcccttgggataagccccagtccaggtccaggaggctccctccctgcccagcgagtcttccagaaggggtgaaagggttgcaggtcccgaccactgacccttcccggctgccctccctccccagcttacacctcaagcccagcacgcagtgcaccttgaacagagggaggggaggacccatggctctcccccctagcccgggagaccaggggccttcctcttcctctgcttttatttaataaaaactaaaaacagaaaca

SEQ ID NO: 301803 - DNA, 2433 bp, Homo sapiens
gctcttccggacgtgacgcaagggcggggttgccggaagaagtggcgaagttacttttgagggtatttgagtagcggcggtgtgtcaggggctaaagaggaggacgaagaaaagcagagcaagggaacccagggcaacaggagtagttcactccgcgagaggccgtccacgagacccccgcgcgcagccatgagccccgccccccgctgttgcttggagaggggcgggacctggagagaggctgctccgtgaccccaccatgtcctctcctaccacgagttccctggatacccccctgcctggaaatggcccccctcagcctggcgccccttcttcttcacccactgtaaaggaggagggtccggagccgtggcccgggggtccggaccctgatgtcccaggcactgatgaggccagctcagcctgcagcacagactgggtcatcccagatcccgaagaggaaccagagcgcaagcgaaagaagggcccagccccgaagatgctgggccacgagctttgccgtgtctgtggggacaaggcctccggcttccactacaacgtgctcagctgcgaaggctgcaagggcttcttccggcgcagtgtggtccgtggtggggccaggcgctatgcctgccggggtggcggaacctgccagatggacgctttcatgcggcgcaagtgccagcagtgccggctgcgcaagtgcaaggaggcagggatgagggagcagtgcgtcctttctgaagaacagatccggaagaagaagattcggaaacaacagcagcaggagtcacagtcacagtcgcagtcacctgtggggccgcagggcagcagcagctcagcctctgggcctggggcttcccctggtggatctgaggcaggcagccagggctccggggaaggcgagggtgtccagctaacagcggctcaagaactaatgatccagcagttggtggcggcccaactgcagtgcaacaaacgctccttctccgaccagcccaaagtcacgccctggcccctgggcgcagacccccagtcccgagatgcccgccagcaacgctttgcccacttcacggagctggccatcatctcagtccaggagatcgtggacttcgctaagcaagtgcctggtttcctgcagctgggccgggaggaccagatcgccctcctgaaggcatccactatcgagatcatgctgctagagacagccaggcgctacaaccacgagacagagtgtatcaccttcttgaaggacttcacctacagcaaggacgacttccaccgtgcaggcctgcaggtggagttcatcaaccccatcttcgagttctcgcgggccatgcggcggctgggcctggacgacgctgagtacgccctgctcatcgccatcaacatcttctcggccgaccggcccaacgtgcaggagccgggccgcgtggaggcgttgcagcagccctacgtggaggcgctgctgtcctacacgcgcatcaagaggccgcaggaccagctgcgcttcccgcgcatgctcatgaagctggtgagcctgcgcacgctgagctctgtgcactcggagcaggtcttcgccttgcggctccaggacaagaagctgccgcctctgctgtcggagatctgggacgtccacgagtgaggggctggccacccagccccacagccttgcctgaccaccctccagcagatagacgccggcaccccttcctcttcctagggtggaaggggccctgggccgagcctgtagacctatcggctctcatcccttgggataagccccagtccaggtccaggaggctccctccctgcccagcgagtcttccagaaggggtgaaagggttgcaggtcccgaccactgacccttcccggctgccctccctccccagcttacacctcaagcccagcacgcagtgcaccttgaacagagggaggggaggacccatggctctcccccctagcccgggagaccaggggccttcctcttcctctgcttttatttaataaaaactaaaaacagaaacaggaaaataaaatatgaatacaatccagcccggagctggagtgcaagatggagagggcgcgggcttctagggacctcagtgacactgggtgcccgaacctgattgagcaggtgggactgggtgtccccaggctgttgggaaaagggtggcacatagggtcccagtgttgggtggtgtgtcgcctgctgtgaaagttcaggacagaggcctcagcctcagggtcacctccctggacaaggtgaatcagaactcacccttgaaggataaacaggatttaagtgaatgaggggacctggacttctgtccgaacaacaagtgtttgctgaggcctcctgtgggccaggcactgggttggccattctagagatggagacattcacccaataaatgtttccagagcattaac

SEQ ID NO: 301804 - DNA, 2309 bp, Homo sapiens
gctcttccggacgtgacgcaagggcggggttgccggaagaagtggcgaagttacttttgagggtatttgagtagcggcggtgtgtcaggggctaaagaggaggacgaagaaaagcagagcaagggaacccagggcaacaggagtagttcactccgcgagaggccgtccacgagacccccgcgcgcagccatgagccccgccccccgctgttgcttggagaggggcgggacctggagagaggctgctccgtgaccccaccatgtcctctcctaccacgagttccctggatacccccctgcctggaaatggcccccctcagcctggcgccccttcttcttcacccactgtaaaggaggagggtccggagccgtggcccgggggtccggaccctgatgtcccaggcactgatgaggccagctcagcctgcagcacagactgggtcatcccagatcccgaagaggaaccagagcgcaagcgaaagaagggcccagccccgaagatgctgggccacgagctttgccgtgtctgtggggacaaggcctccggcttccactacaacgtgctcagctgcgaaggctgcaagggcttcttccggcgcagtgtggtccgtggtggggccaggcgctatgcctgccggggtggcggaacctgccagatggacgctttcatgcggcgcaagtgccagcagtgccggctgcgcaagtgcaaggaggcagggatgagggagcagtgcgtcctttctgaagaacagatccggaagaagaagattcggaaacaacagcagcaggagtcacagtcacagtcgcagtcacctgtggggccgcagggcagcagcagctcagcctctgggcctggggcttcccctggtggatctgaggcaggcagccagggctccggggaaggcgagggtgtccagctaacagcggctcaagaactaatgatccagcagttggtggcggcccaactgcagtgcaacaaacgctccttctccgaccagcccaaagtcacgccctggcccctgggcgcagacccccagtcccgagatgcccgccagcaacgctttgcccacttcacggagctggccatcatctcagtccaggagatcgtggacttcgctaagcaagtgcctggtttcctgcagctgggccgggaggaccagatcgccctcctgaaggcatccactatcgagatcatgctgctagagacagccaggcgctacaaccacgagacagagtgtatcaccttcttgaaggacttcacctacagcaaggacgacttccaccgtgcaggcctgcaggtggagttcatcaaccccatcttcgagttctcgcgggccatgcggcggctgggcctggacgacgctgagtacgccctgctcatcgccatcaacatcttctcggccgaccggcccaacgtgcaggagccgggccgcgtggaggcgttgcagcagccctacgtggaggcgctgctgtcctacacgcgcatcaagaggccgcaggtagggccccgcagagcctctgcgcagagccaactacgtcccgcggcccacgtggtccgttcaggctgggttctgccagccacactgccctcccctccgcagagtctttcctcaggccccaccctgctcgactgggagccaggtctagtccaagcacagaggcgggccccacgctggctcccacgcctggtcggggaggggccctcctttctgttggggtgggcctcccaaagcctggcagggcaggggctcagccagcgcccacctgcctcctccctcaggaccagctgcgcttcccgcgcatgctcatgaagctggtgagcctgcgcacgctgagctctgtgcactcggagcaggtcttcgccttgcggctccaggacaagaagctgccgcctctgctgtcggagatctgggacgtccacgagtgaggggctggccacccagccccacagccttgcctgaccaccctccagcagatagacgccggcaccccttcctcttcctagggtggaaggggccctgggccgagcctgtagacctatcggctctcatcccttgggataagccccagtccaggtccaggaggctccctccctgcccagcgagtcttccagaaggggtgaaagggttgcaggtcccgaccactgacccttcccggctgccctccctccccagcttacacctcaagcccagcacgcagtgcaccttgaacagagggaggggaggacccatggctctcccccctagcccgggagaccaggggccttcctcttcctctgcttttatttaataaaaactaaaaacagaaaca

SEQ ID NO: 301805 - DNA, 2035 bp, Homo sapiens
  misc_feature (30)..(30): n is a, c, g, or t
accgtagtgttggtacaatatagaaccccnttttggtattttaaagagccagggctgtcggtcgaatctgggattgagtagcggcggtgtgtcaggggctaaagaggaggacgaagaaaagcagagcaagggaacccagggcaacaggagtagttcactccgcgagaggccgtccacgagacccccgcgcgcagccatgagccccgccccccgctgttgcttggagaggggcgggacctggagagaggctgctccgtgaccccaccatgtcctctcctaccacgagttccctggatacccccctgcctggaaatggcccccctcagcctggcgccccttcttcttcacccactgtaaaggaggagggtccggagccgtggcccgggggtccggaccctgatgtcccaggcactgatgaggccagctcagcctgcagcacagactgggtcatcccagatcccgaagaggaaccagagcgcaagcgaaagaagggcccagccccgaagatgctgggccacgagctttgccgtgtctgtggggacaaggcctccggcttccactacaacgtgctcagctgcgaaggctgcaagggcttcttccggcgcagtgtggtccgtggtggggccaggcgctatgcctgccggggtggcggaacctgccagatggacgctttcatgcggcgcaagtgccagcagtgccggctgcgcaagtgcaaggaggcagggatgagggagcagtgcgtcctttctgaagaacagatccggaagaagaagattcggaaacaacagcagcaggagtcacagtcacagtcgcagtcacctgtggggccgcagggcagcagcagctcagcctctgggcctggggcttcccctggtggatctgaggcaggcagccagggctccggggaaggcgagggtgtccagctaacagcggctcaagaactaatgatccagcagttggtggcggcccaactgcagtgcaacaaacgctccttctccgaccagcccaaagtcacgccctggcccctgggcgcagacccccagtcccgagatgcccgccagcaacgctttgcccacttcacggagctggccatcatctcagtccaggagatcgtggacttcgctaagcaagtgcctggtttcctgcagctgggccgggaggaccagatcgccctcctgaaggcatccactatcgagatcatgctgctagagacagccaggcgctacaaccacgagacagagtgtatcaccttcttgaaggacttcacctacagcaaggacgacttccaccgtgcaggcctgcaggtggagttcatcaaccccatcttcgagttctcgcgggccatgcggcggctgggcctggacgacgctgagtacgccctgctcatcgccatcaacatcttctcggccgaccggcccaacgtgcaggagccgggccgcgtggaggcgttgcagcagccctacgtggaggcgctgctgtcctacacgcgcatcaagaggccgcaggaccagctgcgcttcccgcgcatgctcatgaagctggtgagcctgcgcacgctgagctctgtgcactcggagcaggtcttcgccttgcggctccaggacaagaagctgccgcctctgctgtcggagatctgggacgtccacgagtgaggggctggccacccagccccacagccttgcctgaccaccctccagcagatagacgccggcaccccttcctcttcctagggtggaaggggccctgggccgagcctgtagacctatcggctctcatcccttgggataagccccagtccaggtccaggaggctccctccctgcccagcgagtcttccagaaggggtgaaagggttgcaggtcccgaccactgacccttcccggctgccctccctccccagcttacacctcaagcccagcacgcagtgcaccttgaacagagggaggggaggacccatggctctcccccctagcccgggagaccaggggccttcctcttcctctgcttttatttaataaaaactaaaaacagaaaca

SEQ ID NO: 301806 - DNA, 2472 bp, Homo sapiens
gctcttccggacgtgacgcaagggcggggttgccggaagaagtggcgaagttacttttgagggtatttgagtagcggcggtgtgtcaggggctaaagaggaggacgaagaaaagcagagcaagggaacccagggcaacaggagtagttcactccgcgagaggccgtccacgagacccccgcgcgcagccatgagccccgccccccgctgttgcttggagaggggcgggacctggagagaggctgctccgtgaccccaccatgtcctctcctaccacgagttccctggatacccccctgcctggaaatggcccccctcagcctggcgccccttcttcttcacccactgtaaaggaggagggtccggagccgtggcccgggggtccggaccctgatgtcccaggcactgatgaggccagctcagcctgcagcacagactgggtcatcccagatcccgaagaggaaccagagcgcaagcgaaagaagggcccagccccgaagatgctgggccacgagctttgccgtgtctgtggggacaaggcctccggcttccactacaacgtgctcagctgcgaaggctgcaagggcttcttccggcgcagtgtggtccgtggtggggccaggcgctatgcctgccggggtggcggaacctgccagatggacgctttcatgcggcgcaagtgccagcagtgccggctgcgcaagtgcaaggaggcagggatgagggagcagtgcgtcctttctgaagaacagatccggaagaagaagattcggaaacaacagcagcaggagtcacagtcacagtcgcagtcacctgtggggccgcagggcagcagcagctcagcctctgggcctggggcttcccctggtggatctgaggcaggcagccagggctccggggaaggcgagggtgtccagctaacagcggctcaagaactaatgatccagcagttggtggcggcccaactgcagtgcaacaaacgctccttctccgaccagcccaaagtcacgccctggcccctgggcgcagacccccagtcccgagatgcccgccagcaacgctttgcccacttcacggagctggccatcatctcagtccaggagatcgtggacttcgctaagcaagtgcctggtttcctgcagctgggccgggaggaccagatcgccctcctgaaggcatccactatcgagatcatgctgctagagacagccaggcgctacaaccacgagacagagtgtatcaccttcttgaaggacttcacctacagcaaggacgacttccaccgtgcaggcctgcaggtggagttcatcaaccccatcttcgagttctcgcgggccatgcggcggctgggcctggacgacgctgagtacgccctgctcatcgccatcaacatcttctcggccgaccggcccaacgtgcaggagccgggccgcgtggaggcgttgcagcagccctacgtggaggcgctgctgtcctacacgcgcatcaagaggccgcaggaccagctgcgcttcccgcgcatgctcatgaagctggtgagcctgcgcacgctgagctctgtgcactcggagcaggtcttcgccttgcggctccaggacaagaagctgccgcctctgctgtcggagatctgggacgtccacgagtgaggggctggccacccagccccacagccttgcctgaccaccctccagcagatagacgccggcaccccttcctcttcctagggtggaaggggccctgggccgagcctgtagacctatcggctctcatcccttgggataagccccagtccaggtccaggaggctccctccctgcccagcgagtcttccagaaggggtgaaagggttgcaggtcccgaccactgacccttcccggctgccctccctccccagcttacacctcaagcccagcacgcagtgcaccttgaacagagggaggggaggacccatggctctcccccctagcccgggagaccaggggccttcctcttcctctgcttttatttaataaaaactaaaaacagaaacaaaaaaacatcaagaaagaaagcagaaaaacacagggcgggcccgcctcctcgagcgttctcccttcgcaggctgcccccatccgccttctcgcggcgttctcccggttcttctctgtgtgcccgccgcggcggtccccttactggcgcggtctcgcttctgttcacgcctaggcgccgtggcccgccaccgcctttcccccgcccgccctgcggcatcgcgcgccccacccggcgccaggcctgtgcgcgaccctcgtcggcacgtgggacccgctgcctctccgcgtggggcgcgccggccctctcgcggcggcgccccctcgctgtccccacagctcgcggacctgcgcacgcgcccccctcgggcgcgcgccgcgtgccactgcgtcgcccgccggtcttctccccgcggcgctctgctctctcccggtggcctgcgcccc

SEQ ID NO: 301807 - DNA, 1301 bp, Homo sapiens
gctcttccggacgtgacgcaagggcggggttgccggaagaagtggcgaagttacttttgagggtatttgagtagcggcggtgtgtcaggggctaaagaggaggacgaagaaaagcagagcaagggaacccagggcaacaggagtagttcactccgcgagaggccgtccacgagacccccgcgcgcagccatgagccccgccccccgctgttgcttggagaggggcgggacctggagagaggctgctccgtgaccccaccatgtcctctcctaccacgagttccctggatacccccctgcctggaaatggcccccctcagcctggcgccccttcttcttcacccactgtaaaggaggagggtccggagccgtggcccgggggtccggaccctgatgtcccaggcactgatgaggccagctcagcctgcagcacagactgggtcatcccagatcccgaagaggaaccagagcgcaagcgaaagaagggcccagccccgaagatgctgggccacgagctttgccgtgtctgtggggacaaggcctccggcttccactacaacgtgctcagctgcgaaggctgcaagggcttcttccggcgcagtgtggtccgtggtggggccaggcgctatgcctgccggggtggcggaacctgccagatggacgctttcatgcggcgcaagtgccagcagtgccggctgcgcaagtgcaaggaggcagggatgagggagcagtgcgtcctttctgaagaacagatccggaagaagaagattcggaaacaacagcagcaggagtcacagtcacagtcgcagtcacctgtggggccgcagggcagcagcagctcagcctctgggcctggggcttcccctggtggatctgaggcaggcagccagggctccggggaaggcgagggtgtccagctaacagcggctcaagaactaatgatccagcagttggtggcggcccaactgcagtgcaacaaacgctccttctccgaccagcccaaagtcacgctgggccgagcctgtagacctatcggctctcatcccttgggataagccccagtccaggtccaggaggctccctccctgcccagcgagtcttccagaaggggtgaaagggttgcaggtcccgaccactgacccttcccggctgccctccctccccagcttacacctcaagcccagcacgcagtgcaccttgaacagagggaggggaggacccatggctctcccccctagcccgggagaccaggggccttcctcttcctctgcttttatttaataaaaactaaaaacagaaaca

SEQ ID NO: 301808 - DNA, 1138 bp, Homo sapiens
gctcttccggacgtgacgcaagggcggggttgccggaagaagtggcgaagttacttttgagggtatttgagtagcggcggtgtgtcaggggctaaagaggaggacgaagaaaagcagagcaagggaacccagggcaacaggagtagttcactccgcgagaggccgtccacgagacccccgcgcgcagccatgagccccgccccccgctgttgcttggagaggggcgggacctggagagaggctgctccgtgaccccaccatgtcctctcctaccacgagttccctggatacccccctgcctggaaatggcccccctcagcctggcgccccttcttcttcacccactgtaaaggaggagggtccggagccgtggcccgggggtccggaccctgatgtcccaggcactgatgaggccagctcagcctgcagcacagactgggtcatcccagatcccgaagaggaaccagagcgcaagcgaaagaagggcccagccccgaagatgctgggccacgagctttgccgtgtctgtggggacaaggcctccggcttccactacaacgtgctcagctgcgaaggctgcaagggcttcttccggcgcagtgtggtccgtggtggggccaggcgctatgcctgccggggtggcggaacctgccagatggacgctttcatgcggcgcaagtgccagcagtgccggctgcgcaagtgcaaggaggcagggatgagggagcagtgcgtcctttctgaagaacagatccggaagaagaagattcggaaacaacagcagcaggagtcacagtcacagtcgcagtcacctgtggggccgcagggcagcagcagctcagcctctgggcctggggcttcccctggtggatctgaggcaggcagccagggctccggggaaggcgagggtgtccagctaacagcggctcaagaactaccagaaggggtgaaagggttgcaggtcccgaccactgacccttcccggctgccctccctccccagcttacacctcaagcccagcacgcagtgcaccttgaacagagggaggggaggacccatggctctcccccctagcccgggagaccaggggccttcctcttcctctgcttttatttaataaaaactaaaaacagaaaca

SEQ ID NO: 301809 - DNA, 1947 bp, Homo sapiens
cgggttccagcgattctcctgcctcagtctcctgagtagctgggactacagggcaacaggagtagttcactccgcgagaggccgtccacgagacccccgcgcgcagccatgagccccgccccccgctgttgcttggagaggggcgggacctggagagaggctgctccgtgaccccaccatgtcctctcctaccacgagttccctggatacccccctgcctggaaatggcccccctcagcctggcgccccttcttcttcacccactgtaaaggaggagggtccggagccgtggcccgggggtccggaccctgatgtcccaggcactgatgaggccagctcagcctgcagcacagactgggtcatcccagatcccgaagaggaaccagagcgcaagcgaaagaagggcccagccccgaagatgctgggccacgagctttgccgtgtctgtggggacaaggcctccggcttccactacaacgtgctcagctgcgaaggctgcaagggcttcttccggcgcagtgtggtccgtggtggggccaggcgctatgcctgccggggtggcggaacctgccagatggacgctttcatgcggcgcaagtgccagcagtgccggctgcgcaagtgcaaggaggcagggatgagggagcagtgcgtcctttctgaagaacagatccggaagaagaagattcggaaacaacagcagcaggagtcacagtcacagtcgcagtcacctgtggggccgcagggcagcagcagctcagcctctgggcctggggcttcccctggtggatctgaggcaggcagccagggctccggggaaggcgagggtgtccagctaacagcggctcaagaactaatgatccagcagttggtggcggcccaactgcagtgcaacaaacgctccttctccgaccagcccaaagtcacgccctggcccctgggcgcagacccccagtcccgagatgcccgccagcaacgctttgcccacttcacggagctggccatcatctcagtccaggagatcgtggacttcgctaagcaagtgcctggtttcctgcagctgggccgggaggaccagatcgccctcctgaaggcatccactatcgagatcatgctgctagagacagccaggcgctacaaccacgagacagagtgtatcaccttcttgaaggacttcacctacagcaaggacgacttccaccgtgcaggcctgcaggtggagttcatcaaccccatcttcgagttctcgcgggccatgcggcggctgggcctggacgacgctgagtacgccctgctcatcgccatcaacatcttctcggccgaccggcccaacgtgcaggagccgggccgcgtggaggcgttgcagcagccctacgtggaggcgctgctgtcctacacgcgcatcaagaggccgcaggaccagctgcgcttcccgcgcatgctcatgaagctggtgagcctgcgcacgctgagctctgtgcactcggagcaggtcttcgccttgcggctccaggacaagaagctgccgcctctgctgtcggagatctgggacgtccacgagtgaggggctggccacccagccccacagccttgcctgaccaccctccagcagatagacgccggcaccccttcctcttcctagggtggaaggggccctgggccgagcctgtagacctatcggctctcatcccttgggataagccccagtccaggtccaggaggctccctccctgcccagcgagtcttccagaaggggtgaaagggttgcaggtcccgaccactgacccttcccggctgccctccctccccagcttacacctcaagcccagcacgcagtgcaccttgaacagagggaggggaggacccatggctctcccccctagcccgggagaccaggggccttcctcttcctctgcttttatttaataaaaactaaaaacagaaaca

SEQ ID NO: 301810 - DNA, 1952 bp, Homo sapiens
  misc_feature (41)..(41): n is a, c, g, or t
taccgatcccccaaacgcagagaggaggacgaagaaaagcngagcaagggaacccaggcaacaggagtagttcactccgcgagaggccgtccacgagacccccgcgcgcagccatgagccccgccccccgctgttgcttggagaggggcgggacctggagagaggctgctccgtgaccccaccatgtcctctcctaccacgagttccctggatacccccctgcctggaaatggcccccctcagcctggcgccccttcttcttcacccactgtaaaggaggagggtccggagccgtggcccgggggtccggaccctgatgtcccaggcactgatgaggccagctcagcctgcagcacagactgggtcatcccagatcccgaagaggaaccagagcgcaagcgaaagaagggcccagccccgaagatgctgggccacgagctttgccgtgtctgtggggacaaggcctccggcttccactacaacgtgctcagctgcgaaggctgcaagggcttcttccggcgcagtgtggtccgtggtggggccaggcgctatgcctgccggggtggcggaacctgccagatggacgctttcatgcggcgcaagtgccagcagtgccggctgcgcaagtgcaaggaggcagggatgagggagcagtgcgtcctttctgaagaacagatccggaagaagaagattcggaaacaacagcagcaggagtcacagtcacagtcgcagtcacctgtggggccgcagggcagcagcagctcagcctctgggcctggggcttcccctggtggatctgaggcaggcagccagggctccggggaaggcgagggtgtccagctaacagcggctcaagaactaatgatccagcagttggtggcggcccaactgcagtgcaacaaacgctccttctccgaccagcccaaagtcacgccctggcccctgggcgcagacccccagtcccgagatgcccgccagcaacgctttgcccacttcacggagctggccatcatctcagtccaggagatcgtggacttcgctaagcaagtgcctggtttcctgcagctgggccgggaggaccagatcgccctcctgaaggcatccactatcgagatcatgctgctagagacagccaggcgctacaaccacgagacagagtgtatcaccttcttgaaggacttcacctacagcaaggacgacttccaccgtgcaggcctgcaggtggagttcatcaaccccatcttcgagttctcgcgggccatgcggcggctgggcctggacgacgctgagtacgccctgctcatcgccatcaacatcttctcggccgaccggcccaacgtgcaggagccgggccgcgtggaggcgttgcagcagccctacgtggaggcgctgctgtcctacacgcgcatcaagaggccgcaggaccagctgcgcttcccgcgcatgctcatgaagctggtgagcctgcgcacgctgagctctgtgcactcggagcaggtcttcgccttgcggctccaggacaagaagctgccgcctctgctgtcggagatctgggacgtccacgagtgaggggctggccacccagccccacagccttgcctgaccaccctccagcagatagacgccggcaccccttcctcttcctagggtggaaggggccctgggccgagcctgtagacctatcggctctcatcccttgggataagccccagtccaggtccaggaggctccctccctgcccagcgagtcttccagaaggggtgaaagggttgcaggtcccgaccactgacccttcccggctgccctccctccccagcttacacctcaagcccagcacgcagtgcaccttgaacagagggaggggaggacccatggctctcccccctagcccgggagaccaggggccttcctcttcctctgcttttatttaataaaaactaaaaacagaaaca

SEQ ID NO: 301811 - DNA, 2177 bp, Homo sapiens
  misc_feature (30)..(30): n is a, c, g, or t
accgtagtgttggtacaatatagaaccccnttttggtattttaaagagccagggctgtcggtcgaatctgggattgagtagcggcggtgtgtcaggggctaaagaggaggacgaagaaaagcagagcaagggaacccaggtaggtgcacccgagagtggggagacgcaggaggagccccgaacccggggcttctcggcgctccccgcgtactccgctctgcccccttctctccttccatttcctcccctcggtaattcgcgcctcccgcggctgtttccagggcaacaggagtagttcactccgcgagaggccgtccacgagacccccgcgcgcagccatgagccccgccccccgctgttgcttggagaggggcgggacctggagagaggctgctccgtgaccccaccatgtcctctcctaccacgagttccctggatacccccctgcctggaaatggcccccctcagcctggcgccccttcttcttcacccactgtaaaggaggagggtccggagccgtggcccgggggtccggaccctgatgtcccaggcactgatgaggccagctcagcctgcagcacagactgggtcatcccagatcccgaagaggaaccagagcgcaagcgaaagaagggcccagccccgaagatgctgggccacgagctttgccgtgtctgtggggacaaggcctccggcttccactacaacgtgctcagctgcgaaggctgcaagggcttcttccggcgcagtgtggtccgtggtggggccaggcgctatgcctgccggggtggcggaacctgccagatggacgctttcatgcggcgcaagtgccagcagtgccggctgcgcaagtgcaaggaggcagggatgagggagcagtgcgtcctttctgaagaacagatccggaagaagaagattcggaaacaacagcagcaggagtcacagtcacagtcgcagtcacctgtggggccgcagggcagcagcagctcagcctctgggcctggggcttcccctggtggatctgaggcaggcagccagggctccggggaaggcgagggtgtccagctaacagcggctcaagaactaatgatccagcagttggtggcggcccaactgcagtgcaacaaacgctccttctccgaccagcccaaagtcacgccctggcccctgggcgcagacccccagtcccgagatgcccgccagcaacgctttgcccacttcacggagctggccatcatctcagtccaggagatcgtggacttcgctaagcaagtgcctggtttcctgcagctgggccgggaggaccagatcgccctcctgaaggcatccactatcgagatcatgctgctagagacagccaggcgctacaaccacgagacagagtgtatcaccttcttgaaggacttcacctacagcaaggacgacttccaccgtgcaggcctgcaggtggagttcatcaaccccatcttcgagttctcgcgggccatgcggcggctgggcctggacgacgctgagtacgccctgctcatcgccatcaacatcttctcggccgaccggcccaacgtgcaggagccgggccgcgtggaggcgttgcagcagccctacgtggaggcgctgctgtcctacacgcgcatcaagaggccgcaggaccagctgcgcttcccgcgcatgctcatgaagctggtgagcctgcgcacgctgagctctgtgcactcggagcaggtcttcgccttgcggctccaggacaagaagctgccgcctctgctgtcggagatctgggacgtccacgagtgaggggctggccacccagccccacagccttgcctgaccaccctccagcagatagacgccggcaccccttcctcttcctagggtggaaggggccctgggccgagcctgtagacctatcggctctcatcccttgggataagccccagtccaggtccaggaggctccctccctgcccagcgagtcttccagaaggggtgaaagggttgcaggtcccgaccactgacccttcccggctgccctccctccccagcttacacctcaagcccagcacgcagtgcaccttgaacagagggaggggaggacccatggctctcccccctagcccgggagaccaggggccttcctcttcctctgcttttatttaataaaaactaaaaacagaaaca

SEQ ID NO: 301812 - DNA, 2110 bp, Homo sapiens
gctcttccggacgtgacgcaagggcggggttgccggaagaagtggcgaagttacttttgagggtatttgagtagcggcggtgtgtcaggggctaaagaggaggacgaagaaaagcagagcaagggaacccagggcaacaggagtagttcactccgcgagaggccgtccacgagacccccgcgcgcagccatgagccccgccccccgctgttgcttggagaggggcgggacctggagagaggctgctccgtgaccccaccatgtcctctcctaccacgagttccctggatacccccctgcctggaaatggcccccctcagcctggcgccccttcttcttcacccactgtaaaggaggagggtccggagccgtggcccgggggtccggaccctgatgtcccaggcactgatgaggccagctcagcctgcagcacagactgggtcatcccagatcccgaagaggaaccagagcgcaagcgaaagaagggcccagccccgaagatgctgggccacgagctttgccgtgtctgtggggacaaggcctccggcttccactacaacgtgctcagctgcgaaggctgcaagggcttcttccggcgcagtgtggtccgtggtggggccaggcgctatgcctgccggggtggcggaacctgccagatggacgctttcatgcggcgcaagtgccagcagtgccggctgcgcaagtgcaaggaggcagggatgagggagcagtgtgagtgcagcgggagggggcggtgccggcctggccccccgcctagccctggggttctgctgaggcctgcatccccctacaggcgtcctttctgaagaacagatccggaagaagaagattcggaaacaacagcagcaggagtcacagtcacagtcgcagtcacctgtggggccgcagggcagcagcagctcagcctctgggcctggggcttcccctggtggatctgaggcaggcagccagggctccggggaaggcgagggtgtccagctaacagcggctcaagaactaatgatccagcagttggtggcggcccaactgcagtgcaacaaacgctccttctccgaccagcccaaagtcacgccctggcccctgggcgcagacccccagtcccgagatgcccgccagcaacgctttgcccacttcacggagctggccatcatctcagtccaggagatcgtggacttcgctaagcaagtgcctggtttcctgcagctgggccgggaggaccagatcgccctcctgaaggcatccactatcgagatcatgctgctagagacagccaggcgctacaaccacgagacagagtgtatcaccttcttgaaggacttcacctacagcaaggacgacttccaccgtgcaggcctgcaggtggagttcatcaaccccatcttcgagttctcgcgggccatgcggcggctgggcctggacgacgctgagtacgccctgctcatcgccatcaacatcttctcggccgaccggcccaacgtgcaggagccgggccgcgtggaggcgttgcagcagccctacgtggaggcgctgctgtcctacacgcgcatcaagaggccgcaggaccagctgcgcttcccgcgcatgctcatgaagctggtgagcctgcgcacgctgagctctgtgcactcggagcaggtcttcgccttgcggctccaggacaagaagctgccgcctctgctgtcggagatctgggacgtccacgagtgaggggctggccacccagccccacagccttgcctgaccaccctccagcagatagacgccggcaccccttcctcttcctagggtggaaggggccctgggccgagcctgtagacctatcggctctcatcccttgggataagccccagtccaggtccaggaggctccctccctgcccagcgagtcttccagaaggggtgaaagggttgcaggtcccgaccactgacccttcccggctgccctccctccccagcttacacctcaagcccagcacgcagtgcaccttgaacagagggaggggaggacccatggctctcccccctagcccgggagaccaggggccttcctcttcctctgcttttatttaataaaaactaaaaacagaaaca

SEQ ID NO: 301813 - DNA, 1941 bp, Homo sapiens
gagggtttgtaggctggcaggaaccagggttgtggctgagagtagggtctttggagagatggaaaaaaaagggaaagccctgtcaggacctgtaactgacctaacctaacccttcttagccccacaaggctctcaatcccctgtattctacaggctgctccgtgaccccaccatgtcctctcctaccacgagttccctggatacccccctgcctggaaatggcccccctcagcctggcgccccttcttcttcacccactgtaaaggaggagggtccggagccgtggcccgggggtccggaccctgatgtcccaggcactgatgaggccagctcagcctgcagcacagactgggtcatcccagatcccgaagaggaaccagagcgcaagcgaaagaagggcccagccccgaagatgctgggccacgagctttgccgtgtctgtggggacaaggcctccggcttccactacaacgtgctcagctgcgaaggctgcaagggcttcttccggcgcagtgtggtccgtggtggggccaggcgctatgcctgccggggtggcggaacctgccagatggacgctttcatgcggcgcaagtgccagcagtgccggctgcgcaagtgcaaggaggcagggatgagggagcagtgcgtcctttctgaagaacagatccggaagaagaagattcggaaacaacagcagcaggagtcacagtcacagtcgcagtcacctgtggggccgcagggcagcagcagctcagcctctgggcctggggcttcccctggtggatctgaggcaggcagccagggctccggggaaggcgagggtgtccagctaacagcggctcaagaactaatgatccagcagttggtggcggcccaactgcagtgcaacaaacgctccttctccgaccagcccaaagtcacgccctggcccctgggcgcagacccccagtcccgagatgcccgccagcaacgctttgcccacttcacggagctggccatcatctcagtccaggagatcgtggacttcgctaagcaagtgcctggtttcctgcagctgggccgggaggaccagatcgccctcctgaaggcatccactatcgagatcatgctgctagagacagccaggcgctacaaccacgagacagagtgtatcaccttcttgaaggacttcacctacagcaaggacgacttccaccgtgcaggcctgcaggtggagttcatcaaccccatcttcgagttctcgcgggccatgcggcggctgggcctggacgacgctgagtacgccctgctcatcgccatcaacatcttctcggccgaccggcccaacgtgcaggagccgggccgcgtggaggcgttgcagcagccctacgtggaggcgctgctgtcctacacgcgcatcaagaggccgcaggaccagctgcgcttcccgcgcatgctcatgaagctggtgagcctgcgcacgctgagctctgtgcactcggagcaggtcttcgccttgcggctccaggacaagaagctgccgcctctgctgtcggagatctgggacgtccacgagtgaggggctggccacccagccccacagccttgcctgaccaccctccagcagatagacgccggcaccccttcctcttcctagggtggaaggggccctgggccgagcctgtagacctatcggctctcatcccttgggataagccccagtccaggtccaggaggctccctccctgcccagcgagtcttccagaaggggtgaaagggttgcaggtcccgaccactgacccttcccggctgccctccctccccagcttacacctcaagcccagcacgcagtgcaccttgaacagagggaggggaggacccatggctctcccccctagcccgggagaccaggggccttcctcttcctctgcttttatttaataaaaactaaaaacagaaaca

SEQ ID NO: 301814 - DNA, 1901 bp, Homo sapiens
gctcttccggacgtgacgcaagggcggggttgccggaagaagtggcgaagttacttttgagggtatttgagtagcggcggtgtgtcaggggctaaagaggaggacgaagaaaagcagagcaagggaacccagggcaacaggagtagttcactccgcgagaggccgtccacgagacccccgcgcgcagccatgagccccgccccccgctgttgcttggagaggggcgggacctggagagaggctgctccgtgaccccaccatgtcctctcctaccacgagttccctggatacccccctgcctggaaatggcccccctcagcctggcgccccttcttcttcacccactgtaaaggaggagggtccggagccgtggcccgggggtccggaccctgatgtcccaggcactgatgaggccagctcagcctgcagcacagactgggtcatcccagatcccgaagaggaaccagagcgcaagcgaaagaagggcccagccccgaagatgctgggccacgagctttgccgtgtctgtggggacaaggcctccggcttccactacaacgtgctcagctgcgaaggctgcaagggcttcttccggcgcagtgtggcgtcctttctgaagaacagatccggaagaagaagattcggaaacaacagcagcaggagtcacagtcacagtcgcagtcacctgtggggccgcagggcagcagcagctcagcctctgggcctggggcttcccctggtggatctgaggcaggcagccagggctccggggaaggcgagggtgtccagctaacagcggctcaagaactaatgatccagcagttggtggcggcccaactgcagtgcaacaaacgctccttctccgaccagcccaaagtcacgccctggcccctgggcgcagacccccagtcccgagatgcccgccagcaacgctttgcccacttcacggagctggccatcatctcagtccaggagatcgtggacttcgctaagcaagtgcctggtttcctgcagctgggccgggaggaccagatcgccctcctgaaggcatccactatcgagatcatgctgctagagacagccaggcgctacaaccacgagacagagtgtatcaccttcttgaaggacttcacctacagcaaggacgacttccaccgtgcaggcctgcaggtggagttcatcaaccccatcttcgagttctcgcgggccatgcggcggctgggcctggacgacgctgagtacgccctgctcatcgccatcaacatcttctcggccgaccggcccaacgtgcaggagccgggccgcgtggaggcgttgcagcagccctacgtggaggcgctgctgtcctacacgcgcatcaagaggccgcaggaccagctgcgcttcccgcgcatgctcatgaagctggtgagcctgcgcacgctgagctctgtgcactcggagcaggtcttcgccttgcggctccaggacaagaagctgccgcctctgctgtcggagatctgggacgtccacgagtgaggggctggccacccagccccacagccttgcctgaccaccctccagcagatagacgccggcaccccttcctcttcctagggtggaaggggccctgggccgagcctgtagacctatcggctctcatcccttgggataagccccagtccaggtccaggaggctccctccctgcccagcgagtcttccagaaggggtgaaagggttgcaggtcccgaccactgacccttcccggctgccctccctccccagcttacacctcaagcccagcacgcagtgcaccttgaacagagggaggggaggacccatggctctcccccctagcccgggagaccaggggccttcctcttcctctgcttttatttaataaaaactaaaaacagaaaca

SEQ ID NO: 301815 - DNA, 1737 bp, Homo sapiens
gctcttccggacgtgacgcaagggcggggttgccggaagaagtggcgaagttacttttgagggtatttgagtagcggcggtgtgtcaggggctaaagaggaggacgaagaaaagcagagcaagggaacccagggcaacaggagtagttcactccgcgagaggccgtccacgagacccccgcgcgcagccatgagccccgccccccgctgttgcttggagaggggcgggacctggagagaggctgctccgtgaccccaccatgtcctctcctaccacgagttccctggatacccccctgcctggaaatggcccccctcagcctggcgccccttcttcttcacccactgtaaaggaggagggtccggagccgtggcccgggggtccggaccctgatgtcccaggcactgatgaggccagctcagcctgcagcacagactggggcgtcctttctgaagaacagatccggaagaagaagattcggaaacaacagcagcaggagtcacagtcacagtcgcagtcacctgtggggccgcagggcagcagcagctcagcctctgggcctggggcttcccctggtggatctgaggcaggcagccagggctccggggaaggcgagggtgtccagctaacagcggctcaagaactaatgatccagcagttggtggcggcccaactgcagtgcaacaaacgctccttctccgaccagcccaaagtcacgccctggcccctgggcgcagacccccagtcccgagatgcccgccagcaacgctttgcccacttcacggagctggccatcatctcagtccaggagatcgtggacttcgctaagcaagtgcctggtttcctgcagctgggccgggaggaccagatcgccctcctgaaggcatccactatcgagatcatgctgctagagacagccaggcgctacaaccacgagacagagtgtatcaccttcttgaaggacttcacctacagcaaggacgacttccaccgtgcaggcctgcaggtggagttcatcaaccccatcttcgagttctcgcgggccatgcggcggctgggcctggacgacgctgagtacgccctgctcatcgccatcaacatcttctcggccgaccggcccaacgtgcaggagccgggccgcgtggaggcgttgcagcagccctacgtggaggcgctgctgtcctacacgcgcatcaagaggccgcaggaccagctgcgcttcccgcgcatgctcatgaagctggtgagcctgcgcacgctgagctctgtgcactcggagcaggtcttcgccttgcggctccaggacaagaagctgccgcctctgctgtcggagatctgggacgtccacgagtgaggggctggccacccagccccacagccttgcctgaccaccctccagcagatagacgccggcaccccttcctcttcctagggtggaaggggccctgggccgagcctgtagacctatcggctctcatcccttgggataagccccagtccaggtccaggaggctccctccctgcccagcgagtcttccagaaggggtgaaagggttgcaggtcccgaccactgacccttcccggctgccctccctccccagcttacacctcaagcccagcacgcagtgcaccttgaacagagggaggggaggacccatggctctcccccctagcccgggagaccaggggccttcctcttcctctgcttttatttaataaaaactaaaaacagaaaca

SEQ ID NO: 301816 - DNA, 1038 bp, Homo sapiens
  misc_feature (6)..(7): n is a, c, g, or t
  misc_feature (9)..(9): n is a, c, g, or t
cccgcnnanacaattaaggctaggtgcgaggctgggggtgaatcggccgagggatgcccgccagcaacgctttgcccacttcacggagctggccatcatctcagtccaggagatcgtggacttcgctaagcaagtgcctggtttcctgcagctgggccgggaggaccagatcgccctcctgaaggcatccactatcgagatcatgctgctagagacagccaggcgctacaaccacgagacagagtgtatcaccttcttgaaggacttcacctacagcaaggacgacttccaccgtgcaggcctgcaggtggagttcatcaaccccatcttcgagttctcgcgggccatgcggcggctgggcctggacgacgctgagtacgccctgctcatcgccatcaacatcttctcggccgaccggcccaacgtgcaggagccgggccgcgtggaggcgttgcagcagccctacgtggaggcgctgctgtcctacacgcgcatcaagaggccgcaggaccagctgcgcttcccgcgcatgctcatgaagctggtgagcctgcgcacgctgagctctgtgcactcggagcaggtcttcgccttgcggctccaggacaagaagctgccgcctctgctgtcggagatctgggacgtccacgagtgaggggctggccacccagccccacagccttgcctgaccaccctccagcagatagacgccggcaccccttcctcttcctagggtggaaggggccctgggccgagcctgtagacctatcggctctcatcccttgggataagccccagtccaggtccaggaggctccctccctgcccagcgagtcttccagaaggggtgaaagggttgcaggtcccgaccactgacccttcccggctgccctccctccccagcttacacctcaagcccagcacgcagtgcaccttgaacagagggaggggaggacccatggctctcccccctagcccgggagaccaggggccttcctcttcctctgcttttatttaataaaaactaaaaacagaaaca

SEQ ID NO: 301817 - DNA, 1216 bp, Homo sapiens
  misc_feature (163)..(163): n is a, c, g, or t
  misc_feature (230)..(230): n is a, c, g, or t
tctgggactgcctctgttgtgtgcctgctgaataacttctatcccggactcccggtgggaagtcgacttcccacgggagcagaaatggcaagggtggccaagcgtgcactggtttactgatcaaacctcacgtgacaggcccaggaaactctctccaggcctngtggcagcgtgaacacagttcacttggtggagtaggtttactcggaacatgcgtgtaggccagggcnttatgagtgaggccagcacttggaaggtgtcccacactgggtctttctgaagaaaacgtgtataccacccctgctccgcgtgggaagtgcgactttcccacgcgggaggaccacgatcgccctctctgaaggcatccacatatcgagatcatgctgctagagacagccaggcgctacaaccacgagacagagtgtatcaccttcttgaaggacttcacctacagcaaggacgacttccaccgtgcaggcctgcaggtggagttcatcaaccccatcttcgagttctcgcgggccatgcggcggctgggcctggacgacgctgagtacgccctgctcatcgccatcaacatcttctcggccgaccggcccaacgtgcaggagccgggccgcgtggaggcgttgcagcagccctacgtggaggcgctgctgtcctacacgcgcatcaagaggccgcaggaccagctgcgcttcccgcgcatgctcatgaagctggtgagcctgcgcacgctgagctctgtgcactcggagcaggtcttcgccttgcggctccaggacaagaagctgccgcctctgctgtcggagatctgggacgtccacgagtgaggggctggccacccagccccacagccttgcctgaccaccctccagcagatagacgccggcaccccttcctcttcctagggtggaaggggccctgggccgagcctgtagacctatcggctctcatcccttgggataagccccagtccaggtccaggaggctccctccctgcccagcgagtcttccagaaggggtgaaagggttgcaggtcccgaccactgacccttcccggctgccctccctccccagcttacacctcaagcccagcacgcagtgcaccttgaacagagggaggggaggacccatggctctcccccctagcccgggagaccaggggccttcctcttcctctgcttttatttaataaaaactaaaaacagaaaca

SEQ ID NO: 301818 - DNA, 869 bp, Homo sapiens
gacagaaatgacaagaacgctgtaattactgctgtgttcccagccccagagactgtgggcagcgccagggtccaggatgtggggcacggtttcgggctgagggagtcacgggctgcctcccgccccgcaggcctgcaggtggagttcatcaaccccatcttcgagttctcgcgggccatgcggcggctgggcctggacgacgctgagtacgccctgctcatcgccatcaacatcttctcggccgaccggcccaacgtgcaggagccgggccgcgtggaggcgttgcagcagccctacgtggaggcgctgctgtcctacacgcgcatcaagaggccgcaggaccagctgcgcttcccgcgcatgctcatgaagctggtgagcctgcgcacgctgagctctgtgcactcggagcaggtcttcgccttgcggctccaggacaagaagctgccgcctctgctgtcggagatctgggacgtccacgagtgaggggctggccacccagccccacagccttgcctgaccaccctccagcagatagacgccggcaccccttcctcttcctagggtggaaggggccctgggccgagcctgtagacctatcggctctcatcccttgggataagccccagtccaggtccaggaggctccctccctgcccagcgagtcttccagaaggggtgaaagggttgcaggtcccgaccactgacccttcccggctgccctccctccccagcttacacctcaagcccagcacgcagtgcaccttgaacagagggaggggaggacccatggctctcccccctagcccgggagaccaggggccttcctcttcctctgcttttatttaataaaaactaaaaacagaaaca

SEQ ID NO: 301819 - DNA, 1225 bp, Homo sapiens
aagcttacggctaggtacgaggcctgggtggttaaaagcagagcaagggaacccacggcaacaggagtagttcactccgcgagaggccgtccacgagacccccgcgcgcagccatgagccccgccccccgctgttgcttggagaggggcgggacctggagagaggctgctccgtgaccccaccatgtcctctcctaccacgagttccctggatacccccctgcctggaaatggcccccctcagcctggcgccccttcttcttcacccactgtaaaggaggagggtccggagccgtggcccgggggtccggaccctgatgtcccaggcactgatgaggccagctcagcctgcagcacagactgggtcatcccagatcccgaagaggaaccagagcgcaagcgaaagaagggcccagccccgaagatgctgggccacgagctttgccgtgtctgtggggacaaggcctccggcttccactacaacgtgctcagctgcgaaggctgcaagggcttcttccggcgcagtgtggtccgtggtggggccaggcgctatgcctgccggggtggcggaacctgccagatggacgctttcatgcggcgcaagtgccagcagtgccggctgcgcaagtgcaaggaggcagggatgagggagcagtgcgtcctttctgaagaacagatccggaagaagaagattcggaaacaacagcagcaggagtcacagtcacagtcgcagtcacctgtggggccgcagggcagcagcagctcagcctctgggcctggggcttcccctggtggatctgaggcaggcagccagggctccggggaaggcgagggtgtccagctaacagcggctcaagaactaatgatccagcagttggtggcggcccaactgcagtgcaacaaacgctccttctccgaccagcccaaagtcacgctgggccgagcctgtagacctatcggctctcatcccttgggataagccccagtccaggtccaggaggctccctccctgcccagcgagtcttccagaaggggtgaaagggttgcaggtcccgaccactgacccttcccggctgccctccctccccagcttacacctcaagcccagcacgcagtgcaccttgaacagagggaggggaggacccatggctctcccccctagcccgggagaccaggggccttcctcttcctctgcttttatttaataaaaactaaaaacagaaaca

SEQ ID NO: 301820 - DNA, 3056 bp, Homo sapiens
ggctgccgggatcgcgtctcagtccatcaggggggggagggggtggcgcgcgcgccatttctagtcgttttcaaagcgcctcgcgctgattctcacgggcccggctgccggcccccgctctgccctgcataataaaatggctaatcaggtgaatggtaatgcggtacagttaaaagaagaggaagaaccaatggatacttccagtgtaactcacacagaacactacaagacactgatagaggcaggcctcccacagaaggtggcagaaagacttgatgaaatatttcagacaggattggtagcttatgtcgatcttgatgaaagagcaattgatgctctcagggaatttaatgaagaaggagctctgtctgtactacagcagttcaaggaaagtgacttatcacatgttcagaacaaaagtgcatttttatgtggagttatgaagacctacaggcagagagagaaacaggggagcaaggtgcaagagtccacaaagggacctgatgaagcgaagatcaaggccttgcttgagagaactggttatactctggatgtaaccacaggacagaggaagtatggtggtcctccaccagacagtgtgtactctggcgtgcaacctggaattggaacggaggtatttgtaggcaaaataccaagggatttatatgaggatgagttggtgcccctttttgagaaggccggacccatttgggatctacgtcttatgatggatccactgtccggtcagaatagagggtatgcatttatcaccttctgtggaaaggaagctgcacaggaagccgtgaaactgtgtgacagctatgaaattcgccctggtaaacaccttggagtgtgcatttctgtggcaaacaacagactttttgttggatccattccgaagaataagactaaagaaaacattttggaagaattcagtaaagtcacagagggtttggtggacgttattctctatcatcaacccgatgacaaaaagaagaatcgggggttctgcttccttgaatatgaggatcacaagtcagcagcacaagccagacgccggctgatgagtggaaaagtaaaagtgtggggaaatgtagttacagttgaatgggctgaccctgtggaagaaccagatccagaagtcatggctaaggtaaaagttttgtttgtgagaaacttggctactacggtgacagaagaaatattggaaaagtcattttctgaatttggaaaactcgaaagagtaaagaagttgaaagattatgcatttgttcattttgaagacagaggagcagctgttaaggctatggatgaaatgaatggcaaagaaatagaaggggaagaaattgaaatagtcttagccaagccaccagacaagaaaaggaaagagcgccaagctgctagacaggcctccagaagcactgcgtatgaagattattactaccaccctcctcctcgcatgccacctccaattagaggtcggggtcgtggtggggggagaggtggatatggctaccctccagattactacggctatgaagattactatgatgattactatggttatgattatcacgactatcgtggaggctatgaagatccctactacggctatgatgatggctatgcagtaagaggaagaggaggaggaaggggagggcgaggtgctccaccaccaccaagggggaggggagcaccacctccaagaggtagagctggctattcacagaggggggcacctttgggaccaccaagaggctctaggggtggcagagggggtcctgctcaacagcagagaggccgtggttcccgtggatctcggggcaatcgtgggggcaatgtaggaggcaagagaaaggcagatgggtacaaccagcctgattccaagcgtcgtcagaccaacaaccaacagaactggggttcccaacccatcgctcagcagccgcttcagcaaggtggtgactattctggtaactatggttacaataatgacaaccaggaattttatcaggatacttatgggcaacagtggaagtagacaagtaagggcttgaaaatgatactggcaagatacgattggctctagatctacattcttcaaaaaaaaaaattggcttaactgtttcatctttaagtagcattttgctgccatttgtattgggctgaagaaatcactattgtgtatatactcaagtctttttatttttcctcttttcataaatgctcttggacattattgggcttgcagagttcccttattctggggattacaatgcttttatcgtttcaggcttcattttagcttcaaaacaagctgggcacactgttaaatcatgattttgcagaacctttggttttggacagtttcatttttttggatttgggatagattacataggagtatggagtatgctgtaaataaaaatacaagctagtgctttgtcttagtagttttaagaaattaaagcaaacaaatttaagttttcttgtattgaaaataacctatgattgtatgttttgcattcctagaagtaggttaactgtgtttttaaattgttataacttcacacctttttgaaatctgccctacaaaatttgtttggcttaaacgtcaaaagccgtgacaatttgttctttgatgtgattgtatttccaatttcttgttcatgtaagatttcaataaaactaaaaaatctattcaaaacattacctatttcaaattcaattgtgtcctaaaacattattttattcgtaatccttgcaaggaatattgttttcaaagtataactgcctatgtgagtgatcaaattcatgcaaaatttcttgtttattccaacatgtgttgtggatattagactgaggattagtctaaattcaagtatttattccaattagcactttcattgattggtgttctctcatagtctcttctaattttgaaattttatcttttattaaaaaaaaaaaaacaggttcatagacttttgagcattcttgcaggcattggataatttgcattaaaacaaataaaatgtggctgggaaagcagactgcaa

SEQ ID NO: 301821 - DNA, 405 bp, Homo sapiens
  misc_feature (48)..(49): n is a, c, g, or t
gaaaagtcatggaggccatggggttggcttgaaaccagcttggggggnncgatcctccctttttgtctagattttatgtatacgggtcttattacataggagtatggagtatgctgtaaataaaaatacaagctagtgctttgtcttagtagttttaagaaattaaagcaaacaaatttaagttttcttgtattgaaaataacctatgattgtatgttttgcattcctagaagtaggttaactgtgtttttaaattgttataacttcacacctttttgaaatctgccctacaaaatttgtttggcttaaacgtcaaaagccgtgacaatttgttctttgatgtgattgtatttccaatttcttgttcatgtaagatttcaataaaactaaaaaatctattcaaaa

SEQ ID NO: 301822 - DNA, 2890 bp, Homo sapiens
ggctgccgggatcgcgtctcagtccatcaggggggggagggggtggcgcgcgcgccatttctagtcgttttcaaagcgcctcgcgctgattctcacgggcccggctgccggcccccgctctgccctggattggtagcttatgtcgatcttgatgaaagagcaattgatgctctcagggaatttaatgaagaaggagctctgtctgtactacagcagttcaaggaaagtgacttatcacatgttcagaacaaaagtgcatttttatgtggagttatgaagacctacaggcagagagagaaacaggggagcaaggtgcaagagtccacaaagggacctgatgaagcgaagatcaaggccttgcttgagagaactggttatactctggatgtaaccacaggacagaggaagtatggtggtcctccaccagacagtgtgtactctggcgtgcaacctggaattggaacggaggtatttgtaggcaaaataccaagggatttatatgaggatgagttggtgcccctttttgagaaggccggacccatttgggatctacgtcttatgatggatccactgtccggtcagaatagagggtatgcatttatcaccttctgtggaaaggaagctgcacaggaagccgtgaaactgtgtgacagctatgaaattcgccctggtaaacaccttggagtgtgcatttctgtggcaaacaacagactttttgttggatccattccgaagaataagactaaagaaaacattttggaagaattcagtaaagtcacagagggtttggtggacgttattctctatcatcaacccgatgacaaaaagaagaatcgggggttctgcttccttgaatatgaggatcacaagtcagcagcacaagccagacgccggctgatgagtggaaaagtaaaagtgtggggaaatgtagttacagttgaatgggctgaccctgtggaagaaccagatccagaagtcatggctaaggtaaaagttttgtttgtgagaaacttggctactacggtgacagaagaaatattggaaaagtcattttctgaatttggaaaactcgaaagagtaaagaagttgaaagattatgcatttgttcattttgaagacagaggagcagctgttaaggctatggatgaaatgaatggcaaagaaatagaaggggaagaaattgaaatagtcttagccaagccaccagacaagaaaaggaaagagcgccaagctgctagacaggcctccagaagcactgcgtatgaagattattactaccaccctcctcctcgcatgccacctccaattagaggtcggggtcgtggtggggggagaggtggatatggctaccctccagattactacggctatgaagattactatgatgattactatggttatgattatcacgactatcgtggaggctatgaagatccctactacggctatgatgatggctatgcagtaagaggaagaggaggaggaaggggagggcgaggtgctccaccaccaccaagggggaggggagcaccacctccaagaggtagagctggctattcacagaggggggcacctttgggaccaccaagaggctctaggggtggcagagggggtcctgctcaacagcagagaggccgtggttcccgtggatctcggggcaatcgtgggggcaatgtaggaggcaagagaaaggcagatgggtacaaccagcctgattccaagcgtcgtcagaccaacaaccaacagaactggggttcccaacccatcgctcagcagccgcttcagcaaggtggtgactattctggtaactatggttacaataatgacaaccaggaattttatcaggatacttatgggcaacagtggaagtagacaagtaagggcttgaaaatgatactggcaagatacgattggctctagatctacattcttcaaaaaaaaaaattggcttaactgtttcatctttaagtagcattttgctgccatttgtattgggctgaagaaatcactattgtgtatatactcaagtctttttatttttcctcttttcataaatgctcttggacattattgggcttgcagagttcccttattctggggattacaatgcttttatcgtttcaggcttcattttagcttcaaaacaagctgggcacactgttaaatcatgattttgcagaacctttggttttggacagtttcatttttttggatttgggatagattacataggagtatggagtatgctgtaaataaaaatacaagctagtgctttgtcttagtagttttaagaaattaaagcaaacaaatttaagttttcttgtattgaaaataacctatgattgtatgttttgcattcctagaagtaggttaactgtgtttttaaattgttataacttcacacctttttgaaatctgccctacaaaatttgtttggcttaaacgtcaaaagccgtgacaatttgttctttgatgtgattgtatttccaatttcttgttcatgtaagatttcaataaaactaaaaaatctattcaaaacattacctatttcaaattcaattgtgtcctaaaacattattttattcgtaatccttgcaaggaatattgttttcaaagtataactgcctatgtgagtgatcaaattcatgcaaaatttcttgtttattccaacatgtgttgtggatattagactgaggattagtctaaattcaagtatttattccaattagcactttcattgattggtgttctctcatagtctcttctaattttgaaattttatcttttattaaaaaaaaaaaaacaggttcatagacttttgagcattcttgcaggcattggataatttgcattaaaacaaataaaatgtggctgggaaagcagactgcaa

SEQ ID NO: 301823 - DNA, 2538 bp, Homo sapiens
ggctgccgggatcgcgtctcagtccatcaggggggggagggggtggcgcgcgcgccatttctagtcgttttcaaagcgcctcgcgctgattctcacgggcccggctgccggcccccgctctgccctggattggtagcttatgtcgatcttgatgaaagagcaattgatgctctcagggaatttaatgaagaaggagctctgtctgtactacagcagttcaaggaaagtgacttatcacatgttcagaacaaaagtgcatttttatgtggagttatgaagacctacaggcagagagagaaacaggggagcaaggtgcaagagtccacaaagggacctgatgaagcgaagatcaaggccttgcttgagagaactggttatactctggatgtaaccacaggacagaggaagtatggtggtcctccaccagacagtgtgtactctggcgtgcaacctggaattggaacggaggtatttgtaggcaaaataccaagggatttatatgaggatgagttggtgcccctttttgagaaggccggacccatttgggatctacgtcttatgatggatccactgtccggtcagaatagagggtatgcatttatcaccttctgtggaaaggaagctgcacaggaagccgtgaaactgtgtgacagctatgaaattcgccctggtaaacaccttggagtgtgcatttctgtggcaaacaacagactttttgttggatccattccgaagaataagactaaagaaaacattttggaagaattcagtaaagtcacagagggtttggtggacgttattctctatcatcaacccgatgacaaaaagaagaatcgggggttctgcttccttgaatatgaggatcacaagtcagcagcacaagccagacgccggctgatgagtggaaaagtaaaagtgtggggaaatgtagttacagttgaatgggctgaccctgtggaagaaccagatccagaagtcatggctaaggtaaaagttttgtttgtgagaaacttggctactacggtgacagaagaaatattggaaaagtcattttctgaatttggaaaactcgaaagagtaaagaagttgaaagattatgcatttgttcattttgaagacagaggagcagctgttaaggctatggatgaaatgaatggcaaagaaatagaaggggaagaaattgaaatagtcttagccaagccaccagacaagaaaaggaaagagcgccaagctgctagacaggcctccagaagcactgcgtatgaagattattactaccaccctcctcctcgcatgccacctccaattagaggtcggggtcgtggtggggggagaggtggatatggctaccctccagattactacggctatgaagattactatgatgattactatggttatgattatcacgactatcgtggaggctatgaagatccctactacggctatgatgatggctatgcagtaagaggaagaggaggaggaaggggagggcgaggtgctccaccaccaccaagggggaggggagcaccacctccaagaggtagagctggctattcacagaggggggcacctttgggaccaccaagaggctctaggggtggcagagggggtcctgctcaacagcagagaggccgtggttcccgtggatctcggggcaatcgtgggggcaatgtaggaggcaagagaaaggcagatgggtacaaccagcctgattccaagcgtcgtcagaccaacaaccaacagaactggggttcccaacccatcgctcagcagccgcttcagcaaggtggtgactattctggtaactatggttacaataatgacaaccaggaattttatcaggatacttatgggcaacagtggaagtagacaagtaagggcttgaaaatgatactggcaagatacgattggctctagatctacattcttcaaaaaaaaaaattggcttaactgtttcatctttaagtagcattttgctgccatttgtattgggctgaagaaatcactattgtgtatatactcaagtctttttatttttcctcttttcataaatgctcttggacattattgggcttgcagagttcccttattctggggattacaatgcttttatcgtttcaggcttcattttagcttcaaaacaagctgggcacactgttaaatcatgattttgcagaacctttggttttggacagtttcatttttttggatttgggatagattacataggagtatggagtatgctgtaaataaaaatacaagctagtgctttgtcttagtagttttaagaaattaaagcaaacaaatttaagttttcttgtattgaaaataacctatgattgtatgttttgcattcctagaagtaggttaactgtgtttttaaattgttataacttcacacctttttgaaatctgccctacaaaatttgtttggcttaaacgtcaaaagccgtgacaatttgttctttgatgtgattgtatttccaatttcttgttcatgtaagatttcaataaaactaaaaaatctattcaaaa

SEQ ID NO: 301824 - DNA, 2704 bp, Homo sapiens
ggctgccgggatcgcgtctcagtccatcaggggggggagggggtggcgcgcgcgccatttctagtcgttttcaaagcgcctcgcgctgattctcacgggcccggctgccggcccccgctctgccctgcataataaaatggctaatcaggtgaatggtaatgcggtacagttaaaagaagaggaagaaccaatggatacttccagtgtaactcacacagaacactacaagacactgatagaggcaggcctcccacagaaggtggcagaaagacttgatgaaatatttcagacaggattggtagcttatgtcgatcttgatgaaagagcaattgatgctctcagggaatttaatgaagaaggagctctgtctgtactacagcagttcaaggaaagtgacttatcacatgttcagaacaaaagtgcatttttatgtggagttatgaagacctacaggcagagagagaaacaggggagcaaggtgcaagagtccacaaagggacctgatgaagcgaagatcaaggccttgcttgagagaactggttatactctggatgtaaccacaggacagaggaagtatggtggtcctccaccagacagtgtgtactctggcgtgcaacctggaattggaacggaggtatttgtaggcaaaataccaagggatttatatgaggatgagttggtgcccctttttgagaaggccggacccatttgggatctacgtcttatgatggatccactgtccggtcagaatagagggtatgcatttatcaccttctgtggaaaggaagctgcacaggaagccgtgaaactgtgtgacagctatgaaattcgccctggtaaacaccttggagtgtgcatttctgtggcaaacaacagactttttgttggatccattccgaagaataagactaaagaaaacattttggaagaattcagtaaagtcacagagggtttggtggacgttattctctatcatcaacccgatgacaaaaagaagaatcgggggttctgcttccttgaatatgaggatcacaagtcagcagcacaagccagacgccggctgatgagtggaaaagtaaaagtgtggggaaatgtagttacagttgaatgggctgaccctgtggaagaaccagatccagaagtcatggctaaggtaaaagttttgtttgtgagaaacttggctactacggtgacagaagaaatattggaaaagtcattttctgaatttggaaaactcgaaagagtaaagaagttgaaagattatgcatttgttcattttgaagacagaggagcagctgttaaggctatggatgaaatgaatggcaaagaaatagaaggggaagaaattgaaatagtcttagccaagccaccagacaagaaaaggaaagagcgccaagctgctagacaggcctccagaagcactgcgtatgaagattattactaccaccctcctcctcgcatgccacctccaattagaggtcggggtcgtggtggggggagaggtggatatggctaccctccagattactacggctatgaagattactatgatgattactatggttatgattatcacgactatcgtggaggctatgaagatccctactacggctatgatgatggctatgcagtaagaggaagaggaggaggaaggggagggcgaggtgctccaccaccaccaagggggaggggagcaccacctccaagaggtagagctggctattcacagaggggggcacctttgggaccaccaagaggctctaggggtggcagagggggtcctgctcaacagcagagaggccgtggttcccgtggatctcggggcaatcgtgggggcaatgtaggaggcaagagaaaggcagatgggtacaaccagcctgattccaagcgtcgtcagaccaacaaccaacagaactggggttcccaacccatcgctcagcagccgcttcagcaaggtggtgactattctggtaactatggttacaataatgacaaccaggaattttatcaggatacttatgggcaacagtggaagtagacaagtaagggcttgaaaatgatactggcaagatacgattggctctagatctacattcttcaaaaaaaaaaattggcttaactgtttcatctttaagtagcattttgctgccatttgtattgggctgaagaaatcactattgtgtatatactcaagtctttttatttttcctcttttcataaatgctcttggacattattgggcttgcagagttcccttattctggggattacaatgcttttatcgtttcaggcttcattttagcttcaaaacaagctgggcacactgttaaatcatgattttgcagaacctttggttttggacagtttcatttttttggatttgggatagattacataggagtatggagtatgctgtaaataaaaatacaagctagtgctttgtcttagtagttttaagaaattaaagcaaacaaatttaagttttcttgtattgaaaataacctatgattgtatgttttgcattcctagaagtaggttaactgtgtttttaaattgttataacttcacacctttttgaaatctgccctacaaaatttgtttggcttaaacgtcaaaagccgtgacaatttgttctttgatgtgattgtatttccaatttcttgttcatgtaagatttcaataaaactaaaaaatctattcaaaa

SEQ ID NO: 301825 - DNA, 2859 bp, Homo sapiens
cgtctgaccgcctagccgaattttcccttacgatcgttttcaaagcgcctcgcgctgattctcacgggcccggctgccggcccccgctctgccctggattggtagcttatgtcgatcttgatgaaagagcaattgatgctctcagggaatttaatgaagaaggagctctgtctgtactacagcagttcaaggaaagtgacttatcacatgttcagaacaaaagtgcatttttatgtggagttatgaagacctacaggcagagagagaaacaggggagcaaggtgcaagagtccacaaagggacctgatgaagcgaagatcaaggccttgcttgagagaactggttatactctggatgtaaccacaggacagaggaagtatggtggtcctccaccagacagtgtgtactctggcgtgcaacctggaattggaacggaggtatttgtaggcaaaataccaagggatttatatgaggatgagttggtgcccctttttgagaaggccggacccatttgggatctacgtcttatgatggatccactgtccggtcagaatagagggtatgcatttatcaccttctgtggaaaggaagctgcacaggaagccgtgaaactgtgtgacagctatgaaattcgccctggtaaacaccttggagtgtgcatttctgtggcaaacaacagactttttgttggatccattccgaagaataagactaaagaaaacattttggaagaattcagtaaagtcacagagggtttggtggacgttattctctatcatcaacccgatgacaaaaagaagaatcgggggttctgcttccttgaatatgaggatcacaagtcagcagcacaagccagacgccggctgatgagtggaaaagtaaaagtgtggggaaatgtagttacagttgaatgggctgaccctgtggaagaaccagatccagaagtcatggctaaggtaaaagttttgtttgtgagaaacttggctactacggtgacagaagaaatattggaaaagtcattttctgaatttggaaaactcgaaagagtaaagaagttgaaagattatgcatttgttcattttgaagacagaggagcagctgttaaggctatggatgaaatgaatggcaaagaaatagaaggggaagaaattgaaatagtcttagccaagccaccagacaagaaaaggaaagagcgccaagctgctagacaggcctccagaagcactgcgtatgaagattattactaccaccctcctcctcgcatgccacctccaattagaggtcggggtcgtggtggggggagaggtggatatggctaccctccagattactacggctatgaagattactatgatgattactatggttatgattatcacgactatcgtggaggctatgaagatccctactacggctatgatgatggctatgcagtaagaggaagaggaggaggaaggggagggcgaggtgctccaccaccaccaagggggaggggagcaccacctccaagaggtagagctggctattcacagaggggggcacctttgggaccaccaagaggctctaggggtggcagagggggtcctgctcaacagcagagaggccgtggttcccgtggatctcggggcaatcgtgggggcaatgtaggaggcaagagaaaggcagatgggtacaaccagcctgattccaagcgtcgtcagaccaacaaccaacagaactggggttcccaacccatcgctcagcagccgcttcagcaaggtggtgactattctggtaactatggttacaataatgacaaccaggaattttatcaggatacttatgggcaacagtggaagtagacaagtaagggcttgaaaatgatactggcaagatacgattggctctagatctacattcttcaaaaaaaaaaattggcttaactgtttcatctttaagtagcattttgctgccatttgtattgggctgaagaaatcactattgtgtatatactcaagtctttttatttttcctcttttcataaatgctcttggacattattgggcttgcagagttcccttattctggggattacaatgcttttatcgtttcaggcttcattttagcttcaaaacaagctgggcacactgttaaatcatgattttgcagaacctttggttttggacagtttcatttttttggatttgggatagattacataggagtatggagtatgctgtaaataaaaatacaagctagtgctttgtcttagtagttttaagaaattaaagcaaacaaatttaagttttcttgtattgaaaataacctatgattgtatgttttgcattcctagaagtaggttaactgtgtttttaaattgttataacttcacacctttttgaaatctgccctacaaaatttgtttggcttaaacgtcaaaagccgtgacaatttgttctttgatgtgattgtatttccaatttcttgttcatgtaagatttcaataaaactaaaaaatctattcaaaacattacctatttcaaattcaattgtgtcctaaaacattattttattcgtaatccttgcaaggaatattgttttcaaagtataactgcctatgtgagtgatcaaattcatgcaaaatttcttgtttattccaacatgtgttgtggatattagactgaggattagtctaaattcaagtatttattccaattagcactttcattgattggtgttctctcatagtctcttctaattttgaaattttatcttttattaaaaaaaaaaaaacaggttcatagacttttgagcattcttgcaggcattggataatttgcattaaaacaaataaaatgtggctgggaaagcagactgcaa

SEQ ID NO: 301826 - DNA, 2671 bp, Homo sapiens
tacgtctaggtacgaggctgggtggagctagtcgttttcaaagcgcctcgcgctgattctcacgggcccggctgccggcccccgctctgccctgcataataaaatggctaatcaggtgaatggtaatgcggtacagttaaaagaagaggaagaaccaatggatacttccagtgtaactcacacagaacactacaagacactgatagaggcaggcctcccacagaaggtggcagaaagacttgatgaaatatttcagacaggattggtagcttatgtcgatcttgatgaaagagcaattgatgctctcagggaatttaatgaagaaggagctctgtctgtactacagcagttcaaggaaagtgacttatcacatgttcagaacaaaagtgcatttttatgtggagttatgaagacctacaggcagagagagaaacaggggagcaaggtgcaagagtccacaaagggacctgatgaagcgaagatcaaggccttgcttgagagaactggttatactctggatgtaaccacaggacagaggaagtatggtggtcctccaccagacagtgtgtactctggcgtgcaacctggaattggaacggaggtatttgtaggcaaaataccaagggatttatatgaggatgagttggtgcccctttttgagaaggccggacccatttgggatctacgtcttatgatggatccactgtccggtcagaatagagggtatgcatttatcaccttctgtggaaaggaagctgcacaggaagccgtgaaactgtgtgacagctatgaaattcgccctggtaaacaccttggagtgtgcatttctgtggcaaacaacagactttttgttggatccattccgaagaataagactaaagaaaacattttggaagaattcagtaaagtcacagagggtttggtggacgttattctctatcatcaacccgatgacaaaaagaagaatcgggggttctgcttccttgaatatgaggatcacaagtcagcagcacaagccagacgccggctgatgagtggaaaagtaaaagtgtggggaaatgtagttacagttgaatgggctgaccctgtggaagaaccagatccagaagtcatggctaaggtaaaagttttgtttgtgagaaacttggctactacggtgacagaagaaatattggaaaagtcattttctgaatttggaaaactcgaaagagtaaagaagttgaaagattatgcatttgttcattttgaagacagaggagcagctgttaaggctatggatgaaatgaatggcaaagaaatagaaggggaagaaattgaaatagtcttagccaagccaccagacaagaaaaggaaagagcgccaagctgctagacaggcctccagaagcactgcgtatgaagattattactaccaccctcctcctcgcatgccacctccaattagaggtcggggtcgtggtggggggagaggtggatatggctaccctccagattactacggctatgaagattactatgatgattactatggttatgattatcacgactatcgtggaggctatgaagatccctactacggctatgatgatggctatgcagtaagaggaagaggaggaggaaggggagggcgaggtgctccaccaccaccaagggggaggggagcaccacctccaagaggtagagctggctattcacagaggggggcacctttgggaccaccaagaggctctaggggtggcagagggggtcctgctcaacagcagagaggccgtggttcccgtggatctcggggcaatcgtgggggcaatgtaggaggcaagagaaaggcagatgggtacaaccagcctgattccaagcgtcgtcagaccaacaaccaacagaactggggttcccaacccatcgctcagcagccgcttcagcaaggtggtgactattctggtaactatggttacaataatgacaaccaggaattttatcaggatacttatgggcaacagtggaagtagacaagtaagggcttgaaaatgatactggcaagatacgattggctctagatctacattcttcaaaaaaaaaaattggcttaactgtttcatctttaagtagcattttgctgccatttgtattgggctgaagaaatcactattgtgtatatactcaagtctttttatttttcctcttttcataaatgctcttggacattattgggcttgcagagttcccttattctggggattacaatgcttttatcgtttcaggcttcattttagcttcaaaacaagctgggcacactgttaaatcatgattttgcagaacctttggttttggacagtttcatttttttggatttgggatagattacataggagtatggagtatgctgtaaataaaaatacaagctagtgctttgtcttagtagttttaagaaattaaagcaaacaaatttaagttttcttgtattgaaaataacctatgattgtatgttttgcattcctagaagtaggttaactgtgtttttaaattgttataacttcacacctttttgaaatctgccctacaaaatttgtttggcttaaacgtcaaaagccgtgacaatttgttctttgatgtgattgtatttccaatttcttgttcatgtaagatttcaataaaactaaaaaatctattcaaaa

SEQ ID NO: 301827 - DNA, 2566 bp, Homo sapiens
  misc_feature (2552)..(2552): n is a, c, g, or t
ggctgccgggatcgcgtctcagtccatcaggggggggagggggtggcgcgcgcgccatttctagtcgttttcaaagcgcctcgcgctgattctcacgggcccggctgccggcccccgctctgccctggattggtagcttatgtcgatcttgatgaaagagcaattgatgctctcagggaatttaatgaagaaggagctctgtctgtactacagcagttcaaggaaagtgacttatcacatgttcagaacaaaagtgcatttttatgtggagttatgaagacctacaggcagagagagaaacaggggagcaaggtgcaagagtccacaaagggacctgatgaagcgaagatcaaggccttgcttgagagaactggttatactctggatgtaaccacaggacagaggaagtatggtggtcctccaccagacagtgtgtactctggcgtgcaacctggaattggaacggaggtatttgtaggcaaaataccaagggatttatatgaggatgagttggtgcccctttttgagaaggccggacccatttgggatctacgtcttatgatggatccactgtccggtcagaatagagggtatgcatttatcaccttctgtggaaaggaagctgcacaggaagccgtgaaactgtgtgacagctatgaaattcgccctggtaaacaccttggagtgtgcatttctgtggcaaacaacagactttttgttggatccattccgaagaataagactaaagaaaacattttggaagaattcagtaaagtcacagagggtttggtggacgttattctctatcatcaacccgatgacaaaaagaagaatcgggggttctgcttccttgaatatgaggatcacaagtcagcagcacaagccagacgccggctgatgagtggaaaagtaaaagtgtggggaaatgtagttacagttgaatgggctgaccctgtggaagaaccagatccagaagtcatggctaaggtaaaagttttgtttgtgagaaacttggctactacggtgacagaagaaatattggaaaagtcattttctgaatttggaaaactcgaaagagtaaagaagttgaaagattatgcatttgttcattttgaagacagaggagcagctgttaaggctatggatgaaatgaatggcaaagaaatagaaggggaagaaattgaaatagtcttagccaagccaccagacaagaaaaggaaagagcgccaagctgctagacaggcctccagaagcactgcgtatgaagattattactaccaccctcctcctcgcatgccacctccaattagaggtcggggtcgtggtggggggagaggtggatatggctaccctccagattactacggctatgaagattactatgatgattactatggttatgattatcacgactatcgtggaggctatgaagatccctactacggctatgatgatggctatgcagtaagaggaagaggaggaggaaggggagggcgaggtgctccaccaccaccaagggggaggggagcaccacctccaagaggtagagctggctattcacagaggggggcacctttgggaccaccaagaggctctaggggtggcagagggggtcctgctcaacagcagagaggccgtggttcccgtggatctcggggcaatcgtgggggcaatgtaggaggcaagagaaaggcagatgggtacaaccagcctgattccaagcgtcgtcagaccaacaaccaacagaactggggttcccaacccatcgctcagcagccgcttcagcaaggtggtgactattctggtaactatggttacaataatgacaaccaggaattttatcaggatacttatgggcaacagtggaagtagacaagtaagggcttgaaaatgatactggcaagatacgattggctctagatctacattcttcaaaaaaaaaaattggcttaactgtttcatctttaagtagcattttgctgccatttgtattgggctgaagaaatcactattgtgtatatactcaagtctttttatttttcctcttttcataaatgctcttggacattattgggcttgcagagttcccttattctggggattacaatgcttttatcgtttcaggcttcattttagcttcaaaacaagctgggcacactgttaaatcatgattttgcagaacctttggttttggacagtttcatttttttggatttgggatagattacataggagtatggagtatgctgtaaataaaaatacaagctagtgctttgtcttagtagttttaagaaattaaagcaaacaaatttaagttttcttgtattgaaaataacctatgattgtatgttttgcattcctagaagtaggttaactgtgtttttaaattgttataacttcacacctttttgaaatctgccctacaaaatttgtttggcttaaacgtcaaaagccgtgacaatttgttctttgatgtgattgtatttccaatttcttgttcatgtaagatttcaataaaactaaaaaatctattcaaaaaaaaaaaaacaaanaaaaaaaaaaaaac

SEQ ID NO: 301828 - DNA, 2662 bp, Homo sapiens
ggctgccgggatcgcgtctcagtccatcaggggggggagggggtggcgcgcgcgccatttctagtcgttttcaaagcgcctcgcgctgattctcacgggcccggctgccggcccccgctctgccctggattggtagcttatgtcgatcttgatgaaagagcaattgatgctctcagggaatttaatgaagaaggagctctgtctgtactacagcagttcaaggaaagtgacttatcacatgttcagaacaaaagtgcatttttatgtggagttatgaagacctacaggcagagagagaaacaggggagcaaggtgcaagagtccacaaagggacctgatgaagcgaagatcaaggccttgcttgagagaactggttatactctggatgtaaccacaggacagaggaagtatggtggtcctccaccagacagtgtgtactctggcgtgcaacctggaattggaacggaggtatttgtaggcaaaataccaagggatttatatgaggatgagttggtgcccctttttgagaaggccggacccatttgggatctacgtcttatgatggatccactgtccggtcagaatagagggtatgcatttatcaccttctgtggaaaggaagctgcacaggaagccgtgaaactgtgtgacagctatgaaattcgccctggtaaacaccttggagtgtgcatttctgtggcaaacaacagactttttgttggatccattccgaagaataagactaaagaaaacattttggaagaattcagtaaagtcacagagggtttggtggacgttattctctatcatcaacccgatgacaaaaagaagaatcgggggttctgcttccttgaatatgaggatcacaagtcagcagcacaagccagacgccggctgatgagtggaaaagtaaaagtgtggggaaatgtagttacagttgaatgggctgaccctgtggaagaaccagatccagaagtcatggctaaggtaaaagttttgtttgtgagaaacttggctactacggtgacagaagaaatattggaaaagtcattttctgaatttggaaaactcgaaagagtaaagaagttgaaagattatgcatttgttcattttgaagacagaggagcagctgttaaggctatggatgaaatgaatggcaaagaaatagaaggggaagaaattgaaatagtcttagccaagccaccagacaagaaaaggaaagagcgccaagctgctagacaggcctccagaagcactgcgtatgaagattattactaccaccctcctcctcgcatgccacctccaattagaggtcggggtcgtggtggggggagaggtggatatggctaccctccagattactacggctatgaagattactatgatgattactatggttatgattatcacgactatcgtggatctcggggcaatcgtgggggcaatgtaggaggcaagagaaaggcagatgggtacaaccagcctgattccaagcgtcgtcagaccaacaaccaacagaactggggttcccaacccatcgctcagcagccgcttcagcaaggtggtgactattctggtaactatggttacaataatgacaaccaggaattttatcaggatacttatgggcaacagtggaagtagacaagtaagggcttgaaaatgatactggcaagatacgattggctctagatctacattcttcaaaaaaaaaaattggcttaactgtttcatctttaagtagcattttgctgccatttgtattgggctgaagaaatcactattgtgtatatactcaagtctttttatttttcctcttttcataaatgctcttggacattattgggcttgcagagttcccttattctggggattacaatgcttttatcgtttcaggcttcattttagcttcaaaacaagctgggcacactgttaaatcatgattttgcagaacctttggttttggacagtttcatttttttggatttgggatagattacataggagtatggagtatgctgtaaataaaaatacaagctagtgctttgtcttagtagttttaagaaattaaagcaaacaaatttaagttttcttgtattgaaaataacctatgattgtatgttttgcattcctagaagtaggttaactgtgtttttaaattgttataacttcacacctttttgaaatctgccctacaaaatttgtttggcttaaacgtcaaaagccgtgacaatttgttctttgatgtgattgtatttccaatttcttgttcatgtaagatttcaataaaactaaaaaatctattcaaaacattacctatttcaaattcaattgtgtcctaaaacattattttattcgtaatccttgcaaggaatattgttttcaaagtataactgcctatgtgagtgatcaaattcatgcaaaatttcttgtttattccaacatgtgttgtggatattagactgaggattagtctaaattcaagtatttattccaattagcactttcattgattggtgttctctcatagtctcttctaattttgaaattttatcttttattaaaaaaaaaaaaacaggttcatagacttttgagcattcttgcaggcattggataatttgcattaaaacaaataaaatgtggctgggaaagcagactgcaa

SEQ ID NO: 301829 - DNA, 2154 bp, Homo sapiens
  misc_feature (2140)..(2140): n is a, c, g, or t
ggctgccgggatcgcgtctcagtccatcaggggggggagggggtggcgcgcgcgccatttctagtcgttttcaaagcgcctcgcgctgattctcacgggcccggctgccggcccccgctctgccctggattggtagcttatgtcgatcttgatgaaagagcaattgatgctctcagggaatttaatgaagaaggagctctgtctgtactacagcagttcaaggaaagtgacttatcacatgttcagaacaaaagtgcatttttatgtggagttatgaagacctacaggcagagagagaaacaggggagcaaggtgcaagagtccacaaagggacctgatgaagcgaagatcaaggccttgcttgagagaactggttatactctggatgtaaccacaggacagaggaagtatggtggtcctccaccagacagtgtgtactctggcgtgcaacctggaattggaacggaggtatttgtaggcaaaataccaagggatttatatgaggatgagttggtgcccctttttgagaaggccggacccatttgggatctacgtcttatgatggatccactgtccggtcagaatagagggtatgcatttatcaccttctgtggaaaggaagctgcacaggaagccgtgaaactgtgtgacagctatgaaattcgccctggtaaacaccttggagtgtgcatttctgtggcaaacaacagactttttgttggatccattccgaagaataagactaaagaaaacattttggaagaattcagtaaagtcacagagggtttggtggacgttattctctatcatcaacccgatgacaaaaagaagaatcgggggttctgcttccttgaatatgaggatcacaagtcagcagcacaagccagacgccggctgatgagtggaaaagtaaaagtgtggggaaatgtagttacagttgaatgggctgaccctgtggaagaaccagatccagaagtcatggctaaggtaaaagttttgtttgtgagaaacttggctactacggtgacagaagaaatattggaaaagtcattttctgaatttggaaaactcgaaagagtaaagaagttgaaagattatgcatttgttcattttgaagacagaggagcagctgttaaggctatggatgaaatgaatggcaaagaaatagaaggggaagaaattgaaatagtcttagccaagccaccagacaagaaaaggaaagagcgccaagctgctagacaggcctccagaagcactgcgtatgaagattattactaccaccctcctcctcgcatgccacctccaattagaggtcggggtcgtggtggggggagaggtggatatggctaccctccagattactacggctatgaagattactatgatgattactatggttatgattatcacgactatcgtggaggctatgaagatccctactacggctatgatgatggctatgcagtaagaggaagaggaggaggaaggggagggcgaggtgctccaccaccaccaagggggaggggagcaccacctccaagaggtagagctggctattcacagaggggggcacctttgggaccaccaagaggctctaggggtggcagagggggtcctgctcaacagcagagaggccgtggttcccgtggatctcggggcaatcgtgggggcaatgtaggaggcaagagaaaggcagatgggtacaaccagcctgattccaagcgtcgtcagaccaacaaccaacagaactggggttcccaacccatcgctcagcagccgcttcagcaaggtggtgactattctggtaactatggttacaataatgacaaccaggaattttatcaggatacttatgggcaacagtggaagtagacaagtaagggcttgaaaatgatactggcaagatacgattggctctagatctacattcttcaaaaaaaaaaattggcttaactgtttcatctttaagtagcattttgctgccatttgtattgggctgaagaaatcactattgtgtatatactcaagtctttttatttttcctcttttcataaatgctcttggacattattgggcttgcagagttcccttattctggggattacaatgcttttatcgtttcaggcaaaaaaaaacaaanaaaaaaaaaaaaac

SEQ ID NO: 301830 - DNA, 2942 bp, Homo sapiens
ggctgccgggatcgcgtctcagtccatcaggggggggagggggtggcgcgcgcgccatttctagtcgttttcaaagcgcctcgcgctgattctcacgggcccggctgccggcccccgctctgccctgcataataaaatggctaatcaggtgaatggtaatgcggtacagttaaaagaagaggaagaaccaatggatacttccagtgtaactcacacagaacactacaagacactgatagaggcaggcctcccacagaaggtggcagaaagacttgatgaaatatttcagacaggattggtagcttatgtcgatcttgatgaaagagcaattgatgctctcagggaatttaatgaagaaggagctctgtctgtactacagcagttcaaggaaagtgacttatcacatgttcagaacaaaagtgcatttttatgtggagttatgaagacctacaggcagagagagaaacaggggagcaaggtgcaagagtccacaaagggacctgatgaagcgaagatcaaggtatttgtaggcaaaataccaagggatttatatgaggatgagttggtgcccctttttgagaaggccggacccatttgggatctacgtcttatgatggatccactgtccggtcagaatagagggtatgcatttatcaccttctgtggaaaggaagctgcacaggaagccgtgaaactgtgtgacagctatgaaattcgccctggtaaacaccttggagtgtgcatttctgtggcaaacaacagactttttgttggatccattccgaagaataagactaaagaaaacattttggaagaattcagtaaagtcacagagggtttggtggacgttattctctatcatcaacccgatgacaaaaagaagaatcgggggttctgcttccttgaatatgaggatcacaagtcagcagcacaagccagacgccggctgatgagtggaaaagtaaaagtgtggggaaatgtagttacagttgaatgggctgaccctgtggaagaaccagatccagaagtcatggctaaggtaaaagttttgtttgtgagaaacttggctactacggtgacagaagaaatattggaaaagtcattttctgaatttggaaaactcgaaagagtaaagaagttgaaagattatgcatttgttcattttgaagacagaggagcagctgttaaggctatggatgaaatgaatggcaaagaaatagaaggggaagaaattgaaatagtcttagccaagccaccagacaagaaaaggaaagagcgccaagctgctagacaggcctccagaagcactgcgtatgaagattattactaccaccctcctcctcgcatgccacctccaattagaggtcggggtcgtggtggggggagaggtggatatggctaccctccagattactacggctatgaagattactatgatgattactatggttatgattatcacgactatcgtggaggctatgaagatccctactacggctatgatgatggctatgcagtaagaggaagaggaggaggaaggggagggcgaggtgctccaccaccaccaagggggaggggagcaccacctccaagaggtagagctggctattcacagaggggggcacctttgggaccaccaagaggctctaggggtggcagagggggtcctgctcaacagcagagaggccgtggttcccgtggatctcggggcaatcgtgggggcaatgtaggaggcaagagaaaggcagatgggtacaaccagcctgattccaagcgtcgtcagaccaacaaccaacagaactggggttcccaacccatcgctcagcagccgcttcagcaaggtggtgactattctggtaactatggttacaataatgacaaccaggaattttatcaggatacttatgggcaacagtggaagtagacaagtaagggcttgaaaatgatactggcaagatacgattggctctagatctacattcttcaaaaaaaaaaattggcttaactgtttcatctttaagtagcattttgctgccatttgtattgggctgaagaaatcactattgtgtatatactcaagtctttttatttttcctcttttcataaatgctcttggacattattgggcttgcagagttcccttattctggggattacaatgcttttatcgtttcaggcttcattttagcttcaaaacaagctgggcacactgttaaatcatgattttgcagaacctttggttttggacagtttcatttttttggatttgggatagattacataggagtatggagtatgctgtaaataaaaatacaagctagtgctttgtcttagtagttttaagaaattaaagcaaacaaatttaagttttcttgtattgaaaataacctatgattgtatgttttgcattcctagaagtaggttaactgtgtttttaaattgttataacttcacacctttttgaaatctgccctacaaaatttgtttggcttaaacgtcaaaagccgtgacaatttgttctttgatgtgattgtatttccaatttcttgttcatgtaagatttcaataaaactaaaaaatctattcaaaacattacctatttcaaattcaattgtgtcctaaaacattattttattcgtaatccttgcaaggaatattgttttcaaagtataactgcctatgtgagtgatcaaattcatgcaaaatttcttgtttattccaacatgtgttgtggatattagactgaggattagtctaaattcaagtatttattccaattagcactttcattgattggtgttctctcatagtctcttctaattttgaaattttatcttttattaaaaaaaaaaaaacaggttcatagacttttgagcattcttgcaggcattggataatttgcattaaaacaaataaaatgtggctgggaaagcagactgcaa

SEQ ID NO: 301831 - DNA, 2717 bp, Homo sapiens
gacatctggcaaagacagtctagatacagtcacatatcaacaagtggaagactgtgttttcccagggtagaagaacaaaagtgcatttttatgtggagttatgaagacctacaggcagagagagaaacaggggagcaaggtgcaagagtccacaaagggacctgatgaagcgaagatcaaggccttgcttgagagaactggttatactctggatgtaaccacaggacagaggaagtatggtggtcctccaccagacagtgtgtactctggcgtgcaacctggaattggaacggaggtatttgtaggcaaaataccaagggatttatatgaggatgagttggtgcccctttttgagaaggccggacccatttgggatctacgtcttatgatggatccactgtccggtcagaatagagggtatgcatttatcaccttctgtggaaaggaagctgcacaggaagccgtgaaactgtgtgacagctatgaaattcgccctggtaaacaccttggagtgtgcatttctgtggcaaacaacagactttttgttggatccattccgaagaataagactaaagaaaacattttggaagaattcagtaaagtcacagagggtttggtggacgttattctctatcatcaacccgatgacaaaaagaagaatcgggggttctgcttccttgaatatgaggatcacaagtcagcagcacaagccagacgccggctgatgagtggaaaagtaaaagtgtggggaaatgtagttacagttgaatgggctgaccctgtggaagaaccagatccagaagtcatggctaaggtaaaagttttgtttgtgagaaacttggctactacggtgacagaagaaatattggaaaagtcattttctgaatttggaaaactcgaaagagtaaagaagttgaaagattatgcatttgttcattttgaagacagaggagcagctgttaaggctatggatgaaatgaatggcaaagaaatagaaggggaagaaattgaaatagtcttagccaagccaccagacaagaaaaggaaagagcgccaagctgctagacaggcctccagaagcactgcgtatgaagattattactaccaccctcctcctcgcatgccacctccaattagaggtcggggtcgtggtggggggagaggtggatatggctaccctccagattactacggctatgaagattactatgatgattactatggttatgattatcacgactatcgtggaggctatgaagatccctactacggctatgatgatggctatgcagtaagaggaagaggaggaggaaggggagggcgaggtgctccaccaccaccaagggggaggggagcaccacctccaagaggtagagctggctattcacagaggggggcacctttgggaccaccaagaggctctaggggtggcagagggggtcctgctcaacagcagagaggccgtggttcccgtggatctcggggcaatcgtgggggcaatgtaggaggcaagagaaaggcagatgggtacaaccagcctgattccaagcgtcgtcagaccaacaaccaacagaactggggttcccaacccatcgctcagcagccgcttcagcaaggtggtgactattctggtaactatggttacaataatgacaaccaggaattttatcaggatacttatgggcaacagtggaagtagacaagtaagggcttgaaaatgatactggcaagatacgattggctctagatctacattcttcaaaaaaaaaaattggcttaactgtttcatctttaagtagcattttgctgccatttgtattgggctgaagaaatcactattgtgtatatactcaagtctttttatttttcctcttttcataaatgctcttggacattattgggcttgcagagttcccttattctggggattacaatgcttttatcgtttcaggcttcattttagcttcaaaacaagctgggcacactgttaaatcatgattttgcagaacctttggttttggacagtttcatttttttggatttgggatagattacataggagtatggagtatgctgtaaataaaaatacaagctagtgctttgtcttagtagttttaagaaattaaagcaaacaaatttaagttttcttgtattgaaaataacctatgattgtatgttttgcattcctagaagtaggttaactgtgtttttaaattgttataacttcacacctttttgaaatctgccctacaaaatttgtttggcttaaacgtcaaaagccgtgacaatttgttctttgatgtgattgtatttccaatttcttgttcatgtaagatttcaataaaactaaaaaatctattcaaaacattacctatttcaaattcaattgtgtcctaaaacattattttattcgtaatccttgcaaggaatattgttttcaaagtataactgcctatgtgagtgatcaaattcatgcaaaatttcttgtttattccaacatgtgttgtggatattagactgaggattagtctaaattcaagtatttattccaattagcactttcattgattggtgttctctcatagtctcttctaattttgaaattttatcttttattaaaaaaaaaaaaacaggttcatagacttttgagcattcttgcaggcattggataatttgcattaaaacaaataaaatgtggctgggaaagcagactgcaa

SEQ ID NO: 301832 - DNA, 2776 bp, Homo sapiens
ggctgccgggatcgcgtctcagtccatcaggggggggagggggtggcgcgcgcgccatttctagtcgttttcaaagcgcctcgcgctgattctcacgggcccggctgccggcccccgctctgccctggattggtagcttatgtcgatcttgatgaaagagcaattgatgctctcagggaatttaatgaagaaggagctctgtctgtactacagcagttcaaggaaagtgacttatcacatgttcagaacaaaagtgcatttttatgtggagttatgaagacctacaggcagagagagaaacaggggagcaaggtgcaagagtccacaaagggacctgatgaagcgaagatcaaggtatttgtaggcaaaataccaagggatttatatgaggatgagttggtgcccctttttgagaaggccggacccatttgggatctacgtcttatgatggatccactgtccggtcagaatagagggtatgcatttatcaccttctgtggaaaggaagctgcacaggaagccgtgaaactgtgtgacagctatgaaattcgccctggtaaacaccttggagtgtgcatttctgtggcaaacaacagactttttgttggatccattccgaagaataagactaaagaaaacattttggaagaattcagtaaagtcacagagggtttggtggacgttattctctatcatcaacccgatgacaaaaagaagaatcgggggttctgcttccttgaatatgaggatcacaagtcagcagcacaagccagacgccggctgatgagtggaaaagtaaaagtgtggggaaatgtagttacagttgaatgggctgaccctgtggaagaaccagatccagaagtcatggctaaggtaaaagttttgtttgtgagaaacttggctactacggtgacagaagaaatattggaaaagtcattttctgaatttggaaaactcgaaagagtaaagaagttgaaagattatgcatttgttcattttgaagacagaggagcagctgttaaggctatggatgaaatgaatggcaaagaaatagaaggggaagaaattgaaatagtcttagccaagccaccagacaagaaaaggaaagagcgccaagctgctagacaggcctccagaagcactgcgtatgaagattattactaccaccctcctcctcgcatgccacctccaattagaggtcggggtcgtggtggggggagaggtggatatggctaccctccagattactacggctatgaagattactatgatgattactatggttatgattatcacgactatcgtggaggctatgaagatccctactacggctatgatgatggctatgcagtaagaggaagaggaggaggaaggggagggcgaggtgctccaccaccaccaagggggaggggagcaccacctccaagaggtagagctggctattcacagaggggggcacctttgggaccaccaagaggctctaggggtggcagagggggtcctgctcaacagcagagaggccgtggttcccgtggatctcggggcaatcgtgggggcaatgtaggaggcaagagaaaggcagatgggtacaaccagcctgattccaagcgtcgtcagaccaacaaccaacagaactggggttcccaacccatcgctcagcagccgcttcagcaaggtggtgactattctggtaactatggttacaataatgacaaccaggaattttatcaggatacttatgggcaacagtggaagtagacaagtaagggcttgaaaatgatactggcaagatacgattggctctagatctacattcttcaaaaaaaaaaattggcttaactgtttcatctttaagtagcattttgctgccatttgtattgggctgaagaaatcactattgtgtatatactcaagtctttttatttttcctcttttcataaatgctcttggacattattgggcttgcagagttcccttattctggggattacaatgcttttatcgtttcaggcttcattttagcttcaaaacaagctgggcacactgttaaatcatgattttgcagaacctttggttttggacagtttcatttttttggatttgggatagattacataggagtatggagtatgctgtaaataaaaatacaagctagtgctttgtcttagtagttttaagaaattaaagcaaacaaatttaagttttcttgtattgaaaataacctatgattgtatgttttgcattcctagaagtaggttaactgtgtttttaaattgttataacttcacacctttttgaaatctgccctacaaaatttgtttggcttaaacgtcaaaagccgtgacaatttgttctttgatgtgattgtatttccaatttcttgttcatgtaagatttcaataaaactaaaaaatctattcaaaacattacctatttcaaattcaattgtgtcctaaaacattattttattcgtaatccttgcaaggaatattgttttcaaagtataactgcctatgtgagtgatcaaattcatgcaaaatttcttgtttattccaacatgtgttgtggatattagactgaggattagtctaaattcaagtatttattccaattagcactttcattgattggtgttctctcatagtctcttctaattttgaaattttatcttttattaaaaaaaaaaaaacaggttcatagacttttgagcattcttgcaggcattggataatttgcattaaaacaaataaaatgtggctgggaaagcagactgcaa

SEQ ID NO: 301833 - DNA, 2879 bp, Homo sapiens
ggctgccgggatcgcgtctcagtccatcaggggggggagggggtggcgcgcgcgccatttctagtcgttttcaaagcgcctcgcgctgattctcacgggcccggctgccggcccccgctctgccctgcataataaaatggctaatcaggtgaatggtaatgcggtacagttaaaagaagaggaagaaccaatggatacttccagtgtaactcacacagaacactacaagacactgatagaggcaggcctcccacagaaggtggcagaaagacttgatgaaatatttcagacaggattggtagcttatgtcgatcttgatgaaagagcaattgatgctctcagggaatttaatgaagaaggagctctgtctgtactacagcagttcaaggaaagtgacttatcacatgttcagaacaaaagtgcatttttatgtggagttatgaagacctacaggcagagagagaaacaggggagcaaggtgcaagagtccacaaagggacctgatgaagcgaagatcaaggccttgcttgagagaactggttatactctggatgtaaccacaggacagaggaagtatggtggtcctccaccagacagtgtgtactctggcgtgcaacctggaattggaacggagtgtgacagctatgaaattcgccctggtaaacaccttggagtgtgcatttctgtggcaaacaacagactttttgttggatccattccgaagaataagactaaagaaaacattttggaagaattcagtaaagtcacagagggtttggtggacgttattctctatcatcaacccgatgacaaaaagaagaatcgggggttctgcttccttgaatatgaggatcacaagtcagcagcacaagccagacgccggctgatgagtggaaaagtaaaagtgtggggaaatgtagttacagttgaatgggctgaccctgtggaagaaccagatccagaagtcatggctaaggtaaaagttttgtttgtgagaaacttggctactacggtgacagaagaaatattggaaaagtcattttctgaatttggaaaactcgaaagagtaaagaagttgaaagattatgcatttgttcattttgaagacagaggagcagctgttaaggctatggatgaaatgaatggcaaagaaatagaaggggaagaaattgaaatagtcttagccaagccaccagacaagaaaaggaaagagcgccaagctgctagacaggcctccagaagcactgcgtatgaagattattactaccaccctcctcctcgcatgccacctccaattagaggtcggggtcgtggtggggggagaggtggatatggctaccctccagattactacggctatgaagattactatgatgattactatggttatgattatcacgactatcgtggaggctatgaagatccctactacggctatgatgatggctatgcagtaagaggaagaggaggaggaaggggagggcgaggtgctccaccaccaccaagggggaggggagcaccacctccaagaggtagagctggctattcacagaggggggcacctttgggaccaccaagaggctctaggggtggcagagggggtcctgctcaacagcagagaggccgtggttcccgtggatctcggggcaatcgtgggggcaatgtaggaggcaagagaaaggcagatgggtacaaccagcctgattccaagcgtcgtcagaccaacaaccaacagaactggggttcccaacccatcgctcagcagccgcttcagcaaggtggtgactattctggtaactatggttacaataatgacaaccaggaattttatcaggatacttatgggcaacagtggaagtagacaagtaagggcttgaaaatgatactggcaagatacgattggctctagatctacattcttcaaaaaaaaaaattggcttaactgtttcatctttaagtagcattttgctgccatttgtattgggctgaagaaatcactattgtgtatatactcaagtctttttatttttcctcttttcataaatgctcttggacattattgggcttgcagagttcccttattctggggattacaatgcttttatcgtttcaggcttcattttagcttcaaaacaagctgggcacactgttaaatcatgattttgcagaacctttggttttggacagtttcatttttttggatttgggatagattacataggagtatggagtatgctgtaaataaaaatacaagctagtgctttgtcttagtagttttaagaaattaaagcaaacaaatttaagttttcttgtattgaaaataacctatgattgtatgttttgcattcctagaagtaggttaactgtgtttttaaattgttataacttcacacctttttgaaatctgccctacaaaatttgtttggcttaaacgtcaaaagccgtgacaatttgttctttgatgtgattgtatttccaatttcttgttcatgtaagatttcaataaaactaaaaaatctattcaaaacattacctatttcaaattcaattgtgtcctaaaacattattttattcgtaatccttgcaaggaatattgttttcaaagtataactgcctatgtgagtgatcaaattcatgcaaaatttcttgtttattccaacatgtgttgtggatattagactgaggattagtctaaattcaagtatttattccaattagcactttcattgattggtgttctctcatagtctcttctaattttgaaattttatcttttattaaaaaaaaaaaaacaggttcatagacttttgagcattcttgcaggcattggataatttgcattaaaacaaataaaatgtggctgggaaagcagactgcaa

SEQ ID NO: 301834 - DNA, 2713 bp, Homo sapiens
ggctgccgggatcgcgtctcagtccatcaggggggggagggggtggcgcgcgcgccatttctagtcgttttcaaagcgcctcgcgctgattctcacgggcccggctgccggcccccgctctgccctggattggtagcttatgtcgatcttgatgaaagagcaattgatgctctcagggaatttaatgaagaaggagctctgtctgtactacagcagttcaaggaaagtgacttatcacatgttcagaacaaaagtgcatttttatgtggagttatgaagacctacaggcagagagagaaacaggggagcaaggtgcaagagtccacaaagggacctgatgaagcgaagatcaaggccttgcttgagagaactggttatactctggatgtaaccacaggacagaggaagtatggtggtcctccaccagacagtgtgtactctggcgtgcaacctggaattggaacggagtgtgacagctatgaaattcgccctggtaaacaccttggagtgtgcatttctgtggcaaacaacagactttttgttggatccattccgaagaataagactaaagaaaacattttggaagaattcagtaaagtcacagagggtttggtggacgttattctctatcatcaacccgatgacaaaaagaagaatcgggggttctgcttccttgaatatgaggatcacaagtcagcagcacaagccagacgccggctgatgagtggaaaagtaaaagtgtggggaaatgtagttacagttgaatgggctgaccctgtggaagaaccagatccagaagtcatggctaaggtaaaagttttgtttgtgagaaacttggctactacggtgacagaagaaatattggaaaagtcattttctgaatttggaaaactcgaaagagtaaagaagttgaaagattatgcatttgttcattttgaagacagaggagcagctgttaaggctatggatgaaatgaatggcaaagaaatagaaggggaagaaattgaaatagtcttagccaagccaccagacaagaaaaggaaagagcgccaagctgctagacaggcctccagaagcactgcgtatgaagattattactaccaccctcctcctcgcatgccacctccaattagaggtcggggtcgtggtggggggagaggtggatatggctaccctccagattactacggctatgaagattactatgatgattactatggttatgattatcacgactatcgtggaggctatgaagatccctactacggctatgatgatggctatgcagtaagaggaagaggaggaggaaggggagggcgaggtgctccaccaccaccaagggggaggggagcaccacctccaagaggtagagctggctattcacagaggggggcacctttgggaccaccaagaggctctaggggtggcagagggggtcctgctcaacagcagagaggccgtggttcccgtggatctcggggcaatcgtgggggcaatgtaggaggcaagagaaaggcagatgggtacaaccagcctgattccaagcgtcgtcagaccaacaaccaacagaactggggttcccaacccatcgctcagcagccgcttcagcaaggtggtgactattctggtaactatggttacaataatgacaaccaggaattttatcaggatacttatgggcaacagtggaagtagacaagtaagggcttgaaaatgatactggcaagatacgattggctctagatctacattcttcaaaaaaaaaaattggcttaactgtttcatctttaagtagcattttgctgccatttgtattgggctgaagaaatcactattgtgtatatactcaagtctttttatttttcctcttttcataaatgctcttggacattattgggcttgcagagttcccttattctggggattacaatgcttttatcgtttcaggcttcattttagcttcaaaacaagctgggcacactgttaaatcatgattttgcagaacctttggttttggacagtttcatttttttggatttgggatagattacataggagtatggagtatgctgtaaataaaaatacaagctagtgctttgtcttagtagttttaagaaattaaagcaaacaaatttaagttttcttgtattgaaaataacctatgattgtatgttttgcattcctagaagtaggttaactgtgtttttaaattgttataacttcacacctttttgaaatctgccctacaaaatttgtttggcttaaacgtcaaaagccgtgacaatttgttctttgatgtgattgtatttccaatttcttgttcatgtaagatttcaataaaactaaaaaatctattcaaaacattacctatttcaaattcaattgtgtcctaaaacattattttattcgtaatccttgcaaggaatattgttttcaaagtataactgcctatgtgagtgatcaaattcatgcaaaatttcttgtttattccaacatgtgttgtggatattagactgaggattagtctaaattcaagtatttattccaattagcactttcattgattggtgttctctcatagtctcttctaattttgaaattttatcttttattaaaaaaaaaaaaacaggttcatagacttttgagcattcttgcaggcattggataatttgcattaaaacaaataaaatgtggctgggaaagcagactgcaa

SEQ ID NO: 301835 - DNA, 2545 bp, Homo sapiens
cgaaagacatagctagtaggagcctgggtgtgtaatcggccgagggcagtcaaggaaattgacttatcacatgttcagaacaaaagtgcatttttatgtggagttatgaagacctacaggcagagagagaaacaggggagcaaggtgcaagagtccacaaagggacctgatgaagcgaagatcaaggccttgcttgagagaactggttatactctggatgtaaccacaggacagaggaagtatggtggtcctccaccagacagtgtgtactctggcgtgcaacctggaattggaacggagtgtgacagctatgaaattcgccctggtaaacaccttggagtgtgcatttctgtggcaaacaacagactttttgttggatccattccgaagaataagactaaagaaaacattttggaagaattcagtaaagtcacagagggtttggtggacgttattctctatcatcaacccgatgacaaaaagaagaatcgggggttctgcttccttgaatatgaggatcacaagtcagcagcacaagccagacgccggctgatgagtggaaaagtaaaagtgtggggaaatgtagttacagttgaatgggctgaccctgtggaagaaccagatccagaagtcatggctaaggtaaaagttttgtttgtgagaaacttggctactacggtgacagaagaaatattggaaaagtcattttctgaatttggaaaactcgaaagagtaaagaagttgaaagattatgcatttgttcattttgaagacagaggagcagctgttaaggctatggatgaaatgaatggcaaagaaatagaaggggaagaaattgaaatagtcttagccaagccaccagacaagaaaaggaaagagcgccaagctgctagacaggcctccagaagcactgcgtatgaagattattactaccaccctcctcctcgcatgccacctccaattagaggtcggggtcgtggtggggggagaggtggatatggctaccctccagattactacggctatgaagattactatgatgattactatggttatgattatcacgactatcgtggaggctatgaagatccctactacggctatgatgatggctatgcagtaagaggaagaggaggaggaaggggagggcgaggtgctccaccaccaccaagggggaggggagcaccacctccaagaggtagagctggctattcacagaggggggcacctttgggaccaccaagaggctctaggggtggcagagggggtcctgctcaacagcagagaggccgtggttcccgtggatctcggggcaatcgtgggggcaatgtaggaggcaagagaaaggcagatgggtacaaccagcctgattccaagcgtcgtcagaccaacaaccaacagaactggggttcccaacccatcgctcagcagccgcttcagcaaggtggtgactattctggtaactatggttacaataatgacaaccaggaattttatcaggatacttatgggcaacagtggaagtagacaagtaagggcttgaaaatgatactggcaagatacgattggctctagatctacattcttcaaaaaaaaaaattggcttaactgtttcatctttaagtagcattttgctgccatttgtattgggctgaagaaatcactattgtgtatatactcaagtctttttatttttcctcttttcataaatgctcttggacattattgggcttgcagagttcccttattctggggattacaatgcttttatcgtttcaggcttcattttagcttcaaaacaagctgggcacactgttaaatcatgattttgcagaacctttggttttggacagtttcatttttttggatttgggatagattacataggagtatggagtatgctgtaaataaaaatacaagctagtgctttgtcttagtagttttaagaaattaaagcaaacaaatttaagttttcttgtattgaaaataacctatgattgtatgttttgcattcctagaagtaggttaactgtgtttttaaattgttataacttcacacctttttgaaatctgccctacaaaatttgtttggcttaaacgtcaaaagccgtgacaatttgttctttgatgtgattgtatttccaatttcttgttcatgtaagatttcaataaaactaaaaaatctattcaaaacattacctatttcaaattcaattgtgtcctaaaacattattttattcgtaatccttgcaaggaatattgttttcaaagtataactgcctatgtgagtgatcaaattcatgcaaaatttcttgtttattccaacatgtgttgtggatattagactgaggattagtctaaattcaagtatttattccaattagcactttcattgattggtgttctctcatagtctcttctaattttgaaattttatcttttattaaaaaaaaaaaaacaggttcatagacttttgagcattcttgcaggcattggataatttgcattaaaacaaataaaatgtggctgggaaagcagactgcaa

SEQ ID NO: 301836 - DNA, 2599 bp, Homo sapiens
ggctgccgggatcgcgtctcagtccatcaggggggggagggggtggcgcgcgcgccatttctagtcgttttcaaagcgcctcgcgctgattctcacgggcccggctgccggcccccgctctgccctggattggtagcttatgtcgatcttgatgaaagagcaattgatgctctcagggaatttaatgaagaaggagctctgtctgtactacagcagttcaaggaaagtgacttatcacatgttcagaacaaaagtgcatttttatgtggagttatgaagacctacaggcagagagagaaacaggggagcaaggtgcaagagtccacaaagggacctgatgaagcgaagatcaagtgtgacagctatgaaattcgccctggtaaacaccttggagtgtgcatttctgtggcaaacaacagactttttgttggatccattccgaagaataagactaaagaaaacattttggaagaattcagtaaagtcacagagggtttggtggacgttattctctatcatcaacccgatgacaaaaagaagaatcgggggttctgcttccttgaatatgaggatcacaagtcagcagcacaagccagacgccggctgatgagtggaaaagtaaaagtgtggggaaatgtagttacagttgaatgggctgaccctgtggaagaaccagatccagaagtcatggctaaggtaaaagttttgtttgtgagaaacttggctactacggtgacagaagaaatattggaaaagtcattttctgaatttggaaaactcgaaagagtaaagaagttgaaagattatgcatttgttcattttgaagacagaggagcagctgttaaggctatggatgaaatgaatggcaaagaaatagaaggggaagaaattgaaatagtcttagccaagccaccagacaagaaaaggaaagagcgccaagctgctagacaggcctccagaagcactgcgtatgaagattattactaccaccctcctcctcgcatgccacctccaattagaggtcggggtcgtggtggggggagaggtggatatggctaccctccagattactacggctatgaagattactatgatgattactatggttatgattatcacgactatcgtggaggctatgaagatccctactacggctatgatgatggctatgcagtaagaggaagaggaggaggaaggggagggcgaggtgctccaccaccaccaagggggaggggagcaccacctccaagaggtagagctggctattcacagaggggggcacctttgggaccaccaagaggctctaggggtggcagagggggtcctgctcaacagcagagaggccgtggttcccgtggatctcggggcaatcgtgggggcaatgtaggaggcaagagaaaggcagatgggtacaaccagcctgattccaagcgtcgtcagaccaacaaccaacagaactggggttcccaacccatcgctcagcagccgcttcagcaaggtggtgactattctggtaactatggttacaataatgacaaccaggaattttatcaggatacttatgggcaacagtggaagtagacaagtaagggcttgaaaatgatactggcaagatacgattggctctagatctacattcttcaaaaaaaaaaattggcttaactgtttcatctttaagtagcattttgctgccatttgtattgggctgaagaaatcactattgtgtatatactcaagtctttttatttttcctcttttcataaatgctcttggacattattgggcttgcagagttcccttattctggggattacaatgcttttatcgtttcaggcttcattttagcttcaaaacaagctgggcacactgttaaatcatgattttgcagaacctttggttttggacagtttcatttttttggatttgggatagattacataggagtatggagtatgctgtaaataaaaatacaagctagtgctttgtcttagtagttttaagaaattaaagcaaacaaatttaagttttcttgtattgaaaataacctatgattgtatgttttgcattcctagaagtaggttaactgtgtttttaaattgttataacttcacacctttttgaaatctgccctacaaaatttgtttggcttaaacgtcaaaagccgtgacaatttgttctttgatgtgattgtatttccaatttcttgttcatgtaagatttcaataaaactaaaaaatctattcaaaacattacctatttcaaattcaattgtgtcctaaaacattattttattcgtaatccttgcaaggaatattgttttcaaagtataactgcctatgtgagtgatcaaattcatgcaaaatttcttgtttattccaacatgtgttgtggatattagactgaggattagtctaaattcaagtatttattccaattagcactttcattgattggtgttctctcatagtctcttctaattttgaaattttatcttttattaaaaaaaaaaaaacaggttcatagacttttgagcattcttgcaggcattggataatttgcattaaaacaaataaaatgtggctgggaaagcagactgcaa

SEQ ID NO: 301837 - DNA, 1572 bp, Homo sapiens
  misc_feature (1500)..(1500): n is a, c, g, or t
  misc_feature (1527)..(1527): n is a, c, g, or t
ggctgccgggatcgcgtctcagtccatcaggggggggagggggtggcgcgcgcgccatttctagtcgttttcaaagcgcctcgcgctgattctcacgggcccggctgccggcccccgctctgccctggattggtagcttatgtcgatcttgatgaaagagcaattgatgctctcagggaatttaatgaagaaggagctctgtctgtactacagcagttcaaggaaagtgacttatcacatgttcagaacaaaagtgcatttttatgtggagttatgaagacctacaggcagagagagaaacaggggagcaaggtgcaagagtccacaaagggacctgatgaagcgaagatcaaggccttgcttgagagaactggttatactctggatgtaaccacaggacagaggaagtatggtggtcctccaccagacagtgtgtactctggcgtgcaacctggaattggaacggaggtatttgtaggcaaaataccaagggatttatatgaggatgagttggtgcccctttttgagaaggccggacccatttgggatctacgtcttatgatggatccactgtccggtcagaatagagggtatgcatttatcaccttctgtggaaaggaagctgcacaggaagccgtgaaactgtgtgacagctatgaaattcgccctggtaaacaccttggagtgtgcatttctgtggcaaacaacagactttttgttggatccattccgaagaataagactaaagaaaacattttggaagaattcagtaaagtcacagagggtttggtggacgttattctctatcatcaacccgatgacaaaaagaagaatcgggggttctgcttccttgaatatgaggatcacaagtcagcagcacaagccagacgccggctgatgagtggaaaagtaaaagtgtggggaaatgtagttacagttgaatgggctgaccctgtggaagaaccagatccagaagtcatggctaaggtaaaagttttgtttgtgagaaacttggctactacggtgacagaagaaatattggaaaagtcattttctgaatttggaaaactcgaaagagtaaagaagttgaaagattatgcatttgttcattttgaagacagaggagcagctgttaaggctatggatgaaatgaatggcaaagaaatagaaggggaagaaattgaaatagtcttagccaagccaccagacaagaaaaggaaagagcgccaagctgctagacaggcctccagaagcactgcgtatgaagattattactaccaccctcctcctcgcatgccacctccaattagaggtcggggtcgtggtggggggagaggtggatatggctaccctccagattactacggctatgaagattactatgatgattactatggttatgattatcacgactatcgtggaggccgaggcaggtggatcacgaggtcaggagatagagaccatcctggctaacatggtgaaaccccatctttattaaanatacaaaaaattagccaggcatggtgntgggtgcctgtagttccagctactcgggaggctgaggcaggagaa

SEQ ID NO: 301838 - DNA, 1521 bp, Homo sapiens
ggctgccgggatcgcgtctcagtccatcaggggggggagggggtggcgcgcgcgccatttctagtcgttttcaaagcgcctcgcgctgattctcacgggcccggctgccggcccccgctctgccctggattggtagcttatgtcgatcttgatgaaagagcaattgatgctctcagggaatttaatgaagaaggagctctgtctgtactacagcagttcaaggaaagtgacttatcacatgttcagaacaaaagtgcatttttatgtggagttatgaagacctacaggcagagagagaaacaggggagcaaggtgcaagagtccacaaagggacctgatgaagcgaagatcaaggccttgcttgagagaactggttatactctggatgtaaccacaggacagaggaagtatggtggtcctccaccagacagtgtgtactctggcgtgcaacctggaattggaacggaggtatttgtaggcaaaataccaagggatttatatgaggatgagttggtgcccctttttgagaaggccggacccatttgggatctacgtcttatgatggatccactgtccggtcagaatagagggtatgcatttatcaccttctgtggaaaggaagctgcacaggaagccgtgaaactgtgtgacagctatgaaattcgccctggtaaacaccttggagtgtgcatttctgtggcaaacaacagactttttgttggatccattccgaagaataagactaaagaaaacattttggaagaattcagtaaagtcacagagggtttggtggacgttattctctatcatcaacccgatgacaaaaagaagaatcgggggttctgcttccttgaatatgaggatcacaagtcagcagcacaagccagacgccggctgatgagtggaaaagtaaaagtgtggggaaatgtagttacagttgaatgggctgaccctgtggaagaaccagatccagaagtcatggctaaggtaaaagttttgtttgtgagaaacttggctactacggtgacagaagaaatattggaaaagtcattttctgaatttggaaaactcgaaagagtaaagaagttgaaagattatgcatttgttcattttgaagacagaggagcagctgttaaggctatggatgaaatgaatggcaaagaaatagaaggggaagaaattgaaatagtcttagccaagccaccagacaagaaaaggaaagagcgccaagctgctagacaggcctccagaagcactgcgtatgaagattattactaccaccctcctcctcgcatgccacctccaattagaggtcggggtcgtggtggggggagacttttataactcaagtgaagtgacccaggcctggagcgccaagtacaaagcggggacgacacttgcacctcctggcaagccagagcacagtgaggttcaaaagaaggggctagtgaattaattcctcagttagatgtcctataattgcggtctgtagcaactaattcaaagcaaatctaattttca

SEQ ID NO: 301839 - DNA, 2067 bp, Homo sapiens
ggctgccgggatcgcgtctcagtccatcaggggggggagggggtggcgcgcgcgccatttctagtcgttttcaaagcgcctcgcgctgattctcacgggcccggctgccggcccccgctctgccctgcataataaaatggctaatcaggtgaatggtaatgcggtacagttaaaagaagaggaagaaccaatggatacttccagtgtaactcacacagaacactacaagacactgatagaggcaggcctcccacagaaggtggcagaaagacttgatgaaatatttcagacaggattggtagcttatgtcgatcttgatgaaagagcaattgatgctctcagggaatttaatgaagaaggagctctgtctgtactacagcagttcaaggaaagtgacttatcacatgttcagaacaaaagtgcatttttatgtggagtatgaagattattactaccaccctcctcctcgcatgccacctccaattagaggtcggggtcgtggtggggggagaggtggatatggctaccctccagattactacggctatgaagattactatgatgattactatggttatgattatcacgactatcgtggaggctatgaagatccctactacggctatgatgatggctatgcagtaagaggaagaggaggaggaaggggagggcgaggtgctccaccaccaccaagggggaggggagcaccacctccaagaggtagagctggctattcacagaggggggcacctttgggaccaccaagaggctctaggggtggcagagggggtcctgctcaacagcagagaggccgtggttcccgtggatctcggggcaatcgtgggggcaatgtaggaggcaagagaaaggcagatgggtacaaccagcctgattccaagcgtcgtcagaccaacaaccaacagaactggggttcccaacccatcgctcagcagccgcttcagcaaggtggtgactattctggtaactatggttacaataatgacaaccaggaattttatcaggatacttatgggcaacagtggaagtagacaagtaagggcttgaaaatgatactggcaagatacgattggctctagatctacattcttcaaaaaaaaaaattggcttaactgtttcatctttaagtagcattttgctgccatttgtattgggctgaagaaatcactattgtgtatatactcaagtctttttatttttcctcttttcataaatgctcttggacattattgggcttgcagagttcccttattctggggattacaatgcttttatcgtttcaggcttcattttagcttcaaaacaagctgggcacactgttaaatcatgattttgcagaacctttggttttggacagtttcatttttttggatttgggatagattacataggagtatggagtatgctgtaaataaaaatacaagctagtgctttgtcttagtagttttaagaaattaaagcaaacaaatttaagttttcttgtattgaaaataacctatgattgtatgttttgcattcctagaagtaggttaactgtgtttttaaattgttataacttcacacctttttgaaatctgccctacaaaatttgtttggcttaaacgtcaaaagccgtgacaatttgttctttgatgtgattgtatttccaatttcttgttcatgtaagatttcaataaaactaaaaaatctattcaaaacattacctatttcaaattcaattgtgtcctaaaacattattttattcgtaatccttgcaaggaatattgttttcaaagtataactgcctatgtgagtgatcaaattcatgcaaaatttcttgtttattccaacatgtgttgtggatattagactgaggattagtctaaattcaagtatttattccaattagcactttcattgattggtgttctctcatagtctcttctaattttgaaattttatcttttattaaaaaaaaaaaaacaggttcatagacttttgagcattcttgcaggcattggataatttgcattaaaacaaataaaatgtggctgggaaagcagactgcaa

SEQ ID NO: 301840 - DNA, 1967 bp, Homo sapiens
ggctgccgggatcgcgtctcagtccatcaggggggggagggggtggcgcgcgcgccatttctagtcgttttcaaagcgcctcgcgctgattctcacgggcccggctgccggcccccgctctgccctgcataataaaatggctaatcaggtgaatggtaatgcggtacagttaaaagaagaggaagaaccaatggatacttccagtgtaactcacacagaacactacaagacactgatagaggcaggcctcccacagaaggtggcagaaagacttgatgaaatatttcagacaggattggtagcttatgtcgatcttgatgaaagagcaattgatgctctcagggaatttaatgaagaaggagctctgtctgtactacagcagttcaaggaaagtgacttatcacatgttcagggtggatatggctaccctccagattactacggctatgaagattactatgatgattactatggttatgattatcacgactatcgtggaggctatgaagatccctactacggctatgatgatggctatgcagtaagaggaagaggaggaggaaggggagggcgaggtgctccaccaccaccaagggggaggggagcaccacctccaagaggtagagctggctattcacagaggggggcacctttgggaccaccaagaggctctaggggtggcagagggggtcctgctcaacagcagagaggccgtggttcccgtggatctcggggcaatcgtgggggcaatgtaggaggcaagagaaaggcagatgggtacaaccagcctgattccaagcgtcgtcagaccaacaaccaacagaactggggttcccaacccatcgctcagcagccgcttcagcaaggtggtgactattctggtaactatggttacaataatgacaaccaggaattttatcaggatacttatgggcaacagtggaagtagacaagtaagggcttgaaaatgatactggcaagatacgattggctctagatctacattcttcaaaaaaaaaaattggcttaactgtttcatctttaagtagcattttgctgccatttgtattgggctgaagaaatcactattgtgtatatactcaagtctttttatttttcctcttttcataaatgctcttggacattattgggcttgcagagttcccttattctggggattacaatgcttttatcgtttcaggcttcattttagcttcaaaacaagctgggcacactgttaaatcatgattttgcagaacctttggttttggacagtttcatttttttggatttgggatagattacataggagtatggagtatgctgtaaataaaaatacaagctagtgctttgtcttagtagttttaagaaattaaagcaaacaaatttaagttttcttgtattgaaaataacctatgattgtatgttttgcattcctagaagtaggttaactgtgtttttaaattgttataacttcacacctttttgaaatctgccctacaaaatttgtttggcttaaacgtcaaaagccgtgacaatttgttctttgatgtgattgtatttccaatttcttgttcatgtaagatttcaataaaactaaaaaatctattcaaaacattacctatttcaaattcaattgtgtcctaaaacattattttattcgtaatccttgcaaggaatattgttttcaaagtataactgcctatgtgagtgatcaaattcatgcaaaatttcttgtttattccaacatgtgttgtggatattagactgaggattagtctaaattcaagtatttattccaattagcactttcattgattggtgttctctcatagtctcttctaattttgaaattttatcttttattaaaaaaaaaaaaacaggttcatagacttttgagcattcttgcaggcattggataatttgcattaaaacaaataaaatgtggctgggaaagcagactgcaa

SEQ ID NO: 301841 - DNA, 1368 bp, Homo sapiens
ggctgccgggatcgcgtctcagtccatcaggggggggagggggtggcgcgcgcgccatttctagtcgttttcaaagcgcctcgcgctgattctcacgggcccggctgccggcccccgctctgccctggattggtagcttatgtcgatcttgatgaaagagcaattgatgctctcagggaatttaatgaagaaggagctctgtctgtactacagcagttcaaggaaagtgacttatcacatgttcagaacaaaagtgcatttttatgtggagttatgaagacctacaggcagagagagaaacaggggagcaaggtgcaagagtccacaaagggacctgatgaagcgaagatcaaggccttgcttgagagaactggttatactctggatgtaaccacaggacagaggaagtatggtggtcctccaccagacagtgtgtactctggcgtgcaacctggaattggaacggaggtatttgtaggcaaaataccaagggatttatatgaggatgagttggtgcccctttttgagaaggccggacccatttgggatctacgtcttatgatggatccactgtccggtcagaatagagggtatgcatttatcaccttctgtggaaaggaagctgcacaggaagccgtgaaactgtgtgacagctatgaaattcgccctggtaaacaccttggagtgtgcatttctgtggcaaacaacagactttttgttggatccattccgaagaataagactaaagaaaacattttggaagaattcagtaaagtcacagagggtttggtggacgttattctctatcatcaacccgatgacaaaaagaagaatcgggggttctgcttccttgaatatgaggatcacaagtcagcagcacaagccagacgccggctgatgagtggaaaagtaaaagtgtggggaaatgtagttacagttgaatgggctgaccctgtggaagaaccagatccagaagtcatggctaaggtaaaagttttgtttgtgagaaacttggctactacggtgacagaagaaatattggaaaagtcattttctgaatttggaaaactcgaaagagtaaagaagttgaaagattatgcatttgttcattttgaagacagaggagcagctgttaaggctatggatgacatgatggccaacgaattcggaaaggggacgcaatttgaattagttttaggccagcaccagacaagaaaggaagagcgcagctgtaaaaggctccagagcatggtttgaattttatacacctcttctgatggcacctccattaaggccggcgcgcggggggacaggggattgggtccccaattatagggttagaaataaggggaaccgggttaatttcag

SEQ ID NO: 301842 - DNA, 1013 bp, Homo sapiens
ggctgccgggatcgcgtctcagtccatcaggggggggagggggtggcgcgcgcgccatttctagtcgttttcaaagcgcctcgcgctgattctcacgggcccggctgccggcccccgctctgccctggattggtagcttatgtcgatcttgatgaaagagcaattgatgctctcagggaatttaatgaagaaggagctctgtctgtactacagcagttcaaggaaagtgacttatcacatgttcagaacaaaagtgcatttttatgtggagttatgaagacctacaggcagagagagaaacaggggagcaaggtgcaagagtccacaaagggacctgatgaagcgaagatcaaggccttgcttgagagaactggttatactctggatgtaaccacaggacagaggaagtatggtggtcctccaccagacagtgtgtactctggcgtgcaacctggaattggaacggaggtatttgtaggcaaaataccaagggatttatatgaggatgagttggtgcccctttttgagaaggccggacccatttgggatctacgtcttatgatggatccactgtccggtcagaatagagggtatgcatttatcaccttctgtggaaaggaagctgcacaggaagccgtgaaactgtgtgacagctatgaaattcgccctggtaaacaccttggagtgtgcatttctgtggcaaacaacagactttttgttggatccattccgaagaataagactaaagaaaacattttggaagaattcagtaaagtcacagagggtttggtggacgttattctctatcatcaacccgatgacaaaaagaagaatcgggggttctgcttccttgaatatgaggatcacaagtcagcagcacaagccagacgccggctgatgagtggaaaagtaaaagtgtggggaaatgtagttacagttgaatgggctgaccctgtggaagaaccagatccagaagtcatggctaaggtaaatacagttgcttggaatgggca

SEQ ID NO: 301843 - DNA, 1244 bp, Homo sapiens
ggctgccgggatcgcgtctcagtccatcaggggggggagggggtggcgcgcgcgccatttctagtcgttttcaaagcgcctcgcgctgattctcacgggcccggctgccggcccccgctctgccctggattggtagcttatgtcgatcttgatgaaagagcaattgatgctctcagggaatttaatgaagaaggagctctgtctgtactacagcagttcaaggaaagtgacttatcacatgttcagaacaaaagtgcatttttatgtggagttatgaagacctacaggcagagagagaaacaggggagcaaggtgcaagagtccacaaagggacctgatgaagcgaagatcaaggccttgcttgagagaactggttatactctggatgtaaccacaggacagaggaagtatggtggtcctccaccagacagtgtgtactctggcgtgcaacctggaattggaacggaggtatttgtaggcaaaataccaagggatttatatgaggatgagttggtgcccctttttgagaaggccggacccatttgggatctacgtcttatgatggatccactgtccggtcagaatagagggtatgcatttatcaccttctgtggaaaggaagctgcacaggaagccgtgaaactgtgtgacagctatgaaattcgccctggtaaacaccttggagtgtgcatttctgtggcaaacaacagactttttgttggatccattccgaagaataagactaaagaaaacattttggaagaattcagtaaagtcacaggtaaaacaaaaatgtatttagaaattacttttgcgaaatatgttgtactacttacaagtgctcaaaaaaactgaggggttgtatgtattaaattaagaattcaggtctgaagtatctaaattgcttcctttctgctttatagtggtttgggtttaagcaagttcccttatatccttcatttcttggaatgtccccttcacttctttgtcttaattgaaccttggcttttgctggagcttttgctctatagccctcaagtgaatgctttttttccccttgacaattagtgtattttaggaccaagaggatgaaagtttttactctctccctgctgccttgtctagatcagattttttttttttttgagacggagtttcgctcttgttgcctaggctggaggttgcagtgagcaaagatcatgctactgccctccagcttggatgacagagcgagactccatctt

SEQ ID NO: 301844 - DNA, 2114 bp, Homo sapiens
ggctgccgggatcgcgtctcagtccatcaggggggggagggggtggcgcgcgcgccatttctagtcgttttcaaagcgcctcgcgctgattctcacgggcccggctgccggcccccgctctgccctgcataataaaatggctaatcaggtgaatggtaatgcggtacagttaaaagaagaggaagaaccaatggatacttccagtgtaactcacacagaacactacaagacactgatagaggcaggcctcccacagaaggtggcagaaagacttgatgaaatatttcagacaggattggtagcttatgtcgatcttgatgaaagagcaattgatgctctcagggaatttaatgaagaaggagctctgtctgtactacagcagttcaaggaaagtgacttatcacatgttcagaacaaaagtgcatttttatgtggagttatgaagacctacaggcagagagagaaacaggggagcaaggtgcaagagtccacaaagggacctgatgaagcgaagatcaaggccttgcttgagagaactggttatactctggatgtaaccacaggacagaggaagtatggtggtcctccaccagacagtgtgtactctggcgtgcaacctggaattggaacggaggtatttgtaggcaaaataccaagggatttatatgaggatgagttggtgcccctttttgagaaggccggacccatttgggatctacgtcttatgatggatccactgtccggtcagaatagagggtatgcatttatcaccttctgtggaaaggaagctgcacaggaagccgtgaaactggtatgtgataattatccactgtcttagcaagtcactatttgaggaaataaactttaattcaaaaatgtttgtagttaacattattttgatttcttcagttgttgcttggaatgtttttatactgaccaagttggtatgtgacgtttatttttctctgactataaaagtaaaaaagaactgaaaatacccaaaaagtaatgttttatagaaagtctcccattgatttaagaagttatctattagattgatatcagaagtttcatatgagtatttggcttatgcatttctgtcttttggttttaggcaaaaggatgtcaattcttgatgttaaactttaggattcttaaagtataatgaagactggaatgggctgtggggaacataatagtggatgacagtgacttaggattcaattcagaaaatagttgtgaatctgttttattttggttacagcctactcatacgatttatttcatattttctaagtgtatttttgttcttcctgtatgtttcttggcccttgagtcttctctgtctttaatctttctctcctctcctactatttatagccagtctcatattaatttcctttctctagggcctttaaccacttggtgctcatttcagaccagtagtagtagcaacaaagttctgcaaatcaaatgtatcttcactcctgctgtatttaagacacagctatctcagtatcttaaaataacaatgtaattattttttggcatacccttgcctgacttctgaggacctcactaagtctagttctagcctttgtagaatggtcaacttctttcatcaaggctttggtttcattactggtgtctgaattagttccactcctagcttgacccagattttagtttttattatggattttttcttcaaacttgtttatttaatattaagttttcatttttggcagcatatggatgattttatttttaataatcatatctcttagtaaactaatggttaaataatattaaagtataagaagctaaaattggccaggtgtggtggctcacgcctgtaatcccagcactttgggaggctgaggcaggcagatcacctgaggtcaggagttcaagatcagcctggccaacgtggtgaaacccctgtctttactaaaaatacaaaaattagctgggcgtggtggcgcacgcctgtagtcccagctacttgggaggctgaggcaggagaatcacttcaacccaggaggtggaggttgcagtgagcaaagatcatgctactgccctccagcttggatgacagagcgagactccatctt

SEQ ID NO: 301845 - DNA, 568 bp, Homo sapiens
tttttttttttgagacggagtttcgctcttgttgcctaggctggagtgcaatggtacgatctcggctcactgcaacctccgcctccttggttcaagcaattctcctgcctcagcctcccgagtagctgggactagcatgtgccaccacgcctggctaattttgtatttttagtagagacggggtttctctatgttggtcaggctagtctagaactcccgacctctggtgatcctcccgcctcggcctcccaaagtgctgggattacaggcgtgagccacagtgcctggctgatcagatttttttaaatatccaattctaaatccatggaattgattgagaagtagattttatatcacagttctatacacatttatatataactgaaacaatttaacaaaactgtacttttatttattatacatgatttattttgatatttcttattctatttcattttttaaaatgccaattgtgatctaatactacctatgatttaaaaacactgcgttagaccgctgcctccccttgtaaaaaccactgtttctttacatttttatcatccagaca

SEQ ID NO: 301846 - DNA, 2572 bp, Homo sapiens
accggaagcgctctagggaaccctggagcttccgcgcctgcccagttttgctccgaaagacttaccgaggagggagcttgcggtgcgttctgggaaagttgctgggccagctcctttgtttccagtctgagcgttgcgttcggtttcccgagggtcttctgaggcaccgcggctgcgggcttctgagttcccggctctccgcagggaagcctcctcttcgtacctcgttttttggctcgtggggggtcctcccaccgctggccgacgcagccagcatgtccggggtgcgcgcagtgcggatcagcatcgaatcggcctgcgagaagcaggtccatgaggtgggcctggatggcaccgagacgtacctgcccccgctgtccatgtcgcagaatctggcgcgtctggcccagcggatagacttcagccagggttcgggctccgaggaggaggaggcggcggggaccgagggggacgcgcaggactggccgggcgccgggtccagcgcagaccaggacgacgaggaaggagtggtaaaatttcagccttccctttggccttgggactcagtgaggaacaatttgagaagtgccctgacagagatgtgtgttctctatgatgttctcagtattgttagggataaaaaatttatgactcttgatcctgtctctcaggatgcacttcctccaaaacagaatcctcagacgttgcaattgatatctaaaaagaagtcacttgctggagcagcacaaatcttattgaagggggcagaaagactgactaaatcagttaccgaaaaccaagaaaacaagctacaaagagacttcaattctgagcttttgcgattacggcaacactggaaacttcgaaaagttggagataaaattctcggagatctgagctacagaagtgcaggatctctctttcctcatcatggtacatttgaagtaataaagaatacagatctcgatctggataaaaagatacctgaagattactgtcctcttgatgtccaaattcctagtgatttagaggggtctgcatatatcaaggtttcaatacaaaaacaggctccagatataggtgacctcggcacagttaacctcttcaaacgacctttgcccaaatccaaaccaggttccccacattggcagacaaaattagaagcggcacagaatgttctcttatgtaaagaaatttttgcacagctctctcgggaagctgttcaaattaaatcacaagtccctcacattgtggtgaaaaaccagattatctctcagccctttccgagcttgcagttatctatttctttgtgccattcctcaaatgataagaaatcccaaaaatttgctactgagaagcaatgtccggaggaccacctttatgtcctagagcataatttgcatctactgattagagagtttcataaacagaccttgagttccatcatgatgcctcatccagcaagtgcaccttttggccacaagagaatgagactttcgggtcctcaagcttttgataaaaatgaaattaattcattacagtccagtgaagggcttctggaaaaaataattaaacaagcaaagcatatttttctaaggagtagagctgctgcaaccattgacagcttagcaagccgaattgaggatcctcagatacaggctcattggtcaaatatcaatgatgtttatgaatctagtgtgaaagttttaatcacatcacaaggctatgaacaaatatgcaagtccattcaactgcaattgaatattggagttgagcagattcgagttgtacatagagatggaagagtaattacactgtcttatcaggagcaggagctacaggattttcttctgtctcagatgtcacagcaccaggtacatgcagttcagcaactcgccaaggttatgggctggcaagtactgagcttcagtaatcatgtgggacttggacctatagagagcattggtaatgcatctgccatcacggtggcctccccaagtggtgactatgctatttcagttcgtaatggacctgaaagtggcagcaagattatggttcagtttcctcgtaaccaatgtaaagaccttccaaaaagtgatgttttacaagataacaaatggagtcatcttcgtgggccattcaaagaagttcagtggaataaaatggaaggtcgaaattttgtttataaaatggagctgcttatgtctgcacttagcccttgtctactatgattttttccagatgtttcctaaagaagtttccagaaactttgacttgaaatgtttgcagatcaactataagcacaaagaagagataacttccaaaagagtgctgtttttaaaaataataattaggaaatgtttatttagcactttcaaacttttcactttataaatgacaagtgctttgaaatgcagaagtttatgtacagttgtatatacagtatgacaagatgtaaaataatatgtttttcatgcagtttaaaatattactaacttaagggtttctatgtgctttttaaaatattccttctttgatgttgacatcaaataaagtatgtggtttaaaaaaa

SEQ ID NO: 301847 - DNA, 2326 bp, Homo sapiens
accggaagcgctctagggaaccctggagcttccgcgcctgcccagttttgctccgaaagacttaccgaggagggagcttgcggtgcgttctgggaaagttgctgggccagctcctttgtttccagtctgagcgttgcgttcggtttcccgagggtcttctgaggcaccgcggctgcgggcttctgagttcccggctctccgcagggaagcctcctcttcgtacctcgttttttggctcgtggggggtcctcccaccgctggccgacgcagccagcatgtccggggtgcgcgcagtgcggatcagcatcgaatcggcctgcgagaagcaggtccatgaggtgggcctggatggcaccgagacgtacctgcccccgctgtccatgtcgcagaatctggcgcgtctggcccagcggatagacttcagccagggttcgggctccgaggaggaggaggcggcggggaccgagggggacgcgcaggactggccgggcgccgggtccagcgcagaccaggacgacgaggaaggagtggtaaaatttcagccttccctttggccttgggactcagtgaggaacaatttgagaagtgccctgacagagatgtgtgttctctatgatgttctcagtattgttagggataaaaaatttatgactcttgatcctgtctctcaggatgcacttcctccaaaacaggtatttgtggactttaattgaataataaaattttatttattaaatcccaggacccttttttggctttgtgcttgttgttccattttcctttcttgcaaaattaagtccagatgaagatttaaagactaactggtctaaaacaaagccatacaactgcatttcctttatttttttattatatacctatgatccttggaagagttaagtttcattaagaatgtaatacctttaaggccaggcgtggtggctcacgcctgtaatcccagcactttgggaggccaaggcgggcagatcacgaggtcaggagatcgagaccatcctggctaatgctgtgaaaccttgtctctattaaaaataacaaaaataagccaggcgtggtggtgggcacctgtagtcccagctactcagaaggctgaggcaggagaattgcttgagcctgggaggcgggggttgcagtgagctgagatcgcgccactgcactccagcctgggcgacagagcgagattccatcccaaaaaaaaaaaaaaaaagaatgtaatactttaaaggttaccaaatcttaacaaattcttatagcctgggtccttggtctgtgatatattacacaaaaatgtgatgatataatggctttggaatcaggtagacctggattcgaatcctgcctctgccttcattaactgtgtgaccttaaattaagcaagttattttctcttaagtccctgtttttccatctaatccttccttccctttttttttaagggatggattagaaaagttaggcgaaattatggagcatattgagagctgggtagaattgctgctatttcataaacagtgtattcaatttttgaacatttgaagatgaaagagaagtagcaggaagatgagttggtgaatagtctgaaatcattgaggctacttgggtccttaaggaaaacaagtgtcaagaccataaccaaattagtcatggagaagaagtaatgactgttagaacccatttgtaaataaaattaattgaatagaattactcacatagtaatagtttcagaatctagaaacattgtgctgggggactaatagagttccctaaatctgcattcttcattttatagagagaaaactaaagcttaaagagatttgtaatatgttcaagttgctgtcaagccagtagttagggagccaagactagaactccagcacctaactcatagccccactgccttttctactattctgtgcttttcccagaagggagtctccaggaatttcttaatatctccaggaactcttttatttacgttccctaatgcaatcaaaagattattttgatatgtttatgaagctttttatgtgatttttgactctcatacagccagaaaactgtattaaactggttagtaaaatacacaaattatggtgattgtggatatttatatatgcatatgtgatacatagatagtgacttctgatcagttttccaaaaaattaggattcagtgaagtacatttaatattaacaatggcagggcacggtggcttatgcctgtaattccaacactttggggaaccaaagcaggaagccaggagtttgagactttcccaggcaacatagcaagaccctgtctctaccaaaaa

SEQ ID NO: 301848 - DNA, 3786 bp, Homo sapiens
accggaagcgctctagggaaccctggagcttccgcgcctgcccagttttgctccgaaagacttaccgaggagggagcttgcggtgcgttctgggaaagttgctgggccagctcctttgtttccagtctgagcgttgcgttcggtttcccgagggtcttctgaggcaccgcggctgcgggcttctgagttcccggctctccgcagggaagcctcctcttcgtacctcgttttttggctcgtggggggtcctcccaccgctggccgacgcagccagcatgtccggggtgcgcgcagtgcggatcagcatcgaatcggcctgcgagaagcaggtccatgaggtgggcctggatggcaccgagacgtacctgcccccgctgtccatgtcgcagaatctggcgcgtctggcccagcggatagacttcagccagggttcgggctccgaggaggaggaggcggcggggaccgagggggacgcgcaggactggccgggcgccgggtccagcgcagaccaggacgacgaggaaggagtggtaaaatttcagccttccctttggccttgggactcagtgaggaacaatttgagaagtgccctgacagagatgtgtgttctctatgatgttctcagtattgttagggataaaaaatttatgactcttgatcctgtctctcaggatgcacttcctccaaaacagaatcctcagacgttgcaattgatatctaaaaagaagtcacttgctggagcagcacaaatcttattgaagggggcagaaagactgactaaatcagttaccgaaaaccaagaaaacaagctacaaagagacttcaattctgagcttttgcgattacggcaacactggaaacttcgaaaagttggagataaaattctcggagatctgagctacagaagtgcaggatctctctttcctcatcatggtacatttgaagtaataaagaatacagatctcgatctggataaaaagatacctgaagattactgtcctcttgatgtccaaattcctagtgatttagaggggtctgcatatatcaaggtttcaatacaaaaacaggctccagatataggtgacctcggcacagttaacctcttcaaacgacctttgcccaaatccaaaccaggttccccacattggcagacaaaattagaagcggcacagaatgttctcttatgtaaagaaatttttgcacagctctctcgggaagctgttcaaattaaatcacaagtccctcacattgtggtgaaaaaccagattatctctcagccctttccgagcttgcagttatctatttctttgtgccattcctcaaatgataagaaatcccaaaaatttgctactgagaagcaatgtccggaggaccacctttatgtcctagagcataatttgcatctactgattagagagtttcataaacagaccttgagttccatcatgatgcctcatccagcaagtgcaccttttggccacaagagaatgagactttcgggtcctcaagcttttgataaaaatgaaattaattcattacagtccagtgaagggcttctggaaaaaataattaaacaagcaaagcatatttttctaaggagtagagctgctgcaaccattgacagcttagcaagccgaattgaggatcctcagatacaggctcattggtcaaatatcaatgatgtttatgaatctagtgtgaaagttttaatcacatcacaaggctatgaacaaatatgcaagtccattcaactgcaattgaatattggagttgagcagattcgagttgtacatagagatggaagagtaattacactgtcttatcaggagcaggagctacaggattttcttctgtctcagatgtcacagcaccaggtacatgcagttcagcaactcgccaaggttatgggctggcaagtactgagcttcagtaatcatgtgggacttggacctatagagagcattggtaatgcatctgccatcacggtggcctccccaagtggtgactatgctatttcagttcgtaatggacctgaaagtggcagcaagattatggttcagtttcctcgtaaccaatgtaaagaccttccaaaaagtgatgttttacaagataacaaatggagtcatcttcgtgggccattcaaagaagttcagtggaataaaatggaaggtcgaaattttgtttataaaatggagctgcttatgtctgcacttagcccttgtctactatgattttttccagatgtttcctaaagaagtttccagaaactttgacttgaaatgtttgcagatcaactataagcacaaagaagagataacttccaaaagagtgctgtttttaaaaataataattaggaaatgtttatttagcactttcaaacttttcactttataaatgacaagtgctttgaaatgcagaagtttatgtacagttgtatatacagtatgacaagatgtaaaataatatgtttttcatgcagtttaaaatattactaacttaagggtttctatgtgctttttaaaatattccttctttgatgttgacatcaaataaagtatgtggtttaaaaaaatctccaaatacctttttttccccccaaatactttctaaactttttttttttgagatggtatctcactctgtagcccagtctggagtgcagtggtgtgatcatggttcactgcagtcttgacctcccaggcttaggtgatccttctgtctcagccttccgagtagctgggaccacaggcatgcacaaccacgcctggctaatttttgtattttttataaagacagggtttttccatgttgcccaggctggtttcgaactcggctcaagtgatctacctgcctctgcctcccaaagtgctaggattacaggcgtgagccaccatgcccagcctactctaaattattgataacctcttcctccagttgtctcctttaagctttcctgggtctaacctacataggtaatttaagaacatcctcagaaaggacagctgaaggcaataggaggcagattatctctttagggcgtcctcaagtttttttggtctgttctcccacttgattgacctcaccagttgagacacctagtgtatggctcatgcccagccttccacctgggattctccagcctccacccagcagccctggattgctttctccaattaaggcctttccatcagctctctgctttttcaaagcgaaaaaactaatggattagtgggttatcttttccaaggaacaggtttgcacttcttggaaaaagtgcctaaagtgtgcccattaatatgaggatagatttaggctcataagccttttggtaacactgaaagtagtatcatataggcaagctctccttataagtaaggctttcaatttttaaaacagacatcctgctttaacaatttgtaagatgactgtgcagtaataaaagtcctttgtatttcaaaaaaaaaaaaaaaaaaaaaaaaaaaaaaaaaaaaaaaaaaaaaaaaaaaaaaaaacaacaacacaacaacaacaagagggggcggggcgctccaaaataatacccccccgaggggggcaccaacggctatgactgaccagccacacgttgttgtaaaaaaaacgcggcccccacagtagagcgacgtacgattaaaaaacacaggcgaagccggcgccgggtttaaaacacacgcacgtgatgggagaaacaaacacctctggacaccctggggaagcaacaccaccactatgcggggggagaaaaatatagaggccaccacactcgag

SEQ ID NO: 301849 - DNA, 3598 bp, Homo sapiens
accggaagcgctctagggaaccctggagcttccgcgcctgcccagttttgctccgaaagacttaccgaggagggagcttgcggtgcgttctgggaaagttgctgggccagctcctttgtttccagtctgagcgttgcgttcggtttcccgagggtcttctgaggcaccgcggctgcgggcttctgagttcccggctctccgcagggaagcctcctcttcgtacctcgttttttggctcgtggggggtcctcccaccgctggccgacgcagccagcatgtccggggtgcgcgcagtgcggatcagcatcgaatcggcctgcgagaagcaggtccatgaggtgggcctggatggcaccgagacgtacctgcccccgctgtccatgtcgcagaatctggcgcgtctggcccagcggatagacttcagccagggttcgggctccgaggaggaggaggcggcggggaccgagggggacgcgcaggactggccgggcgccgggtccagcgcagaccaggacgacgaggaaggagtggtaaaatttcagccttccctttggccttgggactcagtgaggaacaatttgagaagtgccctgacagagatgtgtgttctctatgatgttctcagtattgttagggataaaaaatttatgactcttgatcctgtctctcaggatgcacttcctccaaaacagaatcctcagacgttgcaattgatatctaaaaagaagtcacttgctggagcagcacaaatcttattgaagggggcagaaagactgactaaatcagttaccgaaaaccaagaaaacaagctacaaagagacttcaattctgagcttttgcgattacggcaacactggaaacttcgaaaagttggagataaaattctcggagatctgagctacagaagtgcaggatctctctttcctcatcatggtacatttgaagtaataaagaatacagatctcgatctggataaaaagatacctgaagattactgtcctcttgatgtccaaattcctagtgatttagaggggtctgcatatatcaaggtttcaatacaaaaacaggctccagatataggtgacctcggcacagttaacctcttcaaacgacctttgcccaaatccaaaccaggttccccacattggcagacaaaattagaagcggcacagaatgttctcttatgtaaagaaatttttgcacagctctctcgggaagctgttcaaattaaatcacaagtccctcacattgtggtgaaaaaccagattatctctcagccctttccgagcttgcagttatctatttctttgtgccattcctcaaatgataagaaatcccaaaaatttgctactgagaagcaatgtccggaggaccacctttatgtcctagagcataatttgcatctactgattagagagtttcataaacagaccttgagttccatcatgatgcctcatccagcaagtgcaccttttggccacaagagaatgagactttcgggtcctcaagcttttgataaaaatgaaattaattcattacagtccagtgaagggcttctggaaaaaataattaaacaagcaaagcatatttttctaaggagtagagctgctgcaaccattgacagcttagcaagccgaattgaggatcctcagatacaggctcattggtcaaatatcaatgatgtttatgaatctagtgtgaaagttttaatcacatcacaaggctatgaacaaatatgcaagtccattcaactgcaattgaatattggagttgagcagattcgagttgtacatagagatggaagagtaattacactgtcttatcaggagcaggagctacaggattttcttctgtctcagatgtcacagcaccaggtacatgcagttcagcaactcgccaaggttatgggctggcaagtactgagcttcagtaatcatgtgggacttggacctatagagagcattggtaatgcatctgccatcacggtggcctccccaagtggtgactatgctatttcagttcgtaatggacctgaaagtggcagcaagattatggttcagtttcctcgtaaccaatgtaaagaccttccaaaaagtgatgttttacaagataacaaatggagtcatcttcgtgggccattcaaagaagttcagtggaataaaatggaaggtcgaaattttgtttataaaatggagctgcttatgtctgcacttagcccttgtctactatgattttttccagatgtttcctaaagaagtttccagaaactttgacttgaaatgtttgcagatcaactataagcacaaagaagagataacttccaaaagagtgctgtttttaaaaataataattaggaaatgtttatttagcactttcaaacttttcactttataaatgacaagtgctttgaaatgcagaagtttatgtacagttgtatatacagtatgacaagatgtaaaataatatgtttttcatgcagtttaaaatattactaacttaagggtttctatgtgctttttaaaatattccttctttgatgttgacatcaaataaagtatgtggtttaaaaaaatctccaaatacctttttttccccccaaatactttctaaactttttttttttgagatggtatctcactctgtagcccagtctggagtgcagtggtgtgatcatggttcactgcagtcttgacctcccaggcttaggtgatccttctgtctcagccttccgagtagctgggaccacaggcatgcacaaccacgcctggctaatttttgtattttttataaagacagggtttttccatgttgcccaggctggtttcgaactcggctcaagtgatctacctgcctctgcctcccaaagtgctaggattacaggcgtgagccaccatgcccagcctactctaaattattgataacctcttcctccagttgtctcctttaagctttcctgggtctaacctacataggtaatttaagaacatcctcagaaaggacagctgaaggcaataggaggcagattatctctttagggcgtcctcaagtttttttggtctgttctcccacttgattgacctcaccagttgagacacctagtgtatggctcatgcccagccttccacctgggattctccagcctccacccagcagccctggattgctttctccaattaaggcctttccatcagctctctgctttttcaaagcgaaaaaactaatggattagtgggttatcttttccaaggaacaggtttgcacttcttggaaaaagtgcctaaagtgtgcccattaatatgaggatagatttaggctcataagccttttggtaacactgaaagtagtatcatataggcaagctctccttataagtaaggctttcaatttttaaaacagacatcctgctttaacaatttgtaagatgactgtgcagtaataaaagtcctttgtatttctccaccgtgttttcattaaagaaaaatggagcttgtgggccacgatagaacaactttgtgcttttttccccttctgatcaagatcttgcatctttctatccatggaaattaaaataattggtatgaatttgcagttatttaaa

SEQ ID NO: 301850 - DNA, 2797 bp, Homo sapiens
  misc_feature (2576)..(2576): n is a, c, g, or t
accggaagcgctctagggaaccctggagcttccgcgcctgcccagttttgctccgaaagacttaccgaggagggagcttgcggtgcgttctgggaaagttgctgggccagctcctttgtttccagtctgagcgttgcgttcggtttcccgagggtcttctgaggcaccgcggctgcgggcttctgagttcccggctctccgcagggaagcctcctcttcgtacctcgttttttggctcgtggggggtcctcccaccgctggccgacgcagccagcatgtccggggtgcgcgcagtgcggatcagcatcgaatcggcctgcgagaagcaggtccatgaggtgggcctggatggcaccgagacgtacctgcccccgctgtccatgtcgcagaatctggcgcgtctggcccagcggatagacttcagccagggttcgggctccgaggaggaggaggcggcggggaccgagggggacgcgcaggactggccgggcgccgggtccagcgcagaccaggacgacgaggaaggagtggtaaaatttcagccttccctttggccttgggactcagtgaggaacaatttgagaagtgccctgacagagatgtgtgttctctatgatgttctcagtattgttagggataaaaaatttatgactcttgatcctgtctctcaggatgcacttcctccaaaacagaatcctcagacgttgcaattgatatctaaaaagaagtcacttgctggagcagcacaaatcttattgaagggggcagaaagactgactaaatcagttaccgaaaaccaagaaaacaagctacaaagagacttcaattctgagcttttgcgattacggcaacactggaaacttcgaaaagttggagataaaattctcggagatctgagctacagaagtgcaggatctctctttcctcatcatggtacatttgaagtaataaagaatacagatctcgatctggataaaaagatacctgaagattactgtcctcttgatgtccaaattcctagtgatttagaggggtctgcatatatcaaggtttcaatacaaaaacaggctccagatataggtgacctcggcacagttaacctcttcaaacgacctttgcccaaatccaaaccaggttccccacattggcagacaaaattagaagcggcacagaatgttctcttatgtaaagaaatttttgcacagctctctcgggaagctgttcaaattaaatcacaagtccctcacattgtggtgaaaaaccagattatctctcagccctttccgagcttgcagttatctatttctttgtgccattcctcaaatgataagaaatcccaaaaatttgctactgagaagcaatgtccggaggaccacctttatgtcctagagcataatttgcatctactgattagagagtttcataaacagaccttgagttccatcatgatgcctcatccagcaagtgcaccttttggccacaagagaatgagactttcgggtcctcaagcttttgataaaaatgaaattaattcattacagtccagtgaagggcttctggaaaaaataattaaacaagcaaagcatatttttctaaggagtagagctgctgcaaccattgacagcttagcaagccgaattgaggatcctcagatacaggctcattggtcaaatatcaatgatgtttatgaatctagtgtgaaagttttaatcacatcacaaggctatgaacaaatatgcaagtccattcaactgcaattgaatattggagttgagcagattcgagttgtacatagagatggaagagtaattacactgtcttatcaggagcaggagctacaggattttcttctgtctcagatgtcacagcaccaggtacatgcagttcagcaactcgccaaggttatgggctggcaagtactgagcttcagtaatcatgtgggacttggacctatagagagcattggtaatgcatctgccatcacggtggcctccccaagtggtgactatgctatttcagttcgtaatggacctgaaagtggcagcaagattatggttcagtttcctcgtaaccaatgtaaagaccttccaaaaagtgatgttttacaagataacaaatggagtcatcttcgtgggccattcaaagaagttcagtggaataaaatggaaggtcgaaattttgtttataaaatggagctgcttatgtctgcacttagcccttgtctactatgattttttccagatgtttcctaaagaagtttccagaaactttgacttgaaatgtttgcagatcaactataagcacaaagaagagataacttccaaaagagtgctgtttttaaaaataataattaggaaatgtttatttagcactttcaaacttttcactttataaatgacaagtgctttgaaatgcagaagtttatgtacagttgtatatacagtatgacaagatgtaaaataatatgtttttcatgcagtttaaaatattactaacttaagggtttctatgtgctttttaaaatattccttctttgatgttgacatcaaataaagtatgtggtttaaaaaaaaaanagaatctgatgtgttttcctctaaccgctcctggagtctagtctcgctcggattttcggcatacgctttggccttctcccaacttatttgcgcccatgttctctcctccctccctacggcgggcggcagcccctgcgcccgcccctccctgataaggattatccgtccctcacccccctgtttggcgacttgtggccccgcggatccccctcctctcaccc

SEQ ID NO: 301851 - DNA, 1632 bp, Homo sapiens
ccaggctagagtgcaatggcgcagtctcggctcaccgcaacgtctacctcccaggttcaagcgattctcctgcctcagcctcccgagtagctgggattacaggcatgcgccaccattcctggctaattttgtatttttagtagagatggggtttctccatgttggtcaggctggtctcgaacacccaacctcaggttccccacattggcagacaaaattagaagcggcacagaatgttctcttatgtaaagaaatttttgcacagctctctcgggaagctgttcaaattaaatcacaagtccctcacattgtggtgaaaaaccagattatctctcagccctttccgagcttgcagttatctatttctttgtgccattcctcaaatgataagaaatcccaaaaatttgctactgagaagcaatgtccggaggaccacctttatgtcctagagcataatttgcatctactgattagagagtttcataaacagaccttgagttccatcatgatgcctcatccagcaagtgcaccttttggccacaagagaatgagactttcgggtcctcaagcttttgataaaaatgaaattaattcattacagtccagtgaagggcttctggaaaaaataattaaacaagcaaagcatatttttctaaggagtagagctgctgcaaccattgacagcttagcaagccgaattgaggatcctcagatacaggctcattggtcaaatatcaatgatgtttatgaatctagtgtgaaagttttaatcacatcacaaggctatgaacaaatatgcaagtccattcaactgcaattgaatattggagttgagcagattcgagttgtacatagagatggaagagtaattacactgtcttatcaggagcaggagctacaggattttcttctgtctcagatgtcacagcaccaggtacatgcagttcagcaactcgccaaggttatgggctggcaagtactgagcttcagtaatcatgtgggacttggacctatagagagcattggtaatgcatctgccatcacggtggcctccccaagtggtgactatgctatttcagttcgtaatggacctgaaagtggcagcaagattatggttcagtttcctcgtaaccaatgtaaagaccttccaaaaagtgatgttttacaagataacaaatggagtcatcttcgtgggccattcaaagaagttcagtggaataaaatggaaggtcgaaattttgtttataaaatggagctgcttatgtctgcacttagcccttgtctactatgattttttccagatgtttcctaaagaagtttccagaaactttgacttgaaatgtttgcagatcaactataagcacaaagaagagataacttccaaaagagtgctgtttttaaaaataataattaggaaatgtttatttagcactttcaaacttttcactttataaatgacaagtgctttgaaatgcagaagtttatgtacagttgtatatacagtatgacaagatgtaaaataatatgtttttcatgcagtttaaaatattactaacttaagggtttctatgtgctttttaaaatattccttctttgatgttgacatcaaataaagtatgtggtttaaaaaaa

SEQ ID NO: 301852 - DNA, 1412 bp, Homo sapiens
  misc_feature (23)..(23): n is a, c, g, or t
  misc_feature (72)..(72): n is a, c, g, or t
attggaacgatacagagaagatnagcatggcccctgcgcaaggatgacacgcaaattcgtgaagcgttccanatttctttccatatttcaggttatttacatatgtcctccttctttttataaataggcttgcagttatctatttctttgtgccattcctcaaatgataagaaatcccaaaaatttgctactgagaagcaatgtccggaggaccacctttatgtcctagagcataatttgcatctactgattagagagtttcataaacagaccttgagttccatcatgatgcctcatccagcaagtgcaccttttggccacaagagaatgagactttcgggtcctcaagcttttgataaaaatgaaattaattcattacagtccagtgaagggcttctggaaaaaataattaaacaagcaaagcatatttttctaaggagtagagctgctgcaaccattgacagcttagcaagccgaattgaggatcctcagatacaggctcattggtcaaatatcaatgatgtttatgaatctagtgtgaaagttttaatcacatcacaaggctatgaacaaatatgcaagtccattcaactgcaattgaatattggagttgagcagattcgagttgtacatagagatggaagagtaattacactgtcttatcaggagcaggagctacaggattttcttctgtctcagatgtcacagcaccaggtacatgcagttcagcaactcgccaaggttatgggctggcaagtactgagcttcagtaatcatgtgggacttggacctatagagagcattggtaatgcatctgccatcacggtggcctccccaagtggtgactatgctatttcagttcgtaatggacctgaaagtggcagcaagattatggttcagtttcctcgtaaccaatgtaaagaccttccaaaaagtgatgttttacaagataacaaatggagtcatcttcgtgggccattcaaagaagttcagtggaataaaatggaaggtcgaaattttgtttataaaatggagctgcttatgtctgcacttagcccttgtctactatgattttttccagatgtttcctaaagaagtttccagaaactttgacttgaaatgtttgcagatcaactataagcacaaagaagagataacttccaaaagagtgctgtttttaaaaataataattaggaaatgtttatttagcactttcaaacttttcactttataaatgacaagtgctttgaaatgcagaagtttatgtacagttgtatatacagtatgacaagatgtaaaataatatgtttttcatgcagtttaaaatattactaacttaagggtttctatgtgctttttaaaatattccttctttgatgttgacatcaaataaagtatgtggtttaaaaaaa

SEQ ID NO: 301853 - DNA, 1463 bp, Homo sapiens
ggagtataaggatttgattgtgcaaaaaatctctagcttctcttgaatatgattataatttcattacagtaatgggtctagatgtgggtgtgtcccaagtcatttgttaccagggatcaagtactgacatttatgaatgatttatattaggtttataccgtagaatatcgaatatccttctcactcatttcctgataagcttttctgagtggaagaaaatgaatagagttaaagggaataaacccatcatgaatcatgataatcaggggtgtgtgatgagagtgtattgtaatgtcaagctgagaacctacacattcaagcagtatgaaagggttcttagagctacctctgcctttatttaaagtctgcctacacatagtggtagtttaaaaaagtagttagttttaaaattttcataaaattttcgaatcatttatattcctatcattttgtatggtgacttaaaaagttttttaacttcttgtatttaaaagagctgctgcaaccattgacagcttagcaagccgaattgaggatcctcagatacaggctcattggtcaaatatcaatgatgtttatgaatctagtgtgaaagttttaatcacatcacaaggctatgaacaaatatgcaagtccattcaactgcaattgaatattggagttgagcagattcgagttgtacatagagatggaagagtaattacactgtcttatcaggagcaggagctacaggattttcttctgtctcagatgtcacagcaccaggtacatgcagttcagcaactcgccaaggttatgggctggcaagtactgagcttcagtaatcatgtgggacttggacctatagagagcattggtaatgcatctgccatcacggtggcctccccaagtggtgactatgctatttcagttcgtaatggacctgaaagtggcagcaagattatggttcagtttcctcgtaaccaatgtaaagaccttccaaaaagtgatgttttacaagataacaaatggagtcatcttcgtgggccattcaaagaagttcagtggaataaaatggaaggtcgaaattttgtttataaaatggagctgcttatgtctgcacttagcccttgtctactatgattttttccagatgtttcctaaagaagtttccagaaactttgacttgaaatgtttgcagatcaactataagcacaaagaagagataacttccaaaagagtgctgtttttaaaaataataattaggaaatgtttatttagcactttcaaacttttcactttataaatgacaagtgctttgaaatgcagaagtttatgtacagttgtatatacagtatgacaagatgtaaaataatatgtttttcatgcagtttaaaatattactaacttaagggtttctatgtgctttttaaaatattccttctttgatgttgacatcaaataaagtatgtggtttaaaaaaa

SEQ ID NO: 301854 - DNA, 854 bp, Homo sapiens
caggaggattcctcagacctaagatagggttgctgtagtagtcagtgagcaccccaacaaaagtttacttcatggtcgtgatgttaagtcactgcagatatctctgctgactgtcagtcaagtgtcctttttcattcacagatgtcacagcaccaggtacatgcagttcagcaactcgccaaggttatgggctggcaagtactgagcttcagtaatcatgtgggacttggacctatagagagcattggtaatgcatctgccatcacggtggcctccccaagtggtgactatgctatttcagttcgtaatggacctgaaagtggcagcaagattatggttcagtttcctcgtaaccaatgtaaagaccttccaaaaagtgatgttttacaagataacaaatggagtcatcttcgtgggccattcaaagaagttcagtggaataaaatggaaggtcgaaattttgtttataaaatggagctgcttatgtctgcacttagcccttgtctactatgattttttccagatgtttcctaaagaagtttccagaaactttgacttgaaatgtttgcagatcaactataagcacaaagaagagataacttccaaaagagtgctgtttttaaaaataataattaggaaatgtttatttagcactttcaaacttttcactttataaatgacaagtgctttgaaatgcagaagtttatgtacagttgtatatacagtatgacaagatgtaaaataatatgtttttcatgcagtttaaaatattactaacttaagggtttctatgtgctttttaaaatattccttctttgatgttgacatcaaataaagtatgtggtttaaaaaaa

SEQ ID NO: 301855 - DNA, 1108 bp, Homo sapiens
gccgaggcaggaagatcatctgaggttaggagtttgagaccagcctggccaacatggcaaaaccccgtctctactaaaaatacaaaaattagctgggtatgacgatgggcacctgtaatcccagcactttggggggctgaggtgggaggattgcttgagcccaggagtttgagaccagccctggcaacatagagagaccttgtctttaaccgcctcccaaaaaaagctttgtgtttttcagtgctgcatgtggaaacaaacaaaaagatgatttcctgaaattatagaggacatttgacattcctaggtcaaaactcaccttgcttaatctttgtggtacaaataataattcatgaatatttataccatcctcttatatagaagttagagtttttctcttgcatgttgaaactgaaaaagcactttttttacaagaatatttaagttggtagacaaagtttttgtattcacagtagaatggagttgtgggatttatccttgttatttctagtttggtaaactagagtgtattgatattttggtttttctccacagttcgtaatggacctgaaagtggcagcaagattatggttcagtttcctcgtaaccaatgtaaagaccttccaaaaagtgatgttttacaagataacaaatggagtcatcttcgtgggccattcaaagaagttcagtggaataaaatggaaggtcgaaattttgtttataaaatggagctgcttatgtctgcacttagcccttgtctactatgattttttccagatgtttcctaaagaagtttccagaaactttgacttgaaatgtttgcagatcaactataagcacaaagaagagataacttccaaaagagtgctgtttttaaaaataataattaggaaatgtttatttagcactttcaaacttttcactttataaatgacaagtgctttgaaatgcagaagtttatgtacagttgtatatacagtatgacaagatgtaaaataatatgtttttcatgcagtttaaaatattactaacttaagggtttctatgtgctttttaaaatattccttctttgatgttgacatcaaataaagtatgtggtttaaaaaaa

SEQ ID NO: 301856 - DNA, 1131 bp, Homo sapiens
cgtctgtaatcccagcactttcggaggccggggcaggcagatcacgaggtcaggagatcaagaccatcctgactaacatggtgaaaccccgtctctactaaaaatacaaaaaattagctgggcgtggtggtggacctgtaatcccagcactttggggggctgaggtgggaggattgcttgagcccaggagtttgagaccagccctggcaacatagagagaccttgtctttaaccgcctcccaaaaaaagctttgtgtttttcagtgctgcatgtggaaacaaacaaaaagatgatttcctgaaattatagaggacatttgacattcctaggtcaaaactcaccttgcttaatctttgtggtacaaataataattcatgaatatttataccatcctcttatatagaagttagagtttttctcttgcatgttgaaactgaaaaagcactttttttacaagaatatttaagttggtagacaaagtttttgtattcacagtagaatggagttgtgggatttatccttgttatttctagtttggtaaactagagtgtattgatattttggtttttctccacagttcgtaatggacctgaaagtggcagcaagattatggttcagtttcctcgtaaccaatgtaaagaccttccaaaaagtgatgttttacaagataacaaatggagtcatcttcgtgggccattcaaagaagttcagtggaataaaatggaaggtcgaaattttgtttataaaatggagctgcttatgtctgcacttagcccttgtctactatgattttttccagatgtttcctaaagaagtttccagaaactttgacttgaaatgtttgcagatcaactataagcacaaagaagagataacttccaaaagagtgctgtttttaaaaataataattaggaaatgtttatttagcactttcaaacttttcactttataaatgacaagtgctttgaaatgcagaagtttatgtacagttgtatatacagtatgacaagatgtaaaataatatgtttttcatgcagtttaaaatattactaacttaagggtttctatgtgctttttaaaatattccttctttgatgttgacatcaaataaagtatgtggtttaaaaaaa

SEQ ID NO: 301857 - DNA, 333 bp, Homo sapiens
tcgccaaggttatgggctggcaagtactgagcttcagtaatcatgtgggacttggacctatagagagcattggtaatgcatctgccatcacggtggcctccccaagtggtgactatgctatttcaggtactttctgctgctttgaatgagaagggaccattgggagtttggctttaacatttagttttaataattaaatatgggtaagagtaatttatctctgcaataaattagttaatgttgtatttacaccgaatgtttatttgatcatagctattatgcagagcaagagattattatttctctttctagtaattataataaatgtttaga

SEQ ID NO: 301858 - DNA, 608 bp, Homo sapiens
tagagactgaataggaaaaaaaagaatataccgtaatgtagtgttttcctaaacttttgtcatatgtattcagatcaccatttaaactagttaatgcataatatggttagataattgatacatatatttcttgtctttcaggttccccacattggcagacaaaattagaagcggcacagaatgttctcttatgtaaagaaatttttgcacagctctctcgggaagctgttcaaattaaatcacaagtccctcacattgtggtgaaaaaccagattatctctcagccctttccgagtaagagcagccctttttcgactttatgaacaggactttgtgttttgggggactaggacagagaaggtagctcttagggtgtattgggagaataatgagagcaaagaaatagtgtgctatccatagtgacagccagtaaagcatgtaacacaaactatactgtggaatctgttctgtcctaaatagtgtgacccttggatttttaagctacatattaaaaatttgcacttatgtagtcattattgtggtcaagagaaaagaaaatttgcactagcatagctatagttatttagcaacagttgctttgagggaga

SEQ ID NO: 301859 - DNA, 687 bp, Homo sapiens
tagtgtaaaataaaatcgagcaatacagtcttaactgttgtggccttttttgatcataagagttggtactgtttaaggccaaaagtaacagtttttatagatcttttagtttcaactcagcttttacaataaaaaggatttgtattgcattgagtttataaacttttggtttgtgaacttcatatttgatcttttctcttccaatcaaatgtctaggcttgtttgacttccacccccaatggtttttcactctttttatttacttcattttcctttaataacttaatctcttcatgttcagtttttacttcactctttattcttttctttgattatggtatgcttatttggaaagtcagtgaaactgtcaaaatgttatctcaataagatacttatatgagaactacaatcaccgaatctactgtattcaatattagcagatctaatttgataaacaacatggcttgtgtgaaaactgagcaggtgtttgtttacccatagtgttctgtgtagttattgcttagtctgcagaaaataatgacttagatgagatgtctgacttgctttcacttattaaacatgttcaccatgggatgatgtctgtaacatcagatattgttcaactagactaggatttaataaaaattgtgaaagcttactggcctaacattttattttataatattg

SEQ ID NO: 301860 - DNA, 354 bp, Homo sapiens
accgaatctactgtattcaatattagcagatctaatttgataaacaacatggcttgtgtgaaaactgagcaggtgtttgtttacccatagtgttctgtgtagttattgcttagtctgcagaaaataatgacttagatgagatgtctgacttgctttcacttattaaacatgttcaccatgggatgatgtctgtaacatcagatattgttcaactagactaggatttaataaaaattgtgaaagcttactggcctaacattttattttataatattgagtatgaattatatgtagccagagatgtcaataaggcttactgtcggtaggtaatatggttagtttgtagggaaaaga

SEQ ID NO: 301861 - DNA, 1132 bp, Homo sapiens
cagccctgctgagcgaccccgccagtcgggtccatcctgcagtaaatgcacaacccggacggaagtgcctctccgacagcagatccaggctcggagctccagacgctgggacaggccgcccgcagaccacccccgccgcgcgcgggacacgacgccccccgcaggacccgcccatcagcccggaaacccctgagctgcttctcccggaggccgatgcccacccgggagcccccaaagactcgcggctcccgggggcacctgcatactcacccgcctgggcctgggcccccgctgcagggactggcgccccgaggcctcaaaaccagcgccccccgccctccgtgccagccccagccgggaccccacaaggcaaagaccaagaagattgtgtttgaggatgagttgctctcccaggccctcctgggcgccaagaagcctattggagccatccctaaggggcataagcctaggccccacccagtgcccgactatgagcttaagtacccgccagtgagcagtgagagggaacggagccgctatgtcgcagtgttccaggaccagtacggagagttcttggagctccagcacgaggtggggtgtgcacaggcaaagctcaggcagctggaggccctgctgagctccctgcccccaccccaaagccagaaggaggcccaagttgcagcccgggtttggagggagtttgagatgaagcgaatggatcctggcttcctggacaagcaggctcgctgccactacctgaagggtaaactgaggcatctcaagactcagatccagaaattcgatgaccaaggagacagcgagggctccgtgtacttctaagtgcccctgcagatgggcagagggatgcatggggatgcaggtcccttgcatttcttggtatctctcagcttttcctcttgcagctccccctaccaggggtcgctttctcctggattgcaaatgcctcttcagtttggactcagctctgacagcccctcctccaggaaggccttccaggacttcctcctctgggtcctctagctctgaccctacagggactccagatctcaacctgttccctggaagtagggcctgctctccatcccagtgaaataaacatgtattagacaca

SEQ ID NO: 301862 - DNA, 521 bp, Homo sapiens
gtatacatcgatatgctcctacattttaaataaaaaaaaaaaaaaggcttattaggaacgtccagttgccgtccgggtttggacggagtttgagatgaagcgaatggatcctggcttcctggacaagcaggctcgctgccactacctgaagggtaaactgaggcatctcaagactcagatccagaaattcgatgaccaaggagacagcgagggctccgtgtacttctaagtgcccctgcagatgggcagagggatgcatggggatgcaggtcccttgcatttcttggtatctctcagcttttcctcttgcagctccccctaccaggggtcgctttctcctggattgcaaatgcctcttcagtttggactcagctctgacagcccctcctccaggaaggccttccaggacttcctcctctgggtcctctagctctgaccctacagggactccagatctcaacctgttccctggaagtagggcctgctctccatcccagtgaaataaacatgtattagacaca

SEQ ID NO: 301863 - DNA, 401 bp, Homo sapiens
agtgggccacttttggtaagcagtaaatgcacaacccggacggaagtgcctctcctccagcacgaggtggggtgtgcacaggcaaagctcaggcagctggaggccctgctgagctccctgcccccaccccaaagccagaaggaggcccaagttgcagcccgggtttggagggagtttgagatgaagcgaatgctccccctaccaggggtcgctttctcctggattgcaaatgcctcttcagtttggactcagctctgacagcccctcctccaggaaggccttccaggacttcctcctctgggtcctctagctctgaccctacagggactccagatctcaacctgttccctggaagtagggcctgctctccatcccagtgaaataaacatgtattagacaca

SEQ ID NO: 301864 - DNA, 341 bp, Homo sapiens
  misc_feature (38)..(38): n is a, c, g, or t
gagggatagagtgggaaggtaagagaccacggagcagnagacctacaggcagcccagttgcacttgggtttggacggagtttgagatgaagcgaatgctccccctaccaggggtcgctttctcctggattgcaaatgcctcttcagtttggactcagctctgacagcccctcctccaggaaggccttccaggacttcctcctctgggtcctctagctctgaccctacagggactccagatctcaacctgttccctggaagtagggcctgctctccatcccagtgaaataaacatgtattagacacaaagaagaaaaaatgaatggccttctttggcctcat

SEQ ID NO: 301865 - DNA, 1256 bp, Homo sapiens
cagccctgctgagcgaccccgccagtcgggtccatcctgcagtaaatgcacaacccggacggaagtgcctctccgacagcagatccaggctcggagctccagacgctgggacaggccgcccgcagaccacccccgccgcgcgcgggacacgacgccccccgcaggacccgcccatcagcccggaaacccctgagctgcttctcccggaggccgatgcccacccgggagcccccaaagactcgcggctcccgggggcacctgcatactcacccgcctgggcctgggcccccggtgagcctgaccgggagggggtccccaggccgggcctctaggcaaaagatttagcccctccagtttgagggactccggtttcccgacaccccgatttaactccagaccacgattcctgtggcagctgcagggactggcgccccgaggcctcaaaaccagcgccccccgccctccgtgccagccccagccgggaccccacaaggcaaagaccaagaagattgtgtttgaggatgagttgctctcccaggccctcctgggcgccaagaagcctattggagccatccctaaggggcataagcctaggccccacccagtgcccgactatgagcttaagtacccgccagtgagcagtgagagggaacggagccgctatgtcgcagtgttccaggaccagtacggagagttcttggagctccagcacgaggtggggtgtgcacaggcaaagctcaggcagctggaggccctgctgagctccctgcccccaccccaaagccagaaggaggcccaagttgcagcccgggtttggagggagtttgagatgaagcgaatggatcctggcttcctggacaagcaggctcgctgccactacctgaagggtaaactgaggcatctcaagactcagatccagaaattcgatgaccaaggagacagcgagggctccgtgtacttctaagtgcccctgcagatgggcagagggatgcatggggatgcaggtcccttgcatttcttggtatctctcagcttttcctcttgcagctccccctaccaggggtcgctttctcctggattgcaaatgcctcttcagtttggactcagctctgacagcccctcctccaggaaggccttccaggacttcctcctctgggtcctctagctctgaccctacagggactccagatctcaacctgttccctggaagtagggcctgctctccatcccagtgaaataaacatgtattagacaca

SEQ ID NO: 301866 - DNA, 1304 bp, Homo sapiens
ggacgtcgctgcggaccaatcgcgtgcgtctatgcaaatagcggtcgttctggggaactctgctcccgcggggtgagagttggccgctcttcggccgagctgcccgcgcgtcctttctccgtgcgcgtcgtcaggcgtgtcctctccgcgtgtccacccacagccgcccgcagaccacccccgccgcgcgcgggacacgacgccccccgcaggacccgcccatcagcccggaaacccctgagctgcttctcccggaggccgatgcccacccgggagcccccaaagactcgcggctcccgggggcacctgcatactcacccgcctgggcctgggcccccggtgagcctgaccgggagggggtccccaggccgggcctctaggcaaaagatttagcccctccagtttgagggactccggtttcccgacaccccgatttaactccagaccacgattcctgtggcagctgcagggactggcgccccgaggcctcaaaaccagcgccccccgccctccgtgccagccccagccgggaccccacaaggcaaagaccaagaagattgtgtttgaggatgagttgctctcccaggccctcctgggcgccaagaagcctattggagccatccctaaggggcataagcctaggccccacccagtgcccgactatgagcttaagtacccgccagtgagcagtgagagggaacggagccgctatgtcgcagtgttccaggaccagtacggagagttcttggagctccagcacgaggtggggtgtgcacaggcaaagctcaggcagctggaggccctgctgagctccctgcccccaccccaaagccagaaggaggcccaagttgcagcccgggtttggagggagtttgagatgaagcgaatggatcctggcttcctggacaagcaggctcgctgccactacctgaagggtaaactgaggcatctcaagactcagatccagaaattcgatgaccaaggagacagcgagggctccgtgtacttctaagtgcccctgcagatgggcagagggatgcatggggatgcaggtcccttgcatttcttggtatctctcagcttttcctcttgcagctccccctaccaggggtcgctttctcctggattgcaaatgcctcttcagtttggactcagctctgacagcccctcctccaggaaggccttccaggacttcctcctctgggtcctctagctctgaccctacagggactccagatctcaacctgttccctggaagtagggcctgctctccatcccagtgaaataaacatgtattagacaca

SEQ ID NO: 301867 - DNA, 1169 bp, Homo sapiens
cagccctgctgagcgaccccgccagtcgggtccatcctgcagtaaatgcacaacccggacggaagtgcctctccgacagcagatccaggctcggagctccagacgctgggacaggtgacccggggcggtagcgagccggacggccttgcaggccgcccgcagaccacccccgccgcgcgcgggacacgacgccccccgcaggacccgcccatcagcccggaaacccctgagctgcttctcccggaggccgatgcccacccgggagcccccaaagactcgcggctcccgggggcacctgcatactcacccgcctgggcctgggcccccgctgcagggactggcgccccgaggcctcaaaaccagcgccccccgccctccgtgccagccccagccgggaccccacaaggcaaagaccaagaagattgtgtttgaggatgagttgctctcccaggccctcctgggcgccaagaagcctattggagccatccctaaggggcataagcctaggccccacccagtgcccgactatgagcttaagtacccgccagtgagcagtgagagggaacggagccgctatgtcgcagtgttccaggaccagtacggagagttcttggagctccagcacgaggtggggtgtgcacaggcaaagctcaggcagctggaggccctgctgagctccctgcccccaccccaaagccagaaggaggcccaagttgcagcccgggtttggagggagtttgagatgaagcgaatggatcctggcttcctggacaagcaggctcgctgccactacctgaagggtaaactgaggcatctcaagactcagatccagaaattcgatgaccaaggagacagcgagggctccgtgtacttctaagtgcccctgcagatgggcagagggatgcatggggatgcaggtcccttgcatttcttggtatctctcagcttttcctcttgcagctccccctaccaggggtcgctttctcctggattgcaaatgcctcttcagtttggactcagctctgacagcccctcctccaggaaggccttccaggacttcctcctctgggtcctctagctctgaccctacagggactccagatctcaacctgttccctggaagtagggcctgctctccatcccagtgaaataaacatgtattagacaca

SEQ ID NO: 301868 - DNA, 1504 bp, Homo sapiens
cagccctgctgagcgaccccgccagtcgggtccatcctgcagtaaatgcacaacccggacggaagtgcctctccgacagcagatccaggctcggagctccagacgctgggacaggccgcccgcagaccacccccgccgcgcgcgggacacgacgccccccgcaggacccgcccatcagcccggaaacccctgagctgcttctcccggaggccgatgcccacccgggagcccccaaagactcgcggctcccgggggcacctgcatactcacccgcctgggcctgggcccccgctgcagggactggcgccccgaggcctcaaaaccagcgccccccgccctccgtgccagccccagccgggaccccacaaggcaaagaccaagaagattgtgtttgaggatgagttgctctcccaggccctcctgggcgccaagaagcctattggagccatccctaaggggcataagcctaggccccacccagtgcccgactatgagcttaagtacccgccagtgagcagtgagagggaacggagccgctatgtcgcagtgttccaggaccagtacggagagttcttggagctccagcacgaggtggggtgtgcacaggcaaagctcaggcagctggaggccctgctgagctccctgcccccaccccaaagccagaaggaggcccaagttgcagcccgggtttggagggagtttgagatgaagcgaatggcgggagtgcagtggtatgatctcagctcactgcaacctcagcgtcccgggttcaagcggttctcctgcctcagctgggatcacaggcgcccaccaccgtgcctggcaaatttttgtatttgtagtagagatggggtttcaccatgttggccaggctggtctcgaactcctgacctcaagtgatccgcccacctcggcctcccagactgctgggattacaggcatgagccaccttgcccggctcacccggtcgcctgtgcccagtttcaaggagagaaaattgaggctcggagaatgaaaggcagagagttaagcagcttgaaggccacagggcagactgctgcaaagacttccgggtctcgccctgcctaggatcctggcttcctggacaagcaggctcgctgccactacctgaagggtaaactgaggcatctcaagactcagatccagaaattcgatgaccaaggagacagcgagggctccgtgtacttctaagtgcccctgcagatgggcagagggatgcatggggatgcaggtcccttgcatttcttggtatctctcagcttttcctcttgcagctccccctaccaggggtcgctttctcctggattgcaaatgcctcttcagtttggactcagctctgacagcccctcctccaggaaggccttccaggacttcctcctctgggtcctctagctctgaccctacagggactccagatctcaacctgttccctggaagtagggcctgctctccatcccagtgaaataaacatgtattagacaca

SEQ ID NO: 301869 - DNA, 1749 bp, Homo sapiens
cagccctgctgagcgaccccgccagtcgggtccatcctgcagtaaatgcacaacccggacggaagtgcctctccgacagcagatccaggctcggagctccagacgctgggacaggccgcccgcagaccacccccgccgcgcgcgggacacgacgccccccgcaggacccgcccatcagcccggaaacccctgagctgcttctcccggaggccgatgcccacccgggagcccccaaagactcgcggctcccgggggcacctgcatactcacccgcctgggcctgggcccccggtgagcctgaccgggagggggtccccaggccgggcctctaggcaaaagatttagcccctccagtttgagggactccggtttcccgacaccccgatttaactccagaccacgattcctgtggcagctgcagggactggcgccccgaggcctcaaaaccagcgccccccgccctccgtgccagccccagccgggaccccacaaggcaaagaccaagaagattgtgtttgaggatgagttgctctcccaggccctcctgggcgccaagaagcctattggagccatccctaaggggcataagcctaggccccacccagtgcccgactatgagcttaagtacccgccagtgagcagtgagagggaacggagccgctatgtcgcagtgttccaggaccagtacggagagttcttggagctccagcacgaggtggggtgtgcacaggcaaagctcaggcagctggaggccctgctgagctccctgcccccaccccaaagccagaaggaggcccaagttgcagcccgggtttggagggagtttgagatgaagcgaatggtgagtcttgcatcccacagcttggtcttgcacccctgagacttctgtgaggctggggtgcctgtgcccagtttcttttttttttctttcttttgagacagaatctcgctctgtcacccaggcgggagtgcagtggtatgatctcagctcactgcaacctcagcgtcccgggttcaagcggttctcctgcctcagctgggatcacaggcgcccaccaccgtgcctggcaaatttttgtatttgtagtagagatggggtttcaccatgttggccaggctggtctcgaactcctgacctcaagtgatccgcccacctcggcctcccagactgctgggattacaggcatgagccaccttgcccggctcacccggtcgcctgtgcccagtttcaaggagagaaaattgaggctcggagaatgaaaggcagagagttaagcagcttgaaggccacagggcagactgctgcaaagacttccgggtctcgccctgcctaggatcctggcttcctggacaagcaggctcgctgccactacctgaagggtaaactgaggcatctcaagactcagatccagaaattcgatgaccaaggagacagcgagggctccgtgtacttctaagtgcccctgcagatgggcagagggatgcatggggatgcaggtcccttgcatttcttggtatctctcagcttttcctcttgcagctccccctaccaggggtcgctttctcctggattgcaaatgcctcttcagtttggactcagctctgacagcccctcctccaggaaggccttccaggacttcctcctctgggtcctctagctctgaccctacagggactccagatctcaacctgttccctggaagtagggcctgctctccatcccagtgaaataaacatgtattagacaca

SEQ ID NO: 301870 - DNA, 1292 bp, Homo sapiens
cagccctgctgagcgaccccgccagtcgggtccatcctgcagtaaatgcacaacccggacggaagtgcctctccgacagcagatccaggctcggagctccagacgctgggacaggccgcccgcagaccacccccgccgcgcgcgggacacgacgccccccgcaggacccgcccatcagcccggaaacccctgagctgcttctcccggaggccgatgcccacccgggagcccccaaagactcgcggctcccgggggcacctgcatactcacccgcctgggcctgggcccccggtgagcctgaccgggagggggtccccaggccgggcctctaggcaaaagatttagcccctccagtttgagggactccggtttcccgacaccccgatttaactccagaccacgattcctgtggcagctgcagggactggcgccccgaggcctcaaaaccagcgccccccgccctccgtgccagccccagccgggaccccacaaggcaaagaccaagaagattgtgtttgaggatgagttgctctcccaggccctcctgggcgccaagaagcctattggagccatccctaaggggcataagcctaggccccacccagtgcccgactatgagcttaagtacccgccagtgagcagtgagagggaacggagccgctatgtcgcagtgttccaggaccagtacggagagttcttggagctccagcacgaggtggggtgtgcacaggcaaagctcaggcagctggaggccctgctgagctccctgcccccaccccaaagccagaaggaggcccaagttgcagcccgggtttggagggagtttgagatgaagcgaatggatcctggcttcctggacaagcaggctcgctgccactacctgaagggtaaactgaggcatctcaagactcagatccagaaattcgatgaccaaggagacagcgagggctccgtgtacttctaagtgcccctgcagatgggcagagggatgcatggggatgcaggtcccttgcatttcttggtatctctcagcttttcctcttgcagctccccctaccaggggtcgctttctcctggattgcaaatgcctcttcagtttggactcagctctgacagcccctcctccaggaaggccttccaggacttcctcctctgggtcctctagctctgaccctacagggactccagatctcaacctgttccctggaagtagggcctgctctccatcccagtgaaataaacatgtattagacacaaaaaaaaactaaaattggctcgttggcctctcgggg

SEQ ID NO: 301871 - DNA, 926 bp, Homo sapiens
cagccctgctgagcgaccccgccagtcgggtccatcctgcagtaaatgcacaacccggacggaagtgcctctccgacagcagatccaggctcggagctccagacgctgggacaggccgcccgcagaccacccccgccgcgcgcgggacacgacgccccccgcaggacccgcccatcagcccggaaacccctgagctgcttctcccggaggccgatgcccacccgggagcccccaaagactcgcggctcccgggggcacctgcatactcacccgcctgggcctgggcccccgctgcagggactggcgccccgaggcctcaaaaccagcgccccccgccctccgtgccagccccagccgggaccccacaaggcaaagaccaagaagattgtgtttgaggatgagttgctctcccaggccctcctgggcgccaagaagcctattggagccatccctaaggggcataagcctaggccccacccagtgcccgactatgagcttaagtacccgccagtgagcagtgagagggaacggagccgctatgtcgcagtgttccaggaccagtacggagagttcttggagctccagcacgaggtggggtgtgcacaggcaaagctcaggcagctggaggccctgctgagctccctgcccccaccccaaagccagaaggaggcccaagttgcagcccgggtttggagggagtttgagatgaagcgaatgctccccctaccaggggtcgctttctcctggattgcaaatgcctcttcagtttggactcagctctgacagcccctcctccaggaaggccttccaggacttcctcctctgggtcctctagctctgaccctacagggactccagatctcaacctgttccctggaagtagggcctgctctccatcccagtgaaataaacatgtattagacaca

SEQ ID NO: 301872 - DNA, 1631 bp, Homo sapiens
ggacgtcgctgcggaccaatcgcgtgcgtctatgcaaatagcggtcgttctggggaactctgctcccgcggggtgagagttggccgctcttcggccgagctgcccgcgcgtcctttctccgtgcgcgtcgtcaggcgtgtcctctccgcgtgtccacccacagccgcccgcagaccacccccgccgcgcgcgggacacgacgccccccgcaggacccgcccatcagcccggaaacccctgagctgcttctcccggaggccgatgcccacccgggagcccccaaagactcgcggctcccgggggcacctgcatactcacccgcctgggcctgggcccccggtgagcctgaccgggagggggtccccaggccgggcctctaggcaaaagatttagcccctccagtttgagggactccggtttcccgacaccccgatttaactccagaccacgattcctgtggcagctgcagggactggcgccccgaggcctcaaaaccagcgccccccgccctccgtgccagccccagccgggaccccacaaggcaaagaccaagaagattgtgtttgaggatgagttgctctcccaggccctcctgggcgccaagaagcctattggagccatccctaaggggcataagcctaggccccacccagtgcccgactatgagctaaggaggcccaagttgcagcccgggtttggagggagtttgagatgaagcgaatggtgagtcttgcatcccacagcttggtcttgcacccctgagacttctgtgaggctggggtgcctgtgcccagtttcttttttttttctttcttttgagacagaatctcgctctgtcacccaggcgggagtgcagtggtatgatctcagctcactgcaacctcagcgtcccgggttcaagcggttctcctgcctcagctgggatcacaggcgcccaccaccgtgcctggcaaatttttgtatttgtagtagagatggggtttcaccatgttggccaggctggtctcgaactcctgacctcaagtgatccgcccacctcggcctcccagactgctgggattacaggcatgagccaccttgcccggctcacccggtcgcctgtgcccagtttcaaggagagaaaattgaggctcggagaatgaaaggcagagagttaagcagcttgaaggccacagggcagactgctgcaaagacttccgggtctcgccctgcctaggatcctggcttcctggacaagcaggctcgctgccactacctgaagggtaaactgaggcatctcaagactcagatccagaaattcgatgaccaaggagacagcgagggctccgtgtacttctaagtgcccctgcagatgggcagagggatgcatggggatgcaggtcccttgcatttcttggtatctctcagcttttcctcttgcagctccccctaccaggggtcgctttctcctggattgcaaatgcctcttcagtttggactcagctctgacagcccctcctccaggaaggccttccaggacttcctcctctgggtcctctagctctgaccctacagggactccagatctcaacctgttccctggaagtagggcctgctctccatcccagtgaaataaacatgtattagacaca

SEQ ID NO: 301873 - DNA, 1044 bp, Homo sapiens
cagccctgctgagcgaccccgccagtcgggtccatcctgcagtaaatgcacaacccggacggaagtgcctctccgacagcagatccaggctcggagctccagacgctgggacaggccgcccgcagaccacccccgccgcgcgcgggacacgacgccccccgcaggacccgcccatcagcccggaaacccctgagctgcttctcccggaggccgatgcccacccgggagcccccaaagactcgcggctcccgggggcacctgcatactcacccgcctgggcctgggcccccgctgcagggactggcgccccgaggcctcaaaaccagcgccccccgccctccgtgccagccccagccgggaccccacaaggcaaagaccaagaagattgtgtttgaggatgagttgctctcccaggccctcctgggcgccaagaagcctattggagccatccctaaggggcataagcctaggccccacccagtgcccgactatgagcttaagtacccgccagtgagcagtgagagggaacggagccgctatgtcgcagtgttccaggaccagtacggagagttcttggagctccagcacgaggtggggtgtgcacaggcaaagctcaggcagctggaggccctgctgagctccctgcccccaccccaaagccagaaggaggcccaagttgcagcccgggtttggagggagtttgagatgaagcgaatggatcctggcttcctggacaagcaggctcgctgccactacctgaagggtaaactgaggcatctcaagactcagatccagaaattcgatgaccaaggagacagcgagggctccgtgtactctccccctaccaggggtcgctttctcctggattgcaaatgcctcttcagtttggactcagctctgacagcccctcctccaggaaggccttccaggacttcctcctctgggtcctctagctctgaccctacagggactccagatctcaacctgttccctggaagtagggcctgctctccatcccagtgaaataaacatgtattagacaca

SEQ ID NO: 301874 - DNA, 1014 bp, Homo sapiens
cagccctgctgagcgaccccgccagtcgggtccatcctgcagtaaatgcacaacccggacggaagtgcctctccgacagcagatccaggctcggagctccagacgctgggacaggccgcccgcagaccacccccgccgcgcgcgggacacgacgccccccgcaggacccgcccatcagcccggaaacccctgagctgcttctcccggaggccgatgcccacccgggagcccccaaagactcgcggctcccgggggcacctgcatactcacccgcctgggcctgggcccccgctgcagggactggcgccccgaggcctcaaaaccagcgccccccgccctccgtgccagccccagccgggaccccacaaggcaaagaccaagaagattgtgtttgaggatgagttgctctcccaggccctcctgggcgccaagaagcctattggagccatccctaaggggcataagcctaggccccacccagtgcccgactatgagcttaagtacccgccagtgagcagtgagagggaacggagccgctatgtcgcagtgttccaggaccagtacggagagttcttggagctccagcacgaggtggggtgtgcacaggcaaagctcaggcagctggaggccctgctgagctccctgcccccaccccaaagccagaaggaggcccaagttgcagcccgggtttggagggagtttgagatgaagcgaatgtctaagtgcccctgcagatgggcagagggatgcatggggatgcaggtcccttgcatttcttggtatctctcagcttttcctcttgcagctccccctaccaggggtcgctttctcctggattgcaaatgcctcttcagtttggactcagctctgacagcccctcctccaggaaggccttccaggacttcctcctctgggtcctctagctctgaccctacagggactccagatctcaacctgttccctggaagtagggcctgctctccatcccagtgaaataaacatgtattagacaca

SEQ ID NO: 301875 - DNA, 961 bp, Homo sapiens
cagccctgctgagcgaccccgccagtcgggtccatcctgcagtaaatgcacaacccggacggaagtgcctctccgacagcagatccaggctcggagctccagacgctgggacaggccgcccgcagaccacccccgccgcgcgcgggacacgacgccccccgcaggacccgcccatcagcccggaaacccctgagctgcttctcccggaggccgatgcccacccgggagcccccaaagactcgcggctcccgggggcacctgcatactcacccgcctgggcctgggcccccgctgcagggactggcgccccgaggcctcaaaaccagcgccccccgccctccgtgccagccccagccgggaccccacaaggcaaagaccaagaagattgtgtttgaggatgagttgctctcccaggccctcctgggcgccaagaagcctattggagccatccctaaggggcataagcctaggccccacccagtgcccgactatgagcttaagtacccgccagtgagcagtgagagggaacggagccgctatgtcgcagtgttccaggaccagtacggagagttcttggagctccagcacgaggtggggtgtgcacaggcaaagctcaggcagctggaggccctgctgagctccctgcccccaccccaaagccagaaggaggcccaagttgcagcccgggtttggagggagtttgagatgaagcgaatgctccccctaccaggggtcgctttctcctggattgcaaatgcctcttcagtttggactcagctctgacagcccctcctccaggaaggccttccaggacttcctcctctgggtcctctagctctgaccctacagggactccagatctcaacctgttccctggaagtagggcctgctctccatcccagtgaaataaacatgtattagacacaaaaaaaaccaaaaaaatggctctcgttggcctcat

SEQ ID NO: 301876 - DNA, 932 bp, Homo sapiens
ggacgtcgctgcggaccaatcgcgtgcgtctatgcaaatagcggtcgttctggggaactctgctcccgcggggtgagagttggccgctcttcggccgagctgcccgcgcgtcctttctccgtgcgcgtcgtcaggcgtgtcctctccgcgtgtccacccacagccgcccgcagaccacccccgccgcgcgcgggacacgacgccccccgcaggacccgcccatcagcccggaaacccctgagctgcttctcccggaggccgatgcccacccgggagcccccaaagactcgcggctcccgggggcacctgcatactcacccgcctgggcctgggcccccggtgagcctgaccgggagggggtccccaggccgggcctctaggcaaaagatttagcccctccagtttgagggactccggtttcccgacaccccgatttaactccagaccacgattcctgtggcagctgcagggactggcgccccgaggcctcaaaaccagcgccccccgccctccgtgccagccccagccgggaccccacaaggcaaagaccaagaagattgtgtttgaggatgagttgctctcccaggccctcctgggcgccaagaagcctattggagccatccctaaggggcataagcctaggccccacccagtgcccgactatgagctaaggaggcccaagttgcagcccgggtttggagggagtttgagatgaagcgaatgctccccctaccaggggtcgctttctcctggattgcaaatgcctcttcagtttggactcagctctgacagcccctcctccaggaaggccttccaggacttcctcctctgggtcctctagctctgaccctacagggactccagatctcaacctgttccctggaagtagggcctgctctccatcccagtgaaataaacatgtattagacaca

SEQ ID NO: 301877 - DNA, 308 bp, Homo sapiens
  misc_feature (7)..(7): n is a, c, g, or t
  misc_feature (94)..(94): n is a, c, g, or t
  misc_feature (99)..(99): n is a, c, g, or t
  misc_feature (103)..(103): n is a, c, g, or t
  misc_feature (106)..(106): n is a, c, g, or t
gcacganctgtgttgtgtgtgcaccttctccgtgcttttcactatttaacaccatgatcatgtggaatacattagaaaggaaataggtcaaaanccatnatgnganccatctaatgtattccacatgatcatggtgttaaatagtgaaaagtactgtgttgtgtgtgcaccttctccgtgcatttattagactaaccagtcaagcagacagctcagttagggagaaaacaatactctgaaatttgaaggccaatctgttgttactaagctgtttatctctattgcctttttaaatgtctggataagtt

SEQ ID NO: 301878 - DNA, 3150 bp, Homo sapiens
ggcacgagggcagggagtgcgggtcggttctgcgtgcgctgccggacgaggctcccgccgccgattgacccgcgctccgcccgtagtcgggccgttctgttccaagagataaccattgggaccttggtagctaatgtccgaagaaagtgactctctgagaaccagcccttctgtggcctcactctctgaaaatgagctgccaccaccacctgagcctccgggctatgtgtgctcactgacagaagacctggtcaccaaagcccgggaagagctgcaggaaaagccggaatggagacttcgagatgtgcaggcccttcgtgacatggtgcggaaggagtaccccaacctgagcacatccctcgacgatgccttcctgctgcgcttcctccgagcccgcaagtttgattacgaccgggccctgcagctcctcgtcaactaccacagctgtagaagaagctggcccgaagtcttcaataacttgaagccatcagccttaaaagatgtccttgcttccgggttcctcaccgtgctgccccacactgaccccaggggctgccatgtcgtctgcatccgcccagacagatggataccaagcaactatccaattactgaaaacatccgagccatatacttgaccttagaaaaactcattcagtctgaagaaacccaggtgaatggaattgtaattcttgcagactacaaaggagtgagtttatcaaaagcatctcactttggcccttttatagccaaaaaggtgattggcatcctccaggatggtttccccattcggataaaagcagtccatgtggtgaatgaacctcgaatatttaaaggcatttttgccatcataaaaccatttctaaaggagaaaatagcaaacagattcttcctccatgggtctgacttgaactctctccacacaaaccttccaagaagcatcctccccaaggagtatgggggcacggctggggagctggacactgccacctggaacgcggtactgctggcttcagaagacgattttgtgaaagagttctgccaacctgttcctgcctgtgacagcatcctgggccagacgctgctgcccgagggcctgacctcagatgcacagtgtgacgactccttgcgagctgtgaagtcacagctgtactcctgctactagcccgtcccccagggtcaccatctttaattcttttccttcttttctttggagaggcacaaggagaatttaagggtccatggattcagtcttgctccttgtaattaaactgcaggatggaggaacagcctgagatatgagcatgagcccattttggggtaagcctttggttactttaattactccatggaagacatggaaaatgtccccactgattcttaaacatttggaatcccagtctgcaactattaatctggaggctatatctattttgttttgctttttggttggggggtggtgatctggttcttacacatcttggaagcaagaacaatcaggaccaaagtcactttgatcccacttttccaggagaaaaaccacctgtttggccagtgagaactacttgtatgaaataatttggccaaaccttcagtgtgaccaaatgtgagactgggagtttgtgtttttcacaggaaccctaagtatagacctctgctgctcatcaggaaacttactggagatgaaggccccagctgttgtcaccgggtttggaaagcaccttaactgaatcatgtaagcatcaggacataagcagcactttgtggtcaaatgtggaagccggagacttcaaagcacctctgggacccactggttgaagtttgcaatagaaacttaagttttcccaaatccataaagccttagccctggttctcaatagaatcagggacctagcaggaaatgattttactcaacctaaaatgctggatcccaggcccgtgtagctataagaattctggcctggatcccaggtgtacaactatggacaagatatgggcctctactttctcctctataaaatgaggctggatgaaatgtcagctagggccattttggctgctgaggctctgggatttggtttagttactgaatgttagattttctgcctagaaagataactatctagatacaagtggttggatcctgtttttgtttgtggtacatgtgtctttccaagagagatgtgtcaccaattagccctgcctttaaagaaactattatgtgtattcctgggactcactgacaccaattttctttttatagtgatggttcaattttgaaaagatggcttttgtgaggccaggttaaggtgaccaggatcttgtatgatgaattccttccatccctgagactctggtactatattgtaaacctggctacagtagttaattacttgagattctttaattttggtctctgagctgggcgtggtggttcatgcctgtaatcccagcactttgggaggccaaggtgtgcggatcacaaggtcaggagttcgagacccgcctggccaagatggtgaaaccccatctctactaaaaatacaaaaattagctgggcggtggtggcgggctcctgtagtcccagctactcgggaggctgaggcagaagaatcacgtgaacccaggaggcagaagtggcagtgagccaagatcgcaccactgcactccagcctgggcgacagagcaagactctgcctcaaaaaaaaaaaaaaaaaaaaaaaatttttttttttttggtctctggaaatgaacacaagggcaggttattcctgggtcacttctgggcccccctgccctcccagccccacttgagtttctctctctggtgtgggtgaaccagtcagcctgaatgttctgcatttcagcactttagaacctccctgtgaagattttagccttagcccaaacatcaaattagatggttcacatgatggtttttgacctatttcctttctaatgtattccacatgatcatggtgttaaatagtgaaaagtactgtgttgtgtgtgcaccttctccgtgcatttattagactaaccagtcaagcagacagctcagttagggagaaaacaatactctgaaatttgaaggccaatctgttgttactaagctgtttatctctattgcctttttaaatgtctggataagtt

SEQ ID NO: 301879 - DNA, 3024 bp, Homo sapiens
ggcacgagggcagggagtgcgggtcggttctgcgtgcgctgccggacgaggctcccgccgccgattgacccgcgctccgcccgtagtcgggccgggaccttggtagctaatgtccgaagaaagtgactctctgagaaccagcccttctgtggcctcactctctgaaaatgagctgccaccaccacctgagcctccgggctatgtgtgctcactgacagaagacctggtcaccaaagcccgggaagagctgcaggaaaagccggaatggagacttcgagatgtgcaggcccttcgtgacatggtgcggaaggagtaccccaacctgagcacatccctcgacgatgccttcctgctgcgcttcctccgagcccgcaagtttgattacgaccgggccctgcagctcctcgtcaactaccacagctgtagaagaagctggcccgaagtcttcaataacttgaagccatcagccttaaaagatgtccttgcttccgggttcctcaccgtgctgccccacactgaccccaggggctgccatgtcgtctgcatccgcccagacagatggataccaagcaactatccaattactgaaaacatccgagccatatacttgaccttagaaaaactcattcagtctgaagaaacccaggatggtttccccattcggataaaagcagtccatgtggtgaatgaacctcgaatatttaaaggcatttttgccatcataaaaccatttctaaaggagaaaatagcaaacagattcttcctccatgggtctgacttgaactctctccacacaaaccttccaagaagcatcctccccaaggagtatgggggcacggctggggagctggacactgccacctggaacgcggtactgctggcttcagaagacgattttgtgaaagagttctgccaacctgttcctgcctgtgacagcatcctgggccagacgctgctgcccgagggcctgacctcagatgcacagtgtgacgactccttgcgagctgtgaagtcacagctgtactcctgctactagcccgtcccccagggtcaccatctttaattcttttccttcttttctttggagaggcacaaggagaatttaagggtccatggattcagtcttgctccttgtaattaaactgcaggatggaggaacagcctgagatatgagcatgagcccattttggggtaagcctttggttactttaattactccatggaagacatggaaaatgtccccactgattcttaaacatttggaatcccagtctgcaactattaatctggaggctatatctattttgttttgctttttggttggggggtggtgatctggttcttacacatcttggaagcaagaacaatcaggaccaaagtcactttgatcccacttttccaggagaaaaaccacctgtttggccagtgagaactacttgtatgaaataatttggccaaaccttcagtgtgaccaaatgtgagactgggagtttgtgtttttcacaggaaccctaagtatagacctctgctgctcatcaggaaacttactggagatgaaggccccagctgttgtcaccgggtttggaaagcaccttaactgaatcatgtaagcatcaggacataagcagcactttgtggtcaaatgtggaagccggagacttcaaagcacctctgggacccactggttgaagtttgcaatagaaacttaagttttcccaaatccataaagccttagccctggttctcaatagaatcagggacctagcaggaaatgattttactcaacctaaaatgctggatcccaggcccgtgtagctataagaattctggcctggatcccaggtgtacaactatggacaagatatgggcctctactttctcctctataaaatgaggctggatgaaatgtcagctagggccattttggctgctgaggctctgggatttggtttagttactgaatgttagattttctgcctagaaagataactatctagatacaagtggttggatcctgtttttgtttgtggtacatgtgtctttccaagagagatgtgtcaccaattagccctgcctttaaagaaactattatgtgtattcctgggactcactgacaccaattttctttttatagtgatggttcaattttgaaaagatggcttttgtgaggccaggttaaggtgaccaggatcttgtatgatgaattccttccatccctgagactctggtactatattgtaaacctggctacagtagttaattacttgagattctttaattttggtctctgagctgggcgtggtggttcatgcctgtaatcccagcactttgggaggccaaggtgtgcggatcacaaggtcaggagttcgagacccgcctggccaagatggtgaaaccccatctctactaaaaatacaaaaattagctgggcggtggtggcgggctcctgtagtcccagctactcgggaggctgaggcagaagaatcacgtgaacccaggaggcagaagtggcagtgagccaagatcgcaccactgcactccagcctgggcgacagagcaagactctgcctcaaaaaaaaaaaaaaaaaaaaaaaatttttttttttttggtctctggaaatgaacacaagggcaggttattcctgggtcacttctgggcccccctgccctcccagccccacttgagtttctctctctggtgtgggtgaaccagtcagcctgaatgttctgcatttcagcactttagaacctccctgtgaagattttagccttagcccaaacatcaaattagatggttcacatgatggtttttgacctatttcctttctaatgtattccacatgatcatggtgttaaatagtgaaaagtactgtgttgtgtgtgcaccttctccgtgcatttattagactaaccagtcaagcagacagctcagttagggagaaaacaatactctgaaatttgaaggccaatctgttgttactaagctgtttatctctattgcctttttaaatgtctggataagtt

SEQ ID NO: 301880 - DNA, 1409 bp, Homo sapiens
ctgtgcgcggagggcgtggcctgtgcggggcgggacttattgcccgcgcggtgagggagcgtggtctcgcgcaagccggcgtgcggtccggcggcgctgcagttgtgtccagccggtcacggggcggctatggcggccacgttcttcggagaggtggtgaaggcgccgtgccgagctgggactgaggacgaagaggaggaggaggaggggcggagggagacgcccgaggacagggaggtgcgtctgcagctggcgcggaagagggaagtgcggctccttcgaagacaaacaaaaacatctttggaagtttctttgctagaaaaatatccgtgctccaagtttataattgctataggaaataatgcagtagcatttctgtcatcatttgttatgaattcaggagtctgggaggaagttggttgtgctaaactctggaatgaatggtgtagaacaacagacactacacatctgtcctccacagaggctttttgtgtgttttatcatctaaaatccaatccctcggtttttctctgtcagtgcagttgctatgttgcagaagatcaacagtatcagtggctggaaaaggtttttggctcttgtccaaggaagaacatgcagataactattctcacatgtcgacatgttaccgattataaaacctcagaatccaccggcagccttccttctcctttcctgagagccctaaaaacacagaatttcaaagactcggcgtgttgtccattgctagaacaaccgaatatagtacacgaccttcctgcagcagttctaagctactgtcaagtatggaaaatcccagcaattctgtacttgtgttatactgatgtgatgaaattagacctaatcacagtggaagcttttaagcctatactttctaccagaagcttgaagggtttggttaagaatattccccaaagcactgagatactaaagaaattgatgacaacaaatgagattcagagtaacatttatacatgatcttaaacattgttttgtagtgtatattacttgtccattcctttaaggggagcagcctgcactcttttgtagattacttttgggggatatattttgagaatgatgaaacggaataaaattgtaaaaaactaaaaaaaaaaaaaaaaaaaaaaaaattttaaaaaaaaaaaaaacagaacaaaaacaaaaaaatgtgtgtcgggggcccgtcgccccccagaaaagagttttcaacaacaccattgcttggggggccggcggacgccaaggtgtaatgcacacacgcgcacacagctgttcccaagggaaaccggggagagcaacaggggggcgtcccccaaaaaaaaggcgggggcaccgcgttctcgacacaccagggggcgcggcaacgggccacacagaggccgagacct

SEQ ID NO: 301881 - DNA, 1383 bp, Homo sapiens
ctgtgcgcggagggcgtggcctgtgcggggcgggacttattgcccgcgcggtgagggagcgtggtctcgcgcaagccggcgtgcggtccggcggcgctgcagttgtgtccagccggtcacggggcggctatggcggccacgttcttcggagaggtggtgaaggcgccgtgccgagctgggactgaggacgaagaggaggaggaggaggggcggagggagacgcccgaggacagggagggaagtgcggctccttcgaagacaaacaaaaacatctttggaagtttctttgctagaaaaatatccgtgctccaagtttataattgctataggaaataatgcagtagcatttctgtcatcatttgttatgaattcaggagtctgggaggaagttggttgtgctaaactctggaatgaatggtgtagaacaacagacactacacatctgtcctccacagaggctttttgtgtgttttatcatctaaaatccaatccctcggtttttctctgtcagtgcagttgctatgttgcagaagatcaacagtatcagtggctggaaaaggtttttggctcttgtccaaggaagaacatgcagataactattctcacatgtcgacatgttaccgattataaaacctcagaatccaccggcagccttccttctcctttcctgagagccctaaaaacacagaatttcaaagactcggcgtgttgtccattgctagaacaaccgaatatagtacacgaccttcctgcagcagttctaagctactgtcaagtatggaaaatcccagcaattctgtacttgtgttatactgatgtgatgaaattagacctaatcacagtggaagcttttaagcctatactttctaccagaagcttgaagggtttggttaagaatattccccaaagcactgagatactaaagaaattgatgacaacaaatgagattcagagtaacatttatacatgatcttaaacattgttttgtagtgtatattacttgtccattcctttaaggggagcagcctgcactcttttgtagattacttttgggggatatattttgagaatgatgaaacggaataaaattgtaaaaaactaaaaaaaaaaaaaaaaaaaaaaaaattttaaaaaaaaaaaaaacagaacaaaaacaaaaaaatgtgtgtcgggggcccgtcgccccccagaaaagagttttcaacaacaccattgcttggggggccggcggacgccaaggtgtaatgcacacacgcgcacacagctgttcccaagggaaaccggggagagcaacaggggggcgtcccccaaaaaaaaggcgggggcaccgcgttctcgacacaccagggggcgcggcaacgggccacacagaggccgagacct

SEQ ID NO: 301882 - DNA, 1358 bp, Homo sapiens
ctgtgcgcggagggcgtggcctgtgcggggcgggacttattgcccgcgcggtgagggagcgtggtctcgcgcaagccggcgtgcggtccggcggcgctgcagttgtgtccagccggtcacggggcggctatggcggccacgttcttcggagaggtggtgaaggcgccgtgccgagctgggactgaggacgaagaggaggaggaggaggggcggagggagacgcccgaggacagggaggtgcgtctgcagctggcgcggaagagggaagtgcggctccttcgaagacaaacaaaaacatctttggaagtttctttgctagaaaaatatccgtgctccaagtttataattgctataggaaataatgcagtagcatttctgtcatcatttgttatgaattcaggagtctgggaggaagttggttgtgctaaactctggaatgaatggtgtagaacaacagacactacacatctgtcctccacagaggctttttgtgtgttttatcatctaaaatccaatccctcggtttttctctgtcagtgcagttgctatgttgcagaagatcaacagtatcagtggctggaaaaggtttttggctcttgtccaaggaagaacatgcagataactattctcacatgtcgacatgttaccgattataaaacacagaatttcaaagactcggcgtgttgtccattgctagaacaaccgaatatagtacacgaccttcctgcagcagttctaagctactgtcaagtatggaaaatcccagcaattctgtacttgtgttatactgatgtgatgaaattagacctaatcacagtggaagcttttaagcctatactttctaccagaagcttgaagggtttggttaagaatattccccaaagcactgagatactaaagaaattgatgacaacaaatgagattcagagtaacatttatacatgatcttaaacattgttttgtagtgtatattacttgtccattcctttaaggggagcagcctgcactcttttgtagattacttttgggggatatattttgagaatgatgaaacggaataaaattgtaaaaaactaaaaaaaaaaaaaaaaaaaaaaaaattttaaaaaaaaaaaaaacagaacaaaaacaaaaaaatgtgtgtcgggggcccgtcgccccccagaaaagagttttcaacaacaccattgcttggggggccggcggacgccaaggtgtaatgcacacacgcgcacacagctgttcccaagggaaaccggggagagcaacaggggggcgtcccccaaaaaaaaggcgggggcaccgcgttctcgacacaccagggggcgcggcaacgggccacacagaggccgagacct

SEQ ID NO: 301883 - DNA, 1225 bp, Homo sapiens
ctgtgcgcggagggcgtggcctgtgcggggcgggacttattgcccgcgcggtgagggagcgtggtctcgcgcaagccggcgtgcggtccggcggcgctgcagttgtgtccagccggtcacggggcggctatggcggccacgttcttcggagaggtggtgaaggcgccgtgccgagctgggactgaggacgaagaggaggaggaggaggggcggagggagacgcccgaggacagggaggtgcgtctgcagctggcgcggaagagggaagtgcggctccttcgaagacaaacaaaaacatctttggaagtttctttgctagaaaaatatccgtgctccaagtttataattgctataggaaataatgcagtagcatttctgtcatcatttgttatgaattcaggagtctgggaggaagttggttgtgctaaactctggaatgaatggtgtagaacaacagacactacacatctgtcctccacagaggctttttgtgtgttttatcatctaaaatccaatccctcgaaacacagaatttcaaagactcggcgtgttgtccattgctagaacaaccgaatatagtacacgaccttcctgcagcagttctaagctactgtcaagtatggaaaatcccagcaattctgtacttgtgttatactgatgtgatgaaattagacctaatcacagtggaagcttttaagcctatactttctaccagaagcttgaagggtttggttaagaatattccccaaagcactgagatactaaagaaattgatgacaacaaatgagattcagagtaacatttatacatgatcttaaacattgttttgtagtgtatattacttgtccattcctttaaggggagcagcctgcactcttttgtagattacttttgggggatatattttgagaatgatgaaacggaataaaattgtaaaaaactaaaaaaaaaaaaaaaaaaaaaaaaattttaaaaaaaaaaaaaacagaacaaaaacaaaaaaatgtgtgtcgggggcccgtcgccccccagaaaagagttttcaacaacaccattgcttggggggccggcggacgccaaggtgtaatgcacacacgcgcacacagctgttcccaagggaaaccggggagagcaacaggggggcgtcccccaaaaaaaaggcgggggcaccgcgttctcgacacaccagggggcgcggcaacgggccacacagaggccgagacct

SEQ ID NO: 301884 - DNA, 746 bp, Homo sapiens
cgggttagagcatagacttcctccagaggccaggagaccatcggaggccaggagatcatcggcgagtgtggcagggaaagggcctgttgaactgactttcccacttgccttttcgttgagaaggagagtaaaggccacgcctgtcccatggctgtttttaagtctcgagtgtggagattgttggtcgtggagggaggggtgttgcctctgcctgaatccctggggtctcactgtattcacttttttctctcctttcagaatattccccaaagcactgagatactaaagaaattgatgacaacaaatgagattcagagtaacatttatacatgatcttaaacattgttttgtagtgtatattacttgtccattcctttaaggggagcagcctgcactcttttgtagattacttttgggggatatattttgagaatgatgaaacggaataaaattgtaaaaaactaaaaaaaaaaaaaaaaaaaaaaaaattttaaaaaaaaaaaaaacagaacaaaaacaaaaaaatgtgtgtcgggggcccgtcgccccccagaaaagagttttcaacaacaccattgcttggggggccggcggacgccaaggtgtaatgcacacacgcgcacacagctgttcccaagggaaaccggggagagcaacaggggggcgtcccccaaaaaaaaggcgggggcaccgcgttctcgacacaccagggggcgcggcaacgggccacacagaggccgagacct

SEQ ID NO: 301885 - DNA, 852 bp, Homo sapiens
ctgtgcgcggagggcgtggcctgtgcggggcgggacttattgcccgcgcggtgagggagcgtggtctcgcgcaagccggcgtgcggtccggcggcgctgcagttgtgtccagccggtcacggggcggctatggcggccacgttcttcggagaggtggtgaaggcgccgtgccgagctgggactgaggacgaagaggaggaggaggaggggcggagggagacgcccgaggacagggaggtgcgtctgcagctggcgcggaagagggaagtgcggctccttcgaagacaaacaaaaacatctttggaagtttctttgctagaaaaatatccgtgctccaagtttataattgctataggaaataatgcagtagcatttctgtcatcatttgttatgaattcaggagtctgggaggaagttggttgtgctaaactctggaatgaatggtgtagaacaacagacactacacatctgtcctccacagaggctttttgtgtgttttatcatctaaaatccaatccctcgaaaccctaaaccctcctacctttggccagtgggagctcctgtaataggctcttgtgttcttttgatataaccattagaccttattagctttcctgctttctagcacaataaaatgctctagttttttttcttttttttctttttttgagacggagtatcactctgtcacccaggctggagtgcagtggtgcaatctcagctcactgaaacctccgcctcccaagttcaagtgattctcctgcctcagtctcctgagtagctgggattataggcactggccaccatgcccggctaatttttgtatttttagtagagacagggtttcgatga

SEQ ID NO: 301886 - DNA, 827 bp, Homo sapiens
tttttttttttgtatttttagtagagacagggtttccccatgttagccaggatggtcttgatctcctgacctcatgatcctcctgcctcagcctcccaaagtgctgggattataggcgtgagcaccccacctggccactatccttcgatattttttttaagacatggtttccttgaggtgtttgaatatgcctataattgccgatttaaaaagtttatttagtgaatctaagtctgggctccctcagagacagtttctgttgactgctttttttcctgtttgagtgtttcataatattttgttgaaaattgggcatttaaaataaaataatgtggcaactctggaaattggatattccctttctcctcccccaggatttgctgctgttgctgtttattgttacagcttgcctagtgacttttcctggacaaaggctatataaagtccgtccccttaagtccctgcttgtttagtttagtggttagctaatggttggacagagaagtcaccacaaccactgtctcctatcctttaccgacggcttgtgtgtttgtgttggggtgtgccatcacttcctatttgtgtagacagtcatgctcagccacaggtgacaaatgaggaccccctcacgtctttcctgggtgtgcacatggccttgcacctgcatgtggctgtctagatccccaggaatgtattggaccttttcaaagcccaccattaacactgtattccccacattttcctttatagttttttggccagctgcttgtttgccccatgggtattgtcccctcagacagctgcgctgttgaacagtggctactgat

SEQ ID NO: 301887 - DNA, 815 bp, Homo sapiens
attgtttctctctgctgccggagctccaggtctacccttcactgctctgtgtcctcagcgtgtgtggcttcgtgacctgaagatactgggaaatccatagctaagatgccaggaccccctgaaagcctagacatggtgagagtgctgggtccgacatcacgagagaggggaaggagttgctcggaaccggtgggaagtggctgtggcgggactcaggcctccccgcagtcagctccacaatctgctccctgagttctccttgcccagctcggcctcagtctccttcagccgtaagttggcggctgcgccaacagccggggccccgggcgtcctgtctcttccctgcactgtgactgtgccctgcctggagtcctctctggcagttctgcacccgcagcgccgcgtctttctcagattgtgcggggaccacgggagggtcatcaggggagaatcctgacttggggtgcgggttcatgaatgggaagagctttggtccgtggggttcccagttgctattttctcctattaaaaatttatgggcgtcactgcaaaaatattaaagaatgtaatcaaagagtggttctagaattgtagagcacccagctatggtttgtagttgtggtctgtgggagaggcttgaaggaaagtcttttataaaatgcatgatgaagaaaccaaatttactaattgggttaggtacagttacatggtttcttaatatgtgcgttaaaggtgaaaatttcctggttatgtaatcagagcttaattggcagtttacagttgctgaagcctgaattttgtttctctgaatgtag

SEQ ID NO: 301888 - DNA, 950 bp, Homo sapiens
ataatctgcactacttaaaatgttccctttgttgccattgaacgtgggaaaatgtagatattcaagattcccattggcggaaagctggggtccttagtaaagataaataacatgtaatgttgtggtttcatctgttttctccattaattctatgcagaacaggattaataaaatgcttatttaaacaggatggtgtttattaccctgaaagttctgaaaaaaagttattgagagatacctgctctctcaggtgctaaagaaagactactttaaaatgttattaaaaattgcagaacatagaagatatctgcattttgaactctgcataaaactgatttttctgtatggttaacctcagactataatttactttttgaggggcaatatctcagcagtgatgatgtcttcttctgtgtgcatcagcacatcataaacatttgtcctaatgcagttgattttaaaatttacttaaaagagctctctgaaatatttatttcactatagagttaattatttttctcttcattattaagtatctttatgtagctaaggaagagctgtgcataaaccatcacatttaatctggcagctgcctttctttgttaggttttccttgcatttatctgtctttggaaaatgaagactcttatctttgtttacagagcccgaccccaccgcctcgaccaccatgccattactcgcgcgctcctcgttacaatccctacaatctacacctttctcaccccctgttgtttatcctgtccctcacacaccccatttcttttacttcctcaccctcaatcttagacacaccactctttctatattccaattcatcgttccacaactctgtcaacttcacaaattccaaacctcctcacacctcccccacactctaatctctcctttttatatgttcctccctattttagaatctcctcccccgctct

SEQ ID NO: 301889 - DNA, 1680 bp, Homo sapiens
  misc_feature (723)..(723): n is a, c, g, or t
  misc_feature (1116)..(1116): n is a, c, g, or t
  misc_feature (1127)..(1127): n is a, c, g, or t
attgtttctctctgctgccggagctccaggtctacccttcactgctctgtgtcctcagcgtgtgtggcttcgtgacctgaagatactgggaaatccatagctaagatgccaggaccccctgaaagcctagacatggggccgttgacatttagggatgtggccatagaattctctctggaggagtggcaatgcctggacactgctcagcaggatttgtataggaaagtgatgttagagaactacagaaacctggtcttcttggcaggtattgctgtctctaagccagatctggtcacctgtctggagcaaggaaaagatccctggaatatgaagggacacagtacggtagtcaaacccccagtagagacggggtttcaccgttttggccaggatggtctctatctcctgacctcgtgatccgcccgcctcagtctcccaaagtgctggtattacaggcgtgagccaccatgcccagcctaataaaaatttttttatttctattgtatccaatagcttgttttaagtgtgtagaacaataacttacacttttatgttaattttatattttgttaatttactgactgtattattagtttagacaaatttcaatgtactgtggttttttatgtgtaagattatatattcctcaaacagcaactttttacttatttgtcttcagtttcaatggctttaaaaagaattcttttttcattattctgccanatgcttccagtgctatgttaaaatagaaacattgacaaagggcacaatagagtttactattggtgtctgtgaatttgaaatggcaaacaactccttaagtttttataagctgatttcaggaggtaaagatcttcttttcttgtgttccccagggttttgggatgccctctgggtttgtagtggagtggggttgtaacttggttgcaaggctgctggttctacattagggtccatatttagttgtcatgttacaagaggcttgggtagttgtacttcccaatttttttttttttttttttttttgagacaggagtctcgctctgtcgcctggctggagtgcagtggtgtgatctcagctcatcaaaacctttgcctccctagttcaagcgattntcctacctcancctcctgagtagctgggattacaggtgcccaccagcacgcccagctaattttttgtgtgtttttagtggagacggggtttcaccatgttggctaagctgggtctcgaactcctgacctcaggtgatccacccgccttggcctcctgggtgctgggattacagacgtgagccaccacccccggccacttgtttcttttaaatgcttattaaaagtttctcatcagaatattttatttataattatactgcatattctctgaaattttactgccaatttttcaaaatacctgcttttgatgagtacagttacagtcaaatactgtagttagacaaattcttttttaatggtatattaatgttgcataccaaattgtatgagttaaacgtctcttcctgtgcagtttcatattagtggtgttttcagtgtaggtatcttaatatcagcttatcgtggtttttggttatgtattataattttagtcaatttgcaattctgtctgtatactttatgtcaatgtgaggttgaattaaaagatagccatatgtctatcac

SEQ ID NO: 301890 - DNA, 2000 bp, Homo sapiens
ataatctgcactacttaaaatgttccctttgttgccattgaacgtgggaaaatgtagatattcaagattcccattggcggaaagctggggtccttagtaaagataaataacatgtaatgttgtggtttcatctgttttctccattaattctatgcagaacaggattaataaaatgcttatttaaacaggatggtgtttattaccctgaaagttctgaaaaaaagttattgagagatacctgctctctcaggtgctaaagaaagactactttaaaatgttattaaaaattgcagaacatagaagatatctgcattttgaactctgcataaaactgatttttctgtatggttaacctcagactataatttactttttgaggggcaatatctcagcagtgatgatgtcttcttctgtgtgcatcagcacatcataaacatttgtcctaatgcagttgattttaaaatttacttaaaagagctctctgaaatatttatttcactatagagttaattatttttctcttcattattaagtatctttatgtagctaaggaagagctgtgcataaaccatcacatttaatctggcagctgcctttctttgttaggttttccttgcatttatctgtctttggaaaatgaagactcttatctttgtttacagggcagaaaaattgagtaaaacacaggatcttccacttactggatattgacaaaatattctttctgggccaaacacattggcattactagtgaacttgttagaaattcagaaactcagagtttatttcagatcttctgggaaaaaagaatctgcacaagatctccagtttactgttcacattaaaacttgagaggtgccttctaactcaacatatcttttgtctgaaaaatatacacaactcattctttgtgtggcaaatatagcactaaaaaatgtacatgtttgtgtttatgcctttagctttatactttactattaataaaagtatatatacagtggtgttgtagatcttataccattctcttctctcagagttagagaatacattagagaatatttctgtgttgaaaattgttggataatttcagtcattcctgtaagtcagaacgaattttctttactttctcatttgaccttaattcaaatgataaattttgcccacgtgtaaatgtgtgtgtgtgtgtgtgtgtttgtgtgtgtttgtttcaggggccgttgacatttagggatgtggccatagaattctctctggaggagtggcaatgcctggacactgctcagcaggatttgtataggaaagtgatgttagagaactacagaaacctggtcttcttgggtgagaataactttaatacaaaatcccttatataccctaaagttttcatttctctgttttcatagaataatttttggtaatttatgctttgcataagtgagtttctgatgcctgttttaaagaaatcttgaagaactgtccgtgtggaaaaaaatttcttcaggatgttttatcttggcctgatctttttacatttctgagccggtctgtatccttcactctacagtagtggtaatttcagaaatttagtagtataaaatattgttgtccatatgttaaaatctatatgccaccactaattttttatccatgaatactgggtggcaaaattaagcacctacaaatttaaaatattttctaaatgttaagaactttctgtcattaaatagtattttgggataaattttctagaatattctattacatcctctttactaagcatggtactaggtaggtaattagagaatatgagcaagattcatgttatttatttttaataaagcaggtattgctgtctctaagccagatctggtcacctgtctggagcaaggaaaagatccctggaatatgaagggacacagtacggtagtcaaacccccaggtaggtgagagtgaatgaaacagttgacatagatgaaaggttgaaagatttaaaaaaaaaa

SEQ ID NO: 301891 - DNA, 3564 bp, Homo sapiens
  misc_feature (2301)..(2301): n is a, c, g, or t
  misc_feature (2694)..(2694): n is a, c, g, or t
  misc_feature (2705)..(2705): n is a, c, g, or t
ataatctgcactacttaaaatgttccctttgttgccattgaacgtgggaaaatgtagatattcaagattcccattggcggaaagctggggtccttagtaaagataaataacatgtaatgttgtggtttcatctgttttctccattaattctatgcagaacaggattaataaaatgcttatttaaacaggatggtgtttattaccctgaaagttctgaaaaaaagttattgagagatacctgctctctcaggtgctaaagaaagactactttaaaatgttattaaaaattgcagaacatagaagatatctgcattttgaactctgcataaaactgatttttctgtatggttaacctcagactataatttactttttgaggggcaatatctcagcagtgatgatgtcttcttctgtgtgcatcagcacatcataaacatttgtcctaatgcagttgattttaaaatttacttaaaagagctctctgaaatatttatttcactatagagttaattatttttctcttcattattaagtatctttatgtagctaaggaagagctgtgcataaaccatcacatttaatctggcagctgcctttctttgttaggttttccttgcatttatctgtctttggaaaatgaagactcttatctttgtttacagggcagaaaaattgagtaaaacacaggatcttccacttactggatattgacaaaatattctttctgggccaaacacattggcattactagtgaacttgttagaaattcagaaactcagagtttatttcagatcttctgggaaaaaagaatctgcacaagatctccagtttactgttcacattaaaacttgagaggtgccttctaactcaacatatcttttgtctgaaaaatatacacaactcattctttgtgtggcaaatatagcactaaaaaatgtacatgtttgtgtttatgcctttagctttatactttactattaataaaagtatatatacagtggtgttgtagatcttataccattctcttctctcagagttagagaatacattagagaatatttctgtgttgaaaattgttggataatttcagtcattcctgtaagtcagaacgaattttctttactttctcatttgaccttaattcaaatgataaattttgcccacgtgtaaatgtgtgtgtgtgtgtgtgtgtttgtgtgtgtttgtttcaggggccgttgacatttagggatgtggccatagaattctctctggaggagtggcaatgcctggacactgctcagcaggatttgtataggaaagtgatgttagagaactacagaaacctggtcttcttgggtgagaataactttaatacaaaatcccttatataccctaaagttttcatttctctgttttcatagaataatttttggtaatttatgctttgcataagtgagtttctgatgcctgttttaaagaaatcttgaagaactgtccgtgtggaaaaaaatttcttcaggatgttttatcttggcctgatctttttacatttctgagccggtctgtatccttcactctacagtagtggtaatttcagaaatttagtagtataaaatattgttgtccatatgttaaaatctatatgccaccactaattttttatccatgaatactgggtggcaaaattaagcacctacaaatttaaaatattttctaaatgttaagaactttctgtcattaaatagtattttgggataaattttctagaatattctattacatcctctttactaagcatggtactaggtaggtaattagagaatatgagcaagattcatgttatttatttttaataaagcaggtattgctgtctctaagccagatctggtcacctgtctggagcaaggaaaagatccctggaatatgaagggacacagtacggtagtcaaacccccagtagagacggggtttcaccgttttggccaggatggtctctatctcctgacctcgtgatccgcccgcctcagtctcccaaagtgctggtattacaggcgtgagccaccatgcccagcctaataaaaatttttttatttctattgtatccaatagcttgttttaagtgtgtagaacaataacttacacttttatgttaattttatattttgttaatttactgactgtattattagtttagacaaatttcaatgtactgtggttttttatgtgtaagattatatattcctcaaacagcaactttttacttatttgtcttcagtttcaatggctttaaaaagaattcttttttcattattctgccanatgcttccagtgctatgttaaaatagaaacattgacaaagggcacaatagagtttactattggtgtctgtgaatttgaaatggcaaacaactccttaagtttttataagctgatttcaggaggtaaagatcttcttttcttgtgttccccagggttttgggatgccctctgggtttgtagtggagtggggttgtaacttggttgcaaggctgctggttctacattagggtccatatttagttgtcatgttacaagaggcttgggtagttgtacttcccaatttttttttttttttttttttttgagacaggagtctcgctctgtcgcctggctggagtgcagtggtgtgatctcagctcatcaaaacctttgcctccctagttcaagcgattntcctacctcancctcctgagtagctgggattacaggtgcccaccagcacgcccagctaattttttgtgtgtttttagtggagacggggtttcaccatgttggctaagctgggtctcgaactcctgacctcaggtgatccacccgccttggcctcctgggtgctgggattacagacgtgagccaccacccccggccacttgtttcttttaaatgcttattaaaagtttctcatcagaatattttatttataattatactgcatattctctgaaattttactgccaatttttcaaaatacctgcttttgatgagtacagttacagtcaaatactgtagttagacaaattcttttttaatggtatattaatgttgcataccaaattgtatgagttaaacgtctcttcctgtgcagtttcatattagtggtgttttcagtgtaggtatcttaatatcagcttatcgtggtttttggttatgtattataattttagtcaatttgcaattctgtctgtatactttatgtcaatgtgaggttgaattaaaagatagccatatgtctatcacaatcatatatgtgtgtgtgtttatctataaatatgaccccaatattggttatggcttatcttgtatatattctttctttctttctttttttttttttttttttaaggtggagtctcgctctgtcgcccaggctggagtgtgcagtggaacaatctcggctcactgcaacctcctcctcccgggttcacgtcattctcctgcctcagcctcccaagtagctgggactacaggcgcctgcaaccacgcctggctaattttttgtatttttagcagagacggggtttcaccatattagccaggatggtc

SEQ ID NO: 301892 - DNA, 446 bp, Homo sapiens
attgtttctctctgctgccggagctccaggtctacccttcactgctctgtgtcctcagcgtgtgtggcttcgtgacctgaagatactgggaaatccatagctaagatgccaggaccccctgaaagcctagacatggggccgttgacatttagggatgtggccatagaattctctctggaggagtggcaatgcctggacactgctcagcaggatttgtataggaaagtgatgttagagaactacagaaacctggtcttcttggcaggtattgctgtctctaagccagatctggtcacctgtctggagcaaggaaaagatccctggaatatgaagggacacagtacggtagtcaaacccccagttatatgttctcattttgctgaagacttttgcccagggccaggcattaaagattcttttcaaaaagtgatactgagagaatatgt

SEQ ID NO: 301893 - DNA, 4756 bp, Homo sapiens
  misc_feature (245)..(245): n is a, c, g, or t
gcgacgctcacgaacgatcagagctgcgggcgacgcaacgaagcccggaggccgcaggctgcgcgctccctcgcagcagccgggcgggcaaaagcccccagtcctcggcccccgcgcaagcgacgccgggaaatgcccacatccgggaaacctgcagcggagtgcggcggcggcgacactgagtggaaggcaaaatggcggcggcggcggcggtggcctggtgttaaggggagagccaggtcctnacgacccctgggacgggccgcgctggcccgcggcagcccccccgttcgtctccccgctctgccccaccagggatacttggggttgctgggacggactctggccgcctcagcgtccgccctcaggcccgtggccgctgtccaggagctctgctctcccctccagagttaattatttatattgtaaagaattttaacagtcctggggacttccttgaaggatcattttcacttttgctcagaagaaagctctggatctatcaaataaagaagtccttcgtgtgggctacatatatagatgttttcatgaagaggagtgaaaagccagaaggatatagacaaatgaggcctaagacctttcctgccagtaactatactgtcagtagccggcaaatgttacaagaaattcgggaatcccttaggaatttatctaaaccatctgatgctgctaaggctgagcataacatgagtaaaatgtcaaccgaagatcctcgacaagtcagaaatccacccaaatttgggacgcatcataaagccttgcaggaaattcgaaactctctgcttccatttgcaaatgaaacaaattcttctcggagtacttcagaagttaatccacaaatgcttcaagacttgcaagctgctggatttgatgaggatatggttatacaagctcttcagaaaactaacaacagaagtatagaagcagcaattgaattcattagtaaaatgagttaccaagatcctcgacgagagcagatggctgcagcagctgccagacctattaatgccagcatgaaaccagggaatgtgcagcaatcagttaaccgcaaacagagctggaaaggttctaaagaatccttagttcctcagaggcatggcccgccactaggagaaagtgtggcctatcattctgagagtcccaactcacagacagatgtaggaagacctttgtctggatctggtatatcagcatttgttcaagctcaccctagcaacggacagagagtgaaccccccaccaccacctcaagtaaggagtgttactcctccaccacctccaagaggccagactccccctccaagaggtacaactccacctcccccttcatgggaaccaaactctcaaacaaagcgctattctggaaacatggaatacgtaatctcccgaatctctcctgtcccacctggggcatggcaagagggctatcctccaccacctctcaacacttcccccatgaatcctcctaatcaaggacagagaggcattagttctgttcctgttggcagacaaccaatcatcatgcagagttctagcaaatttaactttccatcagggagacctggaatgcagaatggtactggacaaactgatttcatgatacaccaaaatgttgtccctgctggcactgtgaatcggcagccaccacctccatatcctctgacagcagctaatggacaaagcccttctgctttacaaacagggggatctgctgctccttcgtcatatacaaatggaagtattcctcagtctatgatggtgccaaacagaaatagtcataacatggaactatataacattagtgtacctggactgcaaacaaattggcctcagtcatcttctgctccagcccagtcatccccgagcagtgggcatgaaatccctacatggcaacctaacataccagtgaggtcaaattcttttaataacccattaggaaatagagcaagtcactctgctaattctcagccttctgctacaacagtcactgcaattacaccagctcctattcaacagcctgtgaaaagtatgcgtgtattaaaaccagagctacagactgctttagcacctacacacccttcttggataccacagccaattcaaactgttcaacccagtccttttcctgagggaaccgcttcaaatgtgactgtgatgccacctgttgctgaagctccaaactatcaaggaccaccaccaccctacccaaaacatctgctgcaccaaaacccatctgttcctccatacgagtcaatcagtaagcctagcaaagaggatcagccaagcttgcccaaggaagatgagagtgaaaagagttatgaaaatgttgatagtggggataaagaaaagaaacagattacaacttcacctattactgttaggaaaaacaagaaagatgaagagcgaagggaatctcgtattcaaagttattctcctcaagcatttaaattctttatggagcaacatgtagaaaatgtactcaaatctcatcagcagcgtctacatcgtaaaaaacaattagagaatgaaatgatgcgggttggattatctcaagatgcccaggatcaaatgagaaagatgctttgccaaaaagaatctaattacatccgtcttaaaagggctaaaatggacaagtctatgtttgtgaagataaagacactaggaataggagcatttggtgaagtctgtctagcaagaaaagtagatactaaggctttgtatgcaacaaaaactcttcgaaagaaagatgttcttcttcgaaatcaagtcgctcatgttaaggctgagagagatatcctggctgaagctgacaatgaatgggtagttcgtctatattattcattccaagataaggacaatttatactttgtaatggactacattcctgggggtgatatgatgagcctattaattagaatgggcatctttccagaaagtctggcacgattctacatagcagaacttacctgtgcagttgaaagtgttcataaaatgggttttattcatagagatattaaacctgataatattttgattgatcgtgatggtcatattaaattgactgactttggcctctgcactggcttcagatggacacacgattctaagtactatcagagtggtgaccatccacggcaagatagcatggatttcagtaatgaatggggggatccctcaagctgtcgatgtggagacagactgaagccattagagcggagagctgcacgccagcaccagcgatgtctagcacattctttggttgggactcccaattatattgcacctgaagtgttgctacgaacaggatacacacagttgtgtgattggtggagtgttggtgttattctttttgaaatgttggtgggacaacctcctttcttggcacaaacaccattagaaacacaaatgaaggttatcaactggcaaacatctcttcacattccaccacaagctaaactcagtcctgaagcttctgatcttattattaaactttgccgaggacccgaagatcgcttaggcaagaatggtgctgatgaaataaaagctcatccattttttaaaacaattgacttctccagtgacctgagacagcagtctgcttcatacattcctaaaatcacacacccaacagatacatcaaattttgatcctgttgatcctgataaattatggagtgatgataacgaggaagaaaatgtaaatgacactctcaatggatggtataaaaatggaaagcatcctgaacatgcattctatgaatttaccttccgaaggttttttgatgacaatggctacccatataattatccgaagcctattgaatatgaatacattaattcacaaggctcagagcagcagtcggatgaagatgatcaaaacacaggctcagagattaaaaatcgcgatctagtatatgtttaacacactagtaaataaatgtaatgaggatttgtaaaagggcctgaaatgcgaggtgttttgaggttctgagagtaaaattatgcaaatatgacagagctatatatgtgtgctctgtgtacaatattttattttcctaaattatgggaaatccttttaaaatgttaatttattccagccgtttaaatcagtatttagaaaaaaattgttataaggaaagtaaattatgaactgaatattatagtcagttcttggtacttaaagtacttaaaataagtagtgctttgtttaaaaggagaaacctggtatctatttgtatatatgctaaataattttaaaatacaagagtttttgaaatttttttgaaagacagttttagttttatcttgctttaaccaaatatgaaacataccccctattttacagagctcttttttcccctcataaccttgtttttggtagaaaataagctagagaaattaagccatcgtgttggtgagtgttcctaggctaatgataatctgtataattcacatcctgaaactaaggaatacagggttgaaaaaatattaatatgtttgtcagaaggaaaaataatgcatttattttcccccccaccccccgccccatggaatatttaatctatttaatcttcttgcatttatttctcaagaattactggctttaaaagaagccaaagcactactagctttttttccatattggtatttttgatgctgcttccaattttaaaagggaacaaagctgccataaatcgaaatgttcaatactaaaagctaaaatatttctcaccatcg

SEQ ID NO: 301894 - DNA, 1354 bp, Homo sapiens
  misc_feature (245)..(245): n is a, c, g, or t
gcgacgctcacgaacgatcagagctgcgggcgacgcaacgaagcccggaggccgcaggctgcgcgctccctcgcagcagccgggcgggcaaaagcccccagtcctcggcccccgcgcaagcgacgccgggaaatgcccacatccgggaaacctgcagcggagtgcggcggcggcgacactgagtggaaggcaaaatggcggcggcggcggcggtggcctggtgttaaggggagagccaggtcctnacgacccctgggacgggccgcgctggcccgcggcagcccccccgttcgtctccccgctctgccccaccagggatacttggggttgctgggacggactctggccgcctcagcgtccgccctcaggcccgtggccgctgtccaggagctctgctctcccctccagagttaattatttatattgtaaagaattttaacagtcctggggacttccttgaaggatcattttcacttttgctcagaagaaagctctggatctatcaaataaagaagtccttcgtgtgggctacatatatagatgttttcatgaagaggagtgaaaagccagaaggatatagacaaatgaggcctaagacctttcctgccagtaactatactgtcagtagccggcaaatgttacaagaaattcgggaatcccttaggaatttatctaaaccatctgatgctgctaaggctgagcataacatgagtaaaatgtcaaccgaagatcctcgacaagtcagaaatccacccaaatttgggacgcatcataaagccttgcaggaaattcgaaactctctgcttccatttgcaaatgaaacaaattcttctcggagtacttcagaagttaatccacaaatgcttcaagacttgcaagctgctggatttgatgaggaggatcatctgtcagtagcctgttcacccattagtcttactaagccatttctcatttaaaaatgtcgtttgaaatactgaatcctctaggacaagatatggttatacaagctcttcagaaaactaacaacagaagtatagaagcagcaattgaattcattagtaaaatgagttaccaagatcctcgacgagagcagatggctgcagcagctgccagacctattaatgccagcatgaaaccagggaatgtgcagcaatcagttaaccgcaaacagagctggaaaggttctaaagaatccttagttcctcagaggcatggcccgccactaggagaaagtgtggcctatcattctgagagtcccaactcacagacagatgtaggaagacctttgtctggatctggtatatcagcatttgttcaagctcaccccaaagtattaaaagtagctttgtaattc

SEQ ID NO: 301895 - DNA, 3065 bp, Homo sapiens
  misc_feature (245)..(245): n is a, c, g, or t
gcgacgctcacgaacgatcagagctgcgggcgacgcaacgaagcccggaggccgcaggctgcgcgctccctcgcagcagccgggcgggcaaaagcccccagtcctcggcccccgcgcaagcgacgccgggaaatgcccacatccgggaaacctgcagcggagtgcggcggcggcgacactgagtggaaggcaaaatggcggcggcggcggcggtggcctggtgttaaggggagagccaggtcctnacgacccctgggacgggccgcgctggcccgcggcagcccccccgttcgtctccccgctctgccccaccagggatacttggggttgctgggacggactctggccgcctcagcgtccgccctcaggcccgtggccgctgtccaggagctctgctctcccctccagagttaattatttatattgtaaagaattttaacagtcctggggacttccttgaaggatcattttcacttttgctcagaagaaagctctggatctatcaaataaagaagtccttcgtgtgggctacatatatagatgttttcatgaagaggagtgaaaagccagaaggatatagacaaatgaggcctaagacctttcctgccagtaactatactgtcagtagccggcaaatgttacaagaaattcgggaatcccttaggaatttatctaaaccatctgatgctgctaaggctgagcataacatgagtaaaatgtcaaccgaagatcctcgacaagtcagaaatccacccaaatttgggacgcatcataaagccttgcaggaaattcgaaactctctgcttccatttgcaaatgaaacaaattcttctcggagtacttcagaagttaatccacaaatgcttcaagacttgcaagctgctggatttgatgaggatatggttatacaagctcttcagaaaactaacaacagaagtatagaagcagcaattgaattcattagtaaaatgagttaccaagatcctcgacgagagcagatggctgcagcagctgccagacctattaatgccagcatgaaaccagggaatgtgcagcaatcagttaaccgcaaacagagctggaaaggttctaaagaatccttagttcctcagaggcatggcccgccactaggagaaagtgtggcctatcattctgagagtcccaactcacagacagatgtaggaagacctttgtctggatctggtatatcagcatttgttcaagctcaccctagcaacggacagagagtgaaccccccaccaccacctcaagtaaggagtgttactcctccaccacctccaagaggccagactccccctccaagaggtacaactccacctcccccttcatgggaaccaaactctcaaacaaagcgctattctggaaacatggaatacgtaatctcccgaatctctcctgtcccacctggggcatggcaagagggctatcctccaccacctctcaacacttcccccatgaatcctcctaatcaaggacagagaggcattagttctgttcctgttggcagacaaccaatcatcatgcagagttctagcaaatttaactttccatcagggagacctggaatgcagaatggtactggacaaactgatttcatgatacaccaaaatgttgtccctgctggcactgtgaatcggcagccaccacctccatatcctctgacagcagctaatggacaaagcccttctgctttacaaacagggggatctgctgctccttcgtcatatacaaatggaagtattcctcagtctatgatggtgccaaacagaaatagtcataacatggaactatataacattagtgtacctggactgcaaacaaattggcctcagtcatcttctgctccagcccagtcatccccgagcagtgggcatgaaatccctacatggcaacctaacataccagtgaggtcaaattcttttaataacccattaggaaatagagcaagtcactctgctaattctcagccttctgctacaacagtcactgcaattacaccagctcctattcaacagcctgtgaaaagtatgcgtgtattaaaaccagagctacagactgctttagcacctacacacccttcttggataccacagccaattcaaactgttcaacccagtccttttcctgagggaaccgcttcaaatgtgactgtgatgccacctgttgctgaagctccaaactatcaaggaccaccaccaccctacccaaaacatctgctgcaccaaaacccatctgttcctccatacgagtcaatcagtaagcctagcaaagaggatcagccaagcttgcccaaggaagatgagagtgaaaagagttatgaaaatgttgatagtggggataaagaaaagaaacagattacaacttcacctattactgttaggaaaaacaagaaagatgaagagcgaagggaatctcgtattcaaagttattctcctcaagcatttaaattctttatggagcaacatgtagaaaatgtactcaaatctcatcagcagcgtctacatcgtaaaaaacaattagagaatgaaatgatgcgggtaaaaccttttaaaatgtccatttttatacttaatcatctgtttgcttggtgtttattttaaaatattgtgtccagtatttttctttctttttatagctaaataaaatatattatcagttatggaatttaaaagtgaataaatattaaagtacttttgattgtagcattttattttagtatttcaatatttattcagaatttcctataataaaatctcgtgtaaattaagaaaaatataatttgcggtatacagtttaggtgtacataatacctttatatgaaaattggaggaagggttgtcttctaggcttcatacaatatcttacaacatttaaaaataaactagaaatatgtgggtctcaggctggggcatgggggctcacgcctgtaatcaaagcactttggaaggctgaggcaggcagatcatgaggtcaggagatcgagaccatcctgcctaacacagtgaaaccccgtctctactaaaaataccaaaaaaaattagctg

SEQ ID NO: 301896 - DNA, 2624 bp, Homo sapiens
  misc_feature (245)..(245): n is a, c, g, or t
gcgacgctcacgaacgatcagagctgcgggcgacgcaacgaagcccggaggccgcaggctgcgcgctccctcgcagcagccgggcgggcaaaagcccccagtcctcggcccccgcgcaagcgacgccgggaaatgcccacatccgggaaacctgcagcggagtgcggcggcggcgacactgagtggaaggcaaaatggcggcggcggcggcggtggcctggtgttaaggggagagccaggtcctnacgacccctgggacgggccgcgctggcccgcggcagcccccccgttcgtctccccgctctgccccaccagggatacttggggttgctgggacggactctggccgcctcagcgtccgccctcaggcccgtggccgctgtccaggagctctgctctcccctccagagttaattatttatattgtaaagaattttaacagtcctggggacttccttgaaggatcattttcacttttgctcagaagaaagctctggatctatcaaataaagaagtccttcgtgtgggctacatatatagatgttttcatgaagaggagtgaaaagccagaaggatatagacaaatgaggcctaagacctttcctgccagtaactatactgtcagtagccggcaaatgttacaagaaattcgggaatcccttaggaatttatctaaaccatctgatgctgctaaggctgagcataacatgagtaaaatgtcaaccgaagatcctcgacaagtcagaaatccacccaaatttgggacgcatcataaagccttgcaggaaattcgaaactctctgcttccatttgcaaatgaaacaaattcttctcggagtacttcagaagttaatccacaaatgcttcaagacttgcaagctgctggatttgatgaggatatggttatacaagctcttcagaaaactaacaacagaagtatagaagcagcaattgaattcattagtaaaatgagttaccaagatcctcgacgagagcagatggctgcagcagctgccagacctattaatgccagcatgaaaccagggaatgtgcagcaatcagttaaccgcaaacagagctggaaaggttctaaagaatccttagttcctcagaggcatggcccgccactaggagaaagtgtggcctatcattctgagagtcccaactcacagacagatgtaggaagacctttgtctggatctggtatatcagcatttgttcaagctcaccctagcaacggacagagagtgaaccccccaccaccacctcaagtaaggagtgttactcctccaccacctccaagaggccagactccccctccaagaggtacaactccacctcccccttcatgggaaccaaactctcaaacaaagcgctattctggaaacatggaatacgtaatctcccgaatctctcctgtcccacctggggcatggcaagagggctatcctccaccacctctcaacacttcccccatgaatcctcctaatcaaggacagagaggcattagttctgttcctgttggcagacaaccaatcatcatgcagagttctagcaaatttaactttccatcagggagacctggaatgcagaatggtactggacaaactgatttcatgatacaccaaaatgttgtccctgctggcactgtgaatcggcagccaccacctccatatcctctgacagcagctaatggacaaagcccttctgctttacaaacagggggatctgctgctccttcgtcatatacaaatggaagtattcctcagtctatgatggtgccaaacagaaatagtcataacatggaactatataacattagtgtacctggactgcaaacaaattggcctcagtcatcttctgctccagcccagtcatccccgagcagtgggcatgaaatccctacatggcaacctaacataccagtgaggtcaaattcttttaataacccattaggaaatagagcaagtcactctgctaattctcagccttctgctacaacagtcactgcaattacaccagctcctattcaacagcctgtgaaaagtatgcgtgtattaaaaccagagctacagactgctttagcacctacacacccttcttggataccacagccaattcaaactgttcaacccagtccttttcctgagggaaccgcttcaaatgtgactgtgatgccacctgttgctgaagctccaaactatcaaggaccaccaccaccctacccaaaacatctgctgcaccaaaacccatctgttcctccatacgagtcaatcagtaagcctagcaaagaggatcagccaagcttgcccaaggaagatgagagtgaaaagagttatgaaaatgttgatagtggggataaagaaaagaaacagattacaacttcacctattactgttaggaaaaacaagaaagatgaagagcgaagggaatctcgtattcaaagttattctcctcaagcatttaaattctttatggagcaacatgtagaaaatgtactcaaatctcatcagcagcgtctacatcgtaaaaaacaattagagaatgaaatgatgcgggttggattatctcagatgcccggatccatgtgtagatgcttgccttttgatctataactccgtctt

SEQ ID NO: 301897 - DNA, 2484 bp, Homo sapiens
cggagtgcattagagaagagtagaaagcttactcatctggtaccctcttcttgcactccacagctgaatttgcataggtactcactttgaatatccttttaactaccccttaggctgcacttttgatcattaatttcctttgaaatgttttctagatttctaacatgctttattaaaaattatgcatttaacctttaaatatatgcctgaatttttcccaagctatttcttaatattcaatattgaagaagataattcttatttaacatctagtttatttgcctaggttggattatctcaagatgcccaggatcaaatgagaaagatgctttgccaaaaagaatctaattacatccgtcttaaaagggctaaaatggacaagtctatgtttgtgaagataaagacactaggaataggagcatttggtgaagtctgtctagcaagaaaagtagatactaaggctttgtatgcaacaaaaactcttcgaaagaaagatgttcttcttcgaaatcaagtcgctcatgttaaggctgagagagatatcctggctgaagctgacaatgaatgggtagttcgtctatattattcattccaagataaggacaatttatactttgtaatggactacattcctgggggtgatatgatgagcctattaattagaatgggcatctttccagaaagtctggcacgattctacatagcagaacttacctgtgcagttgaaagtgttcataaaatgggttttattcatagagatattaaacctgataatattttgattgatcgtgatggtcatattaaattgactgactttggcctctgcactggcttcagatggacacacgattctaagtactatcagagtggtgaccatccacggcaagatagcatggatttcagtaatgaatggggggatccctcaagctgtcgatgtggagacagactgaagccattagagcggagagctgcacgccagcaccagcgatgtctagcacattctttggttgggactcccaattatattgcacctgaagtgttgctacgaacaggatacacacagttgtgtgattggtggagtgttggtgttattctttttgaaatgttggtgggacaacctcctttcttggcacaaacaccattagaaacacaaatgaaggttatcaactggcaaacatctcttcacattccaccacaagctaaactcagtcctgaagcttctgatcttattattaaactttgccgaggacccgaagatcgcttaggcaagaatggtgctgatgaaataaaagctcatccattttttaaaacaattgacttctccagtgacctgagacagcagtctgcttcatacattcctaaaatcacacacccaacagatacatcaaattttgatcctgttgatcctgataaattatggagtgatgataacgaggaagaaaatgtaaatgacactctcaatggatggtataaaaatggaaagcatcctgaacatgcattctatgaatttaccttccgaaggttttttgatgacaatggctacccatataattatccgaagcctattgaatatgaatacattaattcacaaggctcagagcagcagtcggatgaagatgatcaaaacacaggctcagagattaaaaatcgcgatctagtatatgtttaacacactagtaaataaatgtaatgaggatttgtaaaagggcctgaaatgcgaggtgttttgaggttctgagagtaaaattatgcaaatatgacagagctatatatgtgtgctctgtgtacaatattttattttcctaaattatgggaaatccttttaaaatgttaatttattccagccgtttaaatcagtatttagaaaaaaattgttataaggaaagtaaattatgaactgaatattatagtcagttcttggtacttaaagtacttaaaataagtagtgctttgtttaaaaggagaaacctggtatctatttgtatatatgctaaataattttaaaatacaagagtttttgaaatttttttgaaagacagttttagttttatcttgctttaaccaaatatgaaacataccccctattttacagagctcttttttcccctcataaccttgtttttggtagaaaataagctagagaaattaagccatcgtgttggtgagtgttcctaggctaatgataatctgtataattcacatcctgaaactaaggaatacagggttgaaaaaatattaatatgtttgtcagaaggaaaaataatgcatttattttcccccccaccccccgccccatggaatatttaatctatttaatcttcttgcatttatttctcaagaattactggctttaaaagaagccaaagcactactagctttttttccatattggtatttttgatgctgcttccaattttaaaagggaacaaagctgccataaatcgaaatgttcaatactaaaagctaaaatatttctcaccatcg

SEQ ID NO: 301898 - DNA, 504 bp, Homo sapiens
cctattaattagaatgggcatctttccagaaagtctggcacgattctacatagcagaacttacctgtgcagttgaaagtgttcataaaatgggttttattcatagagatattaaacctgataatattttgattgatcgtgatggtcatattaaattgactgactttggcctctgcactggcttcagatggacacacgattctaagtactatcagagtggtaagtaaactcataaaatttattttagtttgttcataataatgtaatttattgatgtagtaaaatataagatggtatcatcactggatgagagccagaagatgtgggtcaggtcttgattctgttggataaacttgggtgactccattaggcacttagacttatgaaatgaaagaatgtgctagacttgattgtttagacttatgaaatgaaagaatgtgctagacttgattgtttctaaatattattaacatttttgagtcacaccttttacattttatttgaa

SEQ ID NO: 301899 - DNA, 689 bp, Homo sapiens
gagccttggagaccagaccaacagtaacaccaagggcaggtgggcaggcctccgccctcctcccctactccagggcccactgcagcctcagcccaggagccaccagatctcccaacaccatggtccgataccgcgtgaggagcctgagcgaacgctcgcacgaggtgtacaggcagcagttgcatgggcaagagcaaggacaccacggccaagaggagcaagggctgagcccggagcacgtcgaggtctacgagaggacccatggccagtctcactataggcgcagacactgctctcgaaggaggctgcaccggatccacaggcggcagcatcgctcctgcagaaggcgcaaaagacgctcctgcaggcaccggaggaggcatcgcagaggctgcagaaccaggaagagaacatgcagaaggcactaagcttcctgggcccctcacccccagctggaaattaagaaaaagtcgcccgaaacaccaagtgaggccatagcaattcccctacatcaaatgctcaagcccccagctggaagttaagagaaagtcacctgcccaagaaacaccgagtgaggccatagcaactcccctacatcaaatgctcaagccctgagttgccgccgagaagcccacaagatctgagtgaaatgagcaaaagtcacctgcccaataaagcttgacaagaca

SEQ ID NO: 301900 - DNA, 1105 bp, Homo sapiens
gagccttggagaccagaccaacagtaacaccaagggcaggtgggcaggcctccgccctcctcccctactccagggcccactgcagcctcagcccaggagccaccagatctcccaacaccatggtccgataccgcgtgaggagcctgagcgaacgctcgcacgaggtgtacaggcagcagttgcatgggcaagagcaaggacaccacggccaagaggagcaagggctgagcccggagcacgtcgaggtctacgagaggacccatggccagtctcactataggcgcagacactgctctcgaaggaggctgcaccggatccacaggcggcagcatcgctcctgcagaaggcgcaaaagacgctcctgcaggcaccggaggaggcatcgcagaggctgcagaaccaggaagagaacatgcagaaggcactaagcttcctgggcccctcacccccagctggaaattaagaaaaagtcgcccgaaacaccaagtgaggccatagcaattcccctacatcaaatgctcaagcccccagctggaagttaagagaaagtcacctgcccaagaaacaccgagtgaggccatagcaactcccctacatcaaatgctcaagccctgagttgccgccgagaagcccacaagatctgagtgaaatgagcaaaagtcacctgcccaataaagcttgacaagacaaaaaaaaacaaaataaaaaaaaaaaagggggggggcgcggaccataaagatatttcccagaggggcaccaaattataacgtagtcacccccaggttttttttgtcaccgcgtcggccccatattgagagagcgcgtataataaagcaaggcacataggaaggatttaaccacgtttcggtgtgtgaaaaactgggtgctatgtctgagggaaacacttggtggaagagagacgctacattgtggggggggcggcacaattgtgtggacccagttcacctagaagaaaattaagagcctaagaggggaagtcatgaaccgttgaagagtgtatatgcgttgttgagacgacgggtgaattgtattgtgttgtggaagaatttgcgaaacgagatgttgtataagagaaatttttgcg

SEQ ID NO: 301901 - DNA, 1173 bp, Homo sapiens
gagccttggagaccagaccaacagtaacaccaagggcaggtgggcaggcctccgccctcctcccctactccagggcccactgcagcctcagcccaggagccaccagatctcccaacaccatggtccgataccgcgtgaggagcctgagcgaacgctcgcacgaggtgtacaggcagcagttgcatgggcaagagcaaggacaccacggccaagaggagcaagggctgagcccggagcacgtcgaggtctacgagaggacccatggccagtctcactataggcgcagacactgctctcgaaggaggctgcaccggatccacaggcggcagcatcgctcctgcagaaggcgcaaaagacgctcctgcaggcaccggaggaggcatcgcagaggctgcagaaccaggaagagaacatgcagaaggcactaagcttcctgggcccctcacccccagctggaaattaagaaaaagtcgcccgaaacaccaagtgaggccatagcaattcccctacatcaaatgctcaagcccccagctggaagttaagagaaagtcacctgcccaagaaacaccgagtgaggccatagcaactcccctacatcaaatgctcaagccctgagttgccgccgagaagcccacaagatctgagtgaaatgagcaaaagtcacctgcccaataaagcttgacaagacaaaaaaaaaaaaaaaaaaaaaaaaaaaaaaaaaaaaaaaaaaaaaaaaaaaaaaaaaaacaaaataaaaaaaaaaaaaaaaaaaaaaaacaaagaagaagaggaagaaaagaacaacgacacacagcacacaccgcacacgaaacacacagccgacaccacgcagacgacgcactagcccgcgcgcgcgcgaccacacgcccaacagcgcgacccgagccccagcaccagccctgccaccgcgccccgacggcgcgcgccgccgcgcgcgcgcgagacgcggagaccgaggaccgcgagacacgaaggacaatcgacggcagacacaccagaacaagacatacgcactgcaaaccacgcaccacaacagagcagcaagaaagcggccaacgaaaaagacacaagacacgccaagaccaaagacaggagagcacagaaacaccggcaagaaagcacacagcagccgcagggagacataacacaaat

SEQ ID NO: 301902 - DNA, 710 bp, Homo sapiens
cagttagtcatattaacattggtaaacgagtgtccggccgaatcttgggatacaaggcaggtgggcaggcctccgccctcctcccctactccagggcccactgcagcctcagcccaggagccaccagatctcccaacaccatggtccgataccgcgtgaggagcctgagcgaacgctcgcacgaggtgtacaggcagcagttgcatgggcaagagcaaggacaccacggccaagaggagcaagggctgagcccggagcacgtcgaggtctacgagaggacccatggccagtctcactataggcgcagacactgctctcgaaggaggctgcaccggatccacaggcggcagcatcgctcctgcagaaggcgcaaaagacgctcctgcaggcaccggaggaggcatcgcagaggctgcagaaccaggaagagaacatgcagaaggcactaagcttcctgggcccctcacccccagctggaaattaagaaaaagtcgcccgaaacaccaagtgaggccatagcaattcccctacatcaaatgctcaagcccccagctggaagttaagagaaagtcacctgcccaagaaacaccgagtgaggccatagcaactcccctacatcaaatgctcaagccctgagttgccgccgagaagcccacaagatctgagtgaaatgagcaaaagtcacctgcccaataaagcttgacaagaca

SEQ ID NO: 301903 - DNA, 831 bp, Homo sapiens
cagttagtcatattaacattggtaaacgagtgtccggccgaatcttgggatacaaggcaggtgggcaggcctccgccctctgcagcctcagcccaggagccaccagatctcccaacaccatggtccgataccgcgtgaggagcctgagcgaacgctcgcacgaggtgtacaggcagcagttgcatgggcaagagcaaggacaccacggccaagaggagcaagggctgagcccggagcacgtcgaggtctacgagaggacccatggccagtctcactataggcgcagacactgctctcgaaggaggctgcaccggatccacaggcggcagcatcgctcctgcagaaggcgcaaaagacgctcctgcaggcaccggaggaggcatcgcagaggctgcagaaccaggaagagaacatgcagaaggcactaagcttcctgggcccctcacccccagctggaaattaagaaaaagtcgcccgaaacaccaagtgaggccatagcaattcccctacatcaaatgctcaagcccccagctggaagttaagagaaagtcacctgcccaagaaacaccgagtgaggccatagcaactcccctacatcaaatgctcaagccctgagttgccgccgagaagcccacaagatctgagtgaaatgagcaaaagtcacctgcccaataaagcttgacaagacaaagactcagaagaacttgtgataatatatgaaccagacgaaaacagtgcgcaacctcaaggtggtaccccgagaggaaccaccgaagcggcacgccgaaacttccgacacagaatggccaaaatggggtccctataaacgac

SEQ ID NO: 301904 - DNA, 128 bp, Homo sapiens
atcaaatgctcaagccctgagttgccgccgagaagcccacaagatctgagtgaaatgagcaaaagtcacctgcccaataaagcttgacaagacactcgctggcctgtcgggttttctttgcacgaatc

SEQ ID NO: 301905 - DNA, 1469 bp, Homo sapiens
aggactgagatcccagaacatgccacaccaagaagacatgtcccaaggggcagtggagccacagccaccagaagggacctggccctgtcggacctgctgaagctagccgtggagtgcaggggctttgttggtctggctgctaaccaaagggtggctaatgggaccctttccaggggcctctaggggatttcagtgggggcttgcttcgaggctctattaccactggactgtttaccaagagcctcagcctgacagagatgggaagagacgagtgagcatttctgacccaacacccccactgcagagttggggaaacatttacccaagataggaggaataaaaaggaaaaaaattgaatttatttccaaaaaacataccaaggtggacaagataggaaacaatacaatttatattacagttttattattatttaaaaattttatattaacaaaatgagatgggatctgcctatgttgcccaggctggtcttcaactcctgggctcaatctcctcggcctccgaaagtgtgattacaggcgtgagccaccgcacccggcccatattacagtttcatagtgtttttgattactcgtggtaggagaaatgtgtcttctttgcacttggggtctcaacgtctcagtcctgccctatgccccgagaccccaagaggctttcccaaggtcaggcagggaatccgcagagaggcagggctggactccagcatcctgactccccagttcgtgctctgtgctgcagagacctgttgcgtaacactgagtaactgtggattgtctaaccttttatgaaatttccagctggtcttttgctaccggccagcagtccagttggtgggagtgatgatgccggtcttctgggacgtccagtggacagattttccccaggtttctggatgcagccccaacaagcaaaagtgctacactcctgcaccgggaacactgacacaggggtcacgaaaatgctaaaacaagacgtgcaagaattgttgcgctccgcacacgtaacaagggctctgcctccccctcccccaatcttcgccctggtggccaggccctgggctccgccccttccccaccagaccgggggaggggtcctcctcggcatggaggtaggggatgctaggctgctggagacgcccgcagaaagaggcgggatggcggggcggatgctggcggcccgggtctggccacctgggtcagctgcacgcccccgccccgggctggccggacctcgtagcccaggtcccaccacgccgtgaagtttgcggaaagttttgcagttgcttccccgcccgcgccagcgggggagttgtgacgcagcgtctggggatcctggccgggacagaagagagggaaggcgaggcggggagagactgggaaacagagcagcaagagaaagggcgcacgctggggtcctcctggacccggcgtgtcctcctctccgccacccct

SEQ ID NO: 301906 - DNA, 1013 bp, Homo sapiens
  misc_feature (979)..(979): n is a, c, g, or t
  misc_feature (1002)..(1002): n is a, c, g, or t
  misc_feature (1011)..(1012): n is a, c, g, or t
aggactgagatcccagaacatgccacaccaagaagacatgtcccaaggggcagtggagccacagccaccagaagggacctggccctgtcggacctgctgaagctagccgtggagtgcaggggctttgttggtctggctgctaaccaaagggtggctaatgggaccctttccaggggcctctaggggatttcagtgggggcttgcttcgaggctctattaccactggactgtttaccaagagcctcagcctgacagagatgggaagagacgagtgagcatttctgacccaacacccccactgcagagttggggaaacatttacccaagataggaggaataaaaaggaaaaaaattgaatttatttccaaaaaacataccaaggtggacaagataggaaacaatacaatttatattacagttttattattatttaaaaattttatattaacaaaatgagatgggatctgcctatgttgcccaggctggtcttcaactcctgggctcaatctcctcggcctccgaaagtgtgattacaggcgtgagccaccgcacccggcccatattacagtttcatagtgtttttgattactcgtggtaggagaaatgtgtcttctttgcacttggggtctcaacgtctcagtcctgccctatgccccgagaccccaagaggctttcccaaggtcaggcagggaatccgcagagaggcagggctggactccagcatcctgactccccagttcgtgctctgtgctgcagagacctgttgcgtaacactgagtaactgtggattgtctaaccttttatgaaatttccagctggtcttttgctaccggccagcagtccagttggtgggagtgatgatgccggtcttctgggacgtccagtggacagattttccccaggtttctggatgcagccccaacaagcaaaagtgctacactcctgcaccgggaacactgacacaggggtcacgaaaatntcctcgcactcctgccttccccncgtgccgannt

SEQ ID NO: 301907 - DNA, 461 bp, Homo sapiens
ctggtggagacctggtctttgcctggtgtgtggccttctcctggccttgtgcctgggaacggggtgagggaagcagagcccagcctgaaccctgaccccttccctgtagacccctccctgagcccgtccccagcagcgctgccccccgccccgggcactgagctctcctacctcaacggcaccttccggctgcttcagaagccgctgcgctggcacgatgccctcctgctgtgtgagagccacaatgccagcctggcctacgtgcccgacccctacacccaggccttcctcacgcaggctcatcctggtgcgacagcgtgggacaatgtgaacatggactcgaagacatggccctttctctgtagttgattttttaaatgtgccattattgtttttaaaaaaaaaggaaaaaagaaaagcaaacaaataaaacacctttaagaggcttgaaagagaaggtt

SEQ ID NO: 301908 - DNA, 380 bp, Homo sapiens
cctctgttgatgtttcttacggacttccagctcattagtgaaaaaataagagtcaacatctttcttcgcagggtgagaaagaaacacccagagattttatttggcttttaattagcgattattccagtgctagagtgaatggtctcagaaatattaaatgttcagtttgaattagtttattacagaaaagcttcttggtttgcagtatgaaatctgcaactaaagtttacactttttacttaggcagaaaatatatactcgaagacatggccctttctctgtagttgattttttaaatgtgccattattgtttttaaaaaaaaaggaaaaaagaaaagcaaacaaataaaacacctttaagaggcttgaaagagaaggtt

SEQ ID NO: 301909 - DNA, 5716 bp, Homo sapiens
gtcccgacccggaggaggacgcgagccccttgcgggcggtcatcacagcccagcctcggggctgccacagcgcgttgcgcctgtgcgccctcggtccccgcgtccactgagcgccgcgctcggggatggggcccggccggccggcccccgcgccctggcctcgtcacctgctgcgctgcgtcctgctcctcgggtgcctgcacctcggccgtcccggcgcccctggggacgccgccctcccggaacccaacgtcttcctcatcttcagccatggactgcagggctgcctggaggcccagggcgggcaggtcagagtcaccccggcttgcaataccagcctccctgcccagcgctggaagtgggtctcccgaaaccggctattcaacctgggtaccatgcagtgcctgggcacaggctggccaggcaccaacaccacggcctccctgggcatgtatgagtgtgaccgggaagcactgaatcttcgctggcattgtcgtacactgggtgaccagctgtccttgctcctgggggcccgcaccagcaacatatccaagcctggcacccttgagcgtggtgaccagacccgcagtggccagtggcgcatctacggcagcgaggaggacctatgtgctctgccctaccacgaggtctacaccatccagggaaactcccacggaaagccgtgcaccatccccttcaaatatgacaaccagtggttccacggctgcaccagcacgggccgcgaggatggtcacctgtggtgtgccaccacccaggactacggcaaagacgagcgctggggcttctgccccatcaagagtaacgactgcgagaccttctgggacaaggaccagctgactgacagctgctaccagtttaacttccagtccacgctgtcgtggagggaggcctgggccagctgcgagcagcagggtgcggatctgctgagcatcacggagatccacgagcagacctacatcaacggcctcctcactgggtacagctccaccctgtggatcggcttgaatgacttggacacgagcggaggctggcagtggtcggacaactcgcccctcaagtacctcaactgggagagtgaccagccggacaaccccagtgaggagaactgtggagtgatccgcactgagtcctcgggcggctggcagaaccgtgactgcagcatcgcgctgccctatgtgtgcaagaagaagcccaacgccacggccgagcccacccctccagacaggtgggccaatgtgaaggtggagtgcgagccgagctggcagcccttccagggccactgctaccgcctgcaggccgagaagcgcagctggcaggagtccaagaaggcatgtctacggggcggtggcgacctggtcagcatccacagcatggcggagctggaattcatcaccaagcagatcaagcaagaggtggaggagctgtggatcggcctcaacgatttgaaactgcagatgaattttgagtggtctgacgggagccttgtgagcttcacccactggcacccctttgagcccaacaacttccgggacagtctggaggactgtgtcaccatctggggcccggaaggccgctggaacgacagtccctgtaaccagtccttgccatccatctgcaagaaggcaggccagctgagccagggggccgccgaggaggaccatggctgccggaagggttggacgtggcacagcccatcctgctactggctgggagaagaccaagtgacctacagtgaggcccggcgcctgtgcactgaccatggctctcagctggtcaccatcaccaacaggttcgagcaggccttcgtcagcagcctcatctacaactgggagggcgagtacttctggacggccctgcaggacctcaacagcaccggctccttcttctggctcagtggggatgaagtcatgtacacccactggaaccgggaccagcccgggtacagccgtgggggctgcgtggcgctggccactggcagcgccatggggctgtgggaggtgaagaactgtacctcgttccgggcccgctacatctgccggcagagcctgggcactccagtgacgccggagctgccggggccagatcccacgcccagcctcactggctcctgtccccagggctgggcctcggacaccaaactccggtattgctataaggtgttcagctcagagcggctgcaggacaagaagagctgggtccaggcccagggggcctgccaggagctgggggcccagctgctgagcctggccagctacgaggaggagcactttgtggccaacatgctcaacaagatcttcggtgaatcagaacccgagatccacgagcagcactggttctggatcggcctgaaccgtcgggatcccagagggggtcagagttggcgctggagcgacggcgtagggttctcttaccacaatttcgaccggagccggcacgacgacgacgacatccgaggctgtgcggtgctggacctggcctccctgcagtgggtggccatgcagtgcgacacacagctggactggatctgcaagatccccagaggtacggacgtgcgggagcccgacgacagccctcaaggccgacgggaatggctgcgcttccaggaggccgagtacaagttctttgagcaccactccacgtgggcgcaggcgcagcgcatctgcacgtggttccaggccgagctgacctccgtgcacagccaggcggagctagacttcctgagccacaacttgcagaagttctcccgggcccaggagcagcactggtggatcggcctgcacacctctgagagcgatcgggcgcttcagatggacagatggttccattataaacttcatctcctgggcaccaggcaaacctcggcctgtcggcaaggacaagaagtgcgtgtacatgacagccagccgagaggactggggggaccagaggtgcctgacagccttgccctacatctgcaagcgcagcaacgtcaccaaagaaacgcagcccccagacctgccaactacagccctggggggctgcccctctgactggatccagttcctcaacaagtgttttcaggtccagggccaggaaccccagagccgggtgaagtggtcagaggcacagttctcctgtgaacagcaagaggcccagctggtcaccatcacaaaccccttagagcaagcattcatcacagccagcctgcccaatgtgacctttgacctttggattggcctccatgcctcgcagagggacttccagtgggtggagcaggagcctttgatgtatgccaactgggcacctggggagccctctggccctagccctgctcccagtggcaacaaaccgaccagctgtgcggtggtcctgcacagcccctcagcccacttcactggccgctgggacgatcggagctgcacggaggagacccatggcttcatctgccagaagggcacggacccctccctgagcccgtccccagcagcgctgccccccgccccgggcactgagctctcctacctcaacggcaccttccggctgcttcagaagccgctgcgctggcacgatgccctcctgctgtgtgagagccacaatgccagcctggcctacgtgcccgacccctacacccaggccttcctcacgcaggctgcccgagggctgcgcacgccgctctggattgggctggctggcgaggagggctctcggcggtactcctgggtctcagaggagccgctgaactacgtgggctggcaggacggggagccgcagcagccggggggctgtacctacgtagatgtggacggggcctggcgcaccaccagctgtgacaccaagctgcagggggctgtgtgtggggttagcagtgggccccctcctccccgaagaataagctaccatggcagctgtccccagggactggcagactccgcgtggattcccttccgggagcactgctattctttccacatggagctgctgctgggccacaaggaggcgcgacagcgctgccagagagcgggtggggccgtcctgtctatcctggatgagatggagaatgtgtttgtctgggagcacctgcagagctatgagggccagagtcggggcgcctggctgggcatgaacttcaaccccaaaggaggcactctggtctggcaggacaacacagctgtgaactactccaactgggggcccccgggcttgggccccagcatgctgagccacaacagctgctactggattcagagcaacagcgggctatggcgccccggcgcttgcaccaacatcaccatgggtgtcgtctgcaagcttcctcgtgctgagcagagcagcttctccccatcagcgcttccagagaacccagcggccctggtggtggtgctgatggcggtgctgctgctcctggccttgctgaccgcagccctcatcctttaccggaggcgccagagcatcgagcgcggggcctttgagggtgcccgctacagccgcagcagctccagccccaccgaggccactgagaagaacatcctggtgtcagacatggaaatgaatgagcaacaagaatagagccaggcgcgtgggcagggccagggcgggaggagctggggagctggggccctgggtcagtctggccccccaccagctgcctgtccagttggcctatggaagggtgcccttgggagtcgctgttgggagccggagctgggcagagcctgggctggtggggtgccaccctcccacaagggctgggctgagacccagctgagtgcagcgtggcgtttccctttctgggggggcctgaggtcttgtcacctggtcctgtgcccccacaggaaccagaggtaggatgggagggggaacgagagcctctttctccccagagcccccggcccaggcctgttgatccgcgccccaggacccccttctttgcagagcccgaggagcctcccctgtcccctcgggcagatctgttgtgtctctcttcccacctggcagcctcagctctgtgcccctcaccctgctccctctcgccccttctctcccaccccttccttctgagccgggccctggggattggggagccctcttgttcctgatgagggtcagctgagggggctgagcatccatcactcctgtgcctgctggggtggctgtggggcgtggcaggaggggcctaggtgggttgggcctgagaaccagggcacgggtgtggtgtctgctgggctggagataagactggggagagacaccccaacctcccagggtgggagctgggccgggctgggatgtcatctcctgccgggcgggggagggctctgcccctggaagagtcccctgtggggaccaaaataagttccctaacatctccagctcctggctctggtttggagcaaggggaagggttgccagagtcctgggggccccagaggagcaggagtctgggagggcccagagttcaccctctagtggatccaggaggagcagcacccgagccctggagtggcccagtacccttccaagaggccacagtcccagccaggacaaagtatgcggcccatcctggtgcgacagcgtgggacaatgtgaacatggactcgaagacatggccctttctctgtagttgattttttaaatgtgccattattgtttttaaaaaaaaaggaaaaaagaaaagcaaacaaataaaacacctttaagaggcttgaaagagaaggtt

SEQ ID NO: 301910 - DNA, 5628 bp, Homo sapiens
gtcccgacccggaggaggacgcgagccccttgcgggcggtcatcacagcccagcctcggggctgccacagcgcgttgcgcctgtgcgccctcggtccccgcgtccactgagcgccgcgctcggggatggggcccggccggccggcccccgcgccctggcctcgtcacctgctgcgctgcgtcctgctcctcgggtgcctgcacctcggccgtcccggcgcccctggggacgccgccctcccggaacccaacgtcttcctcatcttcagccatggactgcagggctgcctggaggcccagggcgggcaggtcagagtcaccccggcttgcaataccagcctccctgcccagcgctggaagtgggtctcccgaaaccggctattcaacctgggtaccatgcagtgcctgggcacaggctggccaggcaccaacaccacggcctccctgggcatgtatgagtgtgaccgggaagcactgaatcttcgctggcattgtcgtacactgggtgaccagctgtccttgctcctgggggcccgcaccagcaacatatccaagcctggcacccttgagcgtggtgaccagacccgcagtggccagtggcgcatctacggcagcgaggaggacctatgtgctctgccctaccacgaggtctacaccatccagggaaactcccacggaaagccgtgcaccatccccttcaaatatgacaaccagtggttccacggctgcaccagcacgggccgcgaggatggtcacctgtggtgtgccaccacccaggactacggcaaagacgagcgctggggcttctgccccatcaagagtaacgactgcgagaccttctgggacaaggaccagctgactgacagctgctaccagtttaacttccagtccacgctgtcgtggagggaggcctgggccagctgcgagcagcagggtgcggatctgctgagcatcacggagatccacgagcagacctacatcaacggcctcctcactgggtacagctccaccctgtggatcggcttgaatgacttggacacgagcggaggctggcagtggtcggacaactcgcccctcaagtacctcaactgggagagtgaccagccggacaaccccagtgaggagaactgtggagtgatccgcactgagtcctcgggcggctggcagaaccgtgactgcagcatcgcgctgccctatgtgtgcaagaagaagcccaacgccacggccgagcccacccctccagacaggtgggccaatgtgaaggtggagtgcgagccgagctggcagcccttccagggccactgctaccgcctgcaggccgagaagcgcagctggcaggagtccaagaaggcatgtctacggggcggtggcgacctggtcagcatccacagcatggcggagctggaattcatcaccaagcagatcaagcaagaggtggaggagctgtggatcggcctcaacgatttgaaactgcagatgaattttgagtggtctgacgggagccttgtgagcttcacccactggcacccctttgagcccaacaacttccgggacagtctggaggactgtgtcaccatctggggcccggaaggccgctggaacgacagtccctgtaaccagtccttgccatccatctgcaagaaggcaggccagctgagccagggggccgccgaggaggaccatggctgccggaagggttggacgtggcacagcccatcctgctactggctgggagaagaccaagtgacctacagtgaggcccggcgcctgtgcactgaccatggctctcagctggtcaccatcaccaacaggttcgagcaggccttcgtcagcagcctcatctacaactgggagggcgagtacttctggacggccctgcaggacctcaacagcaccggctccttcttctggctcagtggggatgaagtcatgtacacccactggaaccgggaccagcccgggtacagccgtgggggctgcgtggcgctggccactggcagcgccatggggctgtgggaggtgaagaactgtacctcgttccgggcccgctacatctgccggcagagcctgggcactccagtgacgccggagctgccggggccagatcccacgcccagcctcactggctcctgtccccagggctgggcctcggacaccaaactccggtattgctataaggtgttcagctcagagcggctgcaggacaagaagagctgggtccaggcccagggggcctgccaggagctgggggcccagctgctgagcctggccagctacgaggaggagcactttgtggccaacatgctcaacaagatcttcggtgaatcagaacccgagatccacgagcagcactggttctggatcggcctgaaccgtcgggatcccagagggggtcagagttggcgctggagcgacggcgtagggttctcttaccacaatttcgaccggagccggcacgacgacgacgacatccgaggctgtgcggtgctggacctggcctccctgcagtgggtggccatgcagtgcgacacacagctggactggatctgcaagatccccagaggtacggacgtgcgggagcccgacgacagccctcaaggccgacgggaatggctgcgcttccaggaggccgagtacaagttctttgagcaccactccacgtgggcgcaggcgcagcgcatctgcacgtggttccaggccgagctgacctccgtgcacagccaggcggagctagacttcctgagccacaacttgcagaagttctcccgggcccaggagcagcactggtggatcggcctgcacacctctgagagcgatcgggcgcttcagatggacagatggttccattataaacttcatctcctgggcaccaggcaaacctcggcctgtcggcaaggacaagaagtgcgtgtacatgacagccagccgagaggactggggggaccagaggtgcctgacagccttgccctacatctgcaagcgcagcaacgtcaccaaagaaacgcagcccccagacctgccaactacagccctggggggctgcccctctgactggatccagttcctcaacaagtgttttcaggtccagggccaggaaccccagagccgggtgaagtggtcagaggcacagttctcctgtgaacagcaagaggcccagctggtcaccatcacaaaccccttagagcaagcattcatcacagccagcctgcccaatgtgacctttgacctttggattggcctccatgcctcgcagagggacttccagtgggtggagcaggagcctttgatgtatgccaactgggcacctggggagccctctggccctagccctgctcccagtggcaacaaaccgaccagctgtgcggtggtcctgcacagcccctcagcccacttcactggccgctgggacgatcggagctgcacggaggagacccatggcttcatctgccagaagggcacggacccctccctgagcccgtccccagcagcgctgccccccgccccgggcactgagctctcctacctcaacggcaccttccggctgcttcagaagccgctgcgctggcacgatgccctcctgctgtgtgagagccacaatgccagcctggcctacgtgcccgacccctacacccaggccttcctcacgcaggctgcccgagggctgcgcacgccgctctggattgggctggctggcgaggagggctctcggcggtactcctgggtctcagaggagccgctgaactacgtgggctggcaggacggggagccgcagcagccggggggctgtacctacgtagatgtggacggggcctggcgcaccaccagctgtgacaccaagctgcagggggctgtgtgtggggttagcagtgggccccctcctccccgaagaataagctaccatggcagctgtccccagggactggcagactccgcgtggattcccttccgggagcactgctattctttccacatggagctgctgctgggccacaaggaggcgcgacagcgctgccagagagcgggtggggccgtcctgtctatcctggatgagatggagaatgtgtttgtctgggagcacctgcagagctatgagggccagagtcggggcgcctggctgggcatgaacttcaaccccaaaggaggcactctggtctggcaggacaacacagctgtgaactactccaactgggggcccccgggcttgggccccagcatgctgagccacaacagctgctactggattcagagcaacagcgggctatggcgccccggcgcttgcaccaacatcaccatgggtgtcgtctgcaagcttcctcgtgctgagcagagcagcttctccccatcagcgcttccagagaacccagcggccctggtggtggtgctgatggcggtgctgctgctcctggccttgctgaccgcagccctcatcctttaccggaggcgccagagcatcgagcgcggggcctttgagggtgcccgctacagccgcagcagctccagccccaccgaggccactgagaagaacatcctggtgtcagacatggaaatgaatgagcaacaagaatagagccaggcgcgtgggcagggccagggcgggaggagctggggagctggggccctgggtcagtctggccccccaccagctgcctgtccagttggcctatggaagggtgcccttgggagtcgctgttgggagccggagctgggcagagcctgggctggtggggtgccaccctcccacaagggctgggctgagacccagctgagtgcagcgtggcgtttccctttctgggggggcctgaggtcttgtcacctggtcctgtgcccccacaggaaccagaggtaggatgggagggggaacgagagcctctttctccccagagcccccggcccaggcctgttgatccgcgccccaggacccccttctttgcagagcccgaggagcctcccctgtcccctcgggcagatctgttgtgtctctcttcccacctggcagcctcagctctgtgcccctcaccctgctccctctcgccccttctctcccaccccttccttctgagccgggccctggggattggggagccctcttgttcctgatgagggtcagctgagggggctgagcatccatcactcctgtgcctgctggggtggctgtggggcgtggcaggaggggcctaggtgggttgggcctgagaaccagggcacgggtgtggtgtctgctgggctggagataagactggggagagacaccccaacctcccagggtgggagctgggccgggctgggatgtcatctcctgccgggcgggggagggctctgcccctggaagagtcccctgtggggaccaaaataagttccctaacatctccagctcctggctctggtttggagcaaggggaagggttgcctggagtggcccagtacccttccaagaggccacagtcccagccaggacaaagtatgcggcccatcctggtgcgacagcgtgggacaatgtgaacatggactcgaagacatggccctttctctgtagttgattttttaaatgtgccattattgtttttaaaaaaaaaggaaaaaagaaaagcaaacaaataaaacacctttaagaggcttgaaagagaaggtt

SEQ ID NO: 301911 - DNA, 3267 bp, Homo sapiens
ggcctggcacggtgcctgcctgggtccggtgtgcctgcaggctcgcctgctgccgcctggctctgccccggccctgccgcgcccgcctccggggcctggcgtgcagcctctgcctggccgccgctcccacgcccgcgctgctcctgcaggccgacgggaatggctgcgcttccaggaggccgagtacaagttctttgagcaccactccacgtgggcgcaggcgcagcgcatctgcacgtggttccaggccgagctgacctccgtgcacagccaggcggagctagacttcctgagccacaacttgcagaagttctcccgggcccaggagcagcactggtggatcggcctgcacacctctgagagcgatcgggcgcttcagatggacagatggttccattataaacttcatctcctgggcaccaggcaaacctcggcctgtcggcaaggacaagaagtgcgtgtacatgacagccagccgagaggactggggggaccagaggtgcctgacagccttgccctacatctgcaagcgcagcaacgtcaccaaagaaacgcagcccccagacctgccaactacagccctggggggctgcccctctgactggatccagttcctcaacaagtgttttcaggtccagggccaggaaccccagagccgggtgaagtggtcagaggcacagttctcctgtgaacagcaagaggcccagctggtcaccatcacaaaccccttagagcaagcattcatcacagccagcctgcccaatgtgacctttgacctttggattggcctccatgcctcgcagagggacttccagtgggtggagcaggagcctttgatgtatgccaactgggcacctggggagccctctggccctagccctgctcccagtggcaacaaaccgaccagctgtgcggtggtcctgcacagcccctcagcccacttcactggccgctgggacgatcggagctgcacggaggagacccatggcttcatctgccagaagggcacggacccctccctgagcccgtccccagcagcgctgccccccgccccgggcactgagctctcctacctcaacggcaccttccggctgcttcagaagccgctgcgctggcacgatgccctcctgctgtgtgagagccacaatgccagcctggcctacgtgcccgacccctacacccaggccttcctcacgcaggctgcccgagggctgcgcacgccgctctggattgggctggctggcgaggagggctctcggcggtactcctgggtctcagaggagccgctgaactacgtgggctggcaggacggggagccgcagcagccggggggctgtacctacgtagatgtggacggggcctggcgcaccaccagctgtgacaccaagctgcagggggctgtgtgtggggttagcagtgggccccctcctccccgaagaataagctaccatggcagctgtccccagggactggcagactccgcgtggattcccttccgggagcactgctattctttccacatggagctgctgctgggccacaaggaggcgcgacagcgctgccagagagcgggtggggccgtcctgtctatcctggatgagatggagaatgtgtttgtctgggagcacctgcagagctatgagggccagagtcggggcgcctggctgggcatgaacttcaaccccaaaggaggcactctggtctggcaggacaacacagctgtgaactactccaactgggggcccccgggcttgggccccagcatgctgagccacaacagctgctactggattcagagcaacagcgggctatggcgccccggcgcttgcaccaacatcaccatgggtgtcgtctgcaagcttcctcgtgctgagcagagcagcttctccccatcagcgcttccagagaacccagcggccctggtggtggtgctgatggcggtgctgctgctcctggccttgctgaccgcagccctcatcctttaccggaggcgccagagcatcgagcgcggggcctttgagggtgcccgctacagccgcagcagctccagccccaccgaggccactgagaagaacatcctggtgtcagacatggaaatgaatgagcaacaagaatagagccaggcgcgtgggcagggccagggcgggaggagctggggagctggggccctgggtcagtctggccccccaccagctgcctgtccagttggcctatggaagggtgcccttgggagtcgctgttgggagccggagctgggcagagcctgggctggtggggtgccaccctcccacaagggctgggctgagacccagctgagtgcagcgtggcgtttccctttctgggggggcctgaggtcttgtcacctggtcctgtgcccccacaggaaccagaggtaggatgggagggggaacgagagcctctttctccccagagcccccggcccaggcctgttgatccgcgccccaggacccccttctttgcagagcccgaggagcctcccctgtcccctcgggcagatctgttgtgtctctcttcccacctggcagcctcagctctgtgcccctcaccctgctccctctcgccccttctctcccaccccttccttctgagccgggccctggggattggggagccctcttgttcctgatgagggtcagctgagggggctgagcatccatcactcctgtgcctgctggggtggctgtggggcgtggcaggaggggcctaggtgggttgggcctgagaaccagggcacgggtgtggtgtctgctgggctggagataagactggggagagacaccccaacctcccagggtgggagctgggccgggctgggatgtcatctcctgccgggcgggggagggctctgcccctggaagagtcccctgtggggaccaaaataagttccctaacatctccagctcctggctctggtttggagcaaggggaagggttgccagagtcctgggggccccagaggagcaggagtctgggagggcccagagttcaccctctagtggatccaggaggagcagcacccgagccctggagtggcccagtacccttccaagaggccacagtcccagccaggacaaagtatgcggcccatcctggtgcgacagcgtgggacaatgtgaacatggactcgaagacatggccctttctctgtagttgattttttaaatgtgccattattgtttttaaaaaaaaaggaaaaaagaaaagcaaacaaataaaacacctttaagaggcttgaaagagaaggtt

SEQ ID NO: 301912 - DNA, 5400 bp, Homo sapiens
gtcccgacccggaggaggacgcgagccccttgcgggcggtcatcacagcccagcctcggggctgccacagcgcgttgcgcctgtgcgccctcggtccccgcgtccactgagcgccgcgctcggggatggggcccggccggccggcccccgcgccctggcctcgtcacctgctgcgctgcgtcctgctcctcgggtgcctgcacctcggccgtcccggcgcccctggggacgccgccctcccggaacccaacgtcttcctcatcttcagccatggactgcagggctgcctggaggcccagggcgggcaggtcagagtcaccccggcttgcaataccagcctccctgcccagcgctggaagtgggtctcccgaaaccggctattcaacctgggtaccatgcagtgcctgggcacaggctggccaggcaccaacaccacggcctccctgggcatgtatgagtgtgaccgggaagcactgaatcttcgctggcattgtcgtacactgggtgaccagctgtccttgctcctgggggcccgcaccagcaacatatccaagcctggcacccttgagcgtggtgaccagacccgcagtggccagtggcgcatctacggcagcgaggaggacctatgtgctctgccctaccacgaggtctacaccatccagggaaactcccacggaaagccgtgcaccatccccttcaaatatgacaaccagtggttccacggctgcaccagcacgggccgcgaggatggtcacctgtggtgtgccaccacccaggactacggcaaagacgagcgctggggcttctgccccatcaagagtaacgactgcgagaccttctgggacaaggaccagctgactgacagctgctaccagtttaacttccagtccacgctgtcgtggagggaggcctgggccagctgcgagcagcagggtgcggatctgctgagcatcacggagatccacgagcagacctacatcaacggcctcctcactgggtacagctccaccctgtggatcggcttgaatgacttggacacgagcggaggctggcagtggtcggacaactcgcccctcaagtacctcaactgggagagtgaccagccggacaaccccagtgaggagaactgtggagtgatccgcactgagtcctcgggcggctggcagaaccgtgactgcagcatcgcgctgccctatgtgtgcaagaagaagcccaacgccacggccgagcccacccctccagacaggtgggccaatgtgaaggtggagtgcgagccgagctggcagcccttccagggccactgctaccgcctgcaggccgagaagcgcagctggcaggagtccaagaaggcatgtctacggggcggtggcgacctggtcagcatccacagcatggcggagctggaattcatcaccaagcagatcaagcaagaggtggaggagctgtggatcggcctcaacgatttgaaactgcagatgaattttgagtggtctgacgggagccttgtgagcttcacccactggcacccctttgagcccaacaacttccgggacagtctggaggactgtgtcaccatctggggcccggaaggccgctggaacgacagtccctgtaaccagtccttgccatccatctgcaagaaggcaggccagctgagccagggggccgccgaggaggaccatggctgccggaagggttggacgtggcacagcccatcctgctactggctgggagaagaccaagtgacctacagtgaggcccggcgcctgtgcactgaccatggctctcagctggtcaccatcaccaacaggttcgagcaggccttcgtcagcagcctcatctacaactgggagggcgagtacttctggacggccctgcaggacctcaacagcaccggctccttcttctggctcagtggggatgaagtcatgtacacccactggaaccgggaccagcccgggtacagccgtgggggctgcgtggcgctggccactggcagcgccatggggctgtgggaggtgaagaactgtacctcgttccgggcccgctacatctgccggcagagcctgggcactccagtgacgccggagctgccggggccagatcccacgcccagcctcactggctcctgtccccagggctgggcctcggacaccaaactccggtattgctataaggtgttcagctcagagcggctgcaggacaagaagagctgggtccaggcccagggggcctgccaggagctgggggcccagctgctgagcctggccagctacgaggaggagcactttgtggccaacatgctcaacaagatcttcggtgaatcagaacccgagatccacgagcagcactggttctggatcggcctgaaccgtcgggatcccagagggggtcagagttggcgctggagcgacggcgtagggttctcttaccacaatttcgaccggagccggcacgacgacgacgacatccgaggctgtgcggtgctggacctggcctccctgcagtgggtggccatgcagtgcgacacacagctggactggatctgcaagatccccagaggtacggacgtgcgggagcccgacgacagccctcaaggccgacgggaatggctgcgcttccaggaggccgagtacaagttctttgagcaccactccacgtgggcgcaggcgcagcgcatctgcacgtggttccaggccgagctgacctccgtgcacagccaggcggagctagacttcctgagccacaacttgcagaagttctcccgggcccaggagcagcactggtggatcggcctgcacacctctgagagcgatcgggcgcttcagatggacagatggttccattataaacttcatctcctgggcaccaggcaaacctcggcctgtcggcaaggacaagaagtgcgtgtacatgacagccagccgagaggactggggggaccagaggtgcctgacagccttgccctacatctgcaagcgcagcaacgtcaccaaagaaacgcagcccccagacctgccaactacagccctggggggctgcccctctgactggatccagttcctcaacaagtgttttcaggtccagggccaggaaccccagagccgggtgaagtggtcagaggcacagttctcctgtgaacagcaagaggcccagctggtcaccatcacaaaccccttagagcaagcattcatcacagccagcctgcccaatgtgacctttgacctttggattggcctccatgcctcgcagagggacttccagtgggtggagcaggagcctttgatgtatgccaactgggcacctggggagccctctggccctagccctgctcccagtggcaacaaaccgaccagctgtgcggtggtcctgcacagcccctcagcccacttcactggccgctgggacgatcggagctgcacggaggagacccatggcttcatctgccagaagggcacggacccctccctgagcccgtccccagcagcgctgccccccgccccgggcactgagctctcctacctcaacggcaccttccggctgcttcagaagccgctgcgctggcacgatgccctcctgctgtgtgagagccacaatgccagcctggcctacgtgcccgacccctacacccaggccttcctcacgcaggctgcccgagggctgcgcacgccgctctggattgggctggctggcgaggagggctctcggcggtactcctgggtctcagaggagccgctgaactacgtgggctggcaggacggggagccgcagcagccggggggctgtacctacgtagatgtggacggggcctggcgcaccaccagctgtgacaccaagctgcagggggctgtgtgtggggttagcagtgggccccctcctccccgaagaataagctaccatggcagctgtccccagggactggcagactccgcgtggattcccttccgggagcactgctattctttccacatggagctgctgctgggccacaaggaggcgcgacagcgctgccagagagcgggtggggccgtcctgtctatcctggatgagatggagaatgtgtttgtctgggagcacctgcagagctatgagggccagagtcggggcgcctggctgggcatgaacttcaaccccaaaggaggcactctggtctggcaggacaacacagctgtgaactactccaactgggggcccccgggcttgggccccagcatgctgagccacaacagctgctactggattcagagcaacagcgggctatggcgccccggcgcttgcaccaacatcaccatgggtgtcgtctgcaagcttcctcgtgctgagcagagcagcttctccccatcagcgcttccagagaacccagcggccctggtggtggtgctgatggcggtgctgctgctcctggccttgctgaccgcagccctcatcctttaccggaggcgccagagcatcgagcgcggggcctttgagggtgcccgctacagccgcagcagctccagccccaccgaggccactgagaagaacatcctggtgtcagacatggaaatgaatgagcaacaagaatagagccaggcgcgtgggcagggccagggcgggaggagctggggagctggggccctgggtcagtctggccccccaccagctgcctgtccagttggcctatggaagggtgcccttgggagtcgctgttgggagccggagctgggcagagcctgggctggtggggtgccaccctcccacaagggctgggctgagacccagctgagtgcagcgtggcgtttccctttctgggggggcctgaggtcttgtcacctggtcctgtgcccccacaggaaccagaggtaggatgggagggggaacgagagcctctttctccccagagcccccggcccaggcctgttgatccgcgccccaggacccccttctttgcagagcccgaggagcctcccctgtcccctcgggcagatctgttgtgtctctcttcccacctggcagcctcagctctgtgcccctcaccctgctccctctcgccccttctctcccaccccttccttctgagccgggccctggggattggggagccctcttgttcctgatgagggtcagctgagggggctgagcatccatcactcctgtgcctgctggggtggctgtggggcgtggcaggaggggcctagcctggagtggcccagtacccttccaagaggccacagtcccagccaggacaaagtatgcggcccatcctggtgcgacagcgtgggacaatgtgaacatggactcgaagacatggccctttctctgtagttgattttttaaatgtgccattattgtttttaaaaaaaaaggaaaaaagaaaagcaaacaaataaaacacctttaagaggcttgaaagagaaggtt

SEQ ID NO: 301913 - DNA, 4462 bp, Homo sapiens
gtcccgacccggaggaggacgcgagccccttgcgggcggtcatcacagcccagcctcggggctgccacagcgcgttgcgcctgtgcgccctcggtccccgcgtccactgagcgccgcgctcggggatggggcccggccggccggcccccgcgccctggcctcgtcacctgctgcgctgcgtcctgctcctcgggtgcctgcacctcggccgtcccggcgcccctggggacgccgccctcccggaacccaacgtcttcctcatcttcagccatggactgcagggctgcctggaggcccagggcgggcaggtcagagtcaccccggcttgcaataccagcctccctgcccagcgctggaagtgggtctcccgaaaccggctattcaacctgggtaccatgcagtgcctgggcacaggctggccaggcaccaacaccacggcctccctgggcatgtatgagtgtgaccgggaagcactgaatcttcgctggcattgtcgtacactgggtgaccagctgtccttgctcctgggggcccgcaccagcaacatatccaagcctggcacccttgagcgtggtgaccagacccgcagtggccagtggcgcatctacggcagcgaggaggacctatgtgctctgccctaccacgaggtctacaccatccagggaaactcccacggaaagccgtgcaccatccccttcaaatatgacaaccagtggttccacggctgcaccagcacgggccgcgaggatggtcacctgtggtgtgccaccacccaggactacggcaaagacgagcgctggggcttctgccccatcaagagtaacgactgcgagaccttctgggacaaggaccagctgactgacagctgctaccagtttaacttccagtccacgctgtcgtggagggaggcctgggccagctgcgagcagcagggtgcggatctgctgagcatcacggagatccacgagcagacctacatcaacggcctcctcactgggtacagctccaccctgtggatcggcttgaatgacttggacacgagcggaggctggcagtggtcggacaactcgcccctcaagtacctcaactgggagagtgaccagccggacaaccccagtgaggagaactgtggagtgatccgcactgagtcctcgggcggctggcagaaccgtgactgcagcatcgcgctgccctatgtgtgcaagaagaagcccaacgccacggccgagcccacccctccagacaggtgggccaatgtgaaggtggagtgcgagccgagctggcagcccttccagggccactgctaccgcctgcaggccgagaagcgcagctggcaggagtccaagaaggcatgtctacggggcggtggcgacctggtcagcatccacagcatggcggagctggaattcatcaccaagcagatcaagcaagaggtggaggagctgtggatcggcctcaacgatttgaaactgcagatgaattttgagtggtctgacgggagccttgtgagcttcacccactggcacccctttgagcccaacaacttccgggacagtctggaggactgtgtcaccatctggggcccggaaggccgctggaacgacagtccctgtaaccagtccttgccatccatctgcaagaaggcaggccagctgagccagggggccgccgaggaggaccatggctgccggaagggttggacgtggcacagcccatcctgctactggctgggagaagaccaagtgacctacagtgaggcccggcgcctgtgcactgaccatggctctcagctggtcaccatcaccaacaggttcgagcaggccttcgtcagcagcctcatctacaactgggagggcgagtacttctggacggccctgcaggacctcaacagcaccggctccttcttctggctcagtggggatgaagtcatgtacacccactggaaccgggaccagcccgggtacagccgtgggggctgcgtggcgctggccactggcagcgccatggggctgtgggaggtgaagaactgtacctcgttccgggcccgctacatctgccggcagagcctgggcactccagtgacgccggagctgccggggccagatcccacgcccagcctcactggctcctgtccccagggctgggcctcggacaccaaactccggtattgctataaggtgttcagctcagagcggctgcaggacaagaagagctgggtccaggcccagggggcctgccaggagctgggggcccagctgctgagcctggccagctacgaggaggagcactttgtggccaacatgctcaacaagatcttcggtgaatcagaacccgagatccacgagcagcactggttctggatcggcctgaaccgtcgggatcccagagggggtcagagttggcgctggagcgacggcgtagggttctcttaccacaatttcgaccggagccggcacgacgacgacgacatccgaggctgtgcggtgctggacctggcctccctgcagtgggtggccatgcagtgcgacacacagctggactggatctgcaagatccccagaggtacggacgtgcgggagcccgacgacagccctcaaggccgacgggaatggctgcgcttccaggaggccgagtacaagttctttgagcaccactccacgtgggcgcaggcgcagcgcatctgcacgtggttccaggccgagctgacctccgtgcacagccaggcggagctagacttcctgagccacaacttgcagaagttctcccgggcccaggagcagcactggtggatcggcctgcacacctctgagagcgatcgggcgcttcagatggacagatggttccattataaacttcatctcctgggcaccaggcaaacctcggcctgtcggcaaggacaagaagtgcgtgtacatgacagccagccgagaggactggggggaccagaggtgcctgacagccttgccctacatctgcaagcgcagcaacgtcaccaaagaaacgcagcccccagacctgccaactacagccctggggggctgcccctctgactggatccagttcctcaacaagtgttttcaggtccagggccaggaaccccagagccgggtgaagtggtcagaggcacagttctcctgtgaacagcaagaggcccagctggtcaccatcacaaaccccttagagcaagcattcatcacagccagcctgcccaatgtgacctttgacctttggattggcctccatgcctcgcagagggacttccagtgggtggagcaggagcctttgatgtatgccaactgggcacctggggagccctctggccctagccctgctcccagtggcaacaaaccgaccagctgtgcggtggtcctgcacagcccctcagcccacttcactggccgctgggacgatcggagctgcacggaggagacccatggcttcatctgccagaagggcacggacccctccctgagcccgtccccagcagcgctgccccccgccccgggcactgagctctcctacctcaacggcaccttccggctgcttcagaagccgctgcgctggcacgatgccctcctgctgtgtgagagccacaatgccagcctggcctacgtgcccgacccctacacccaggccttcctcacgcaggctgcccgagggctgcgcacgccgctctggattgggctggctggcgaggagggctctcggcggtactcctgggtctcagaggagccgctgaactacgtgggctggcaggacggggagccgcagcagccggggggctgtacctacgtagatgtggacggggcctggcgcaccaccagctgtgacaccaagctgcagggggctgtgtgtggggttagcagtgggccccctcctccccgaagaataagctaccatggcagctgtccccagggactggcagactccgcgtggattcccttccgggagcactgctattctttccacatggagctgctgctgggccacaaggaggcgcgacagcgctgccagagagcgggtggggccgtcctgtctatcctggatgagatggagaatgtgtttgtctggaagagtcccctgtggggaccaaaataagttccctaacatctccagctcctggctctggtttggagcaaggggaagggttgccagagtcctgggggccccagaggagcaggagtctgggagggcccagagttcaccctctagtggatccaggaggagcagcacccgagccctggagtggcccagtacccttccaagaggccacagtcccagccaggacaaagtatgcggcccatcctggtgcgacagcgtgggacaatgtgaacatggactcgaagacatggccctttctctgtagttgattttttaaatgtgccattattgtttttaaaaaaaaaggaaaaaagaaaagcaaacaaataaaacacctttaagaggcttgaaagagaaggtt

SEQ ID NO: 301914 - DNA, 2847 bp, Homo sapiens
gtcccgacccggaggaggacgcgagccccttgcgggcggtcatcacagcccagcctcggggctgccacagcgcgttgcgcctgtgcgccctcggtccccgcgtccactgagcgccgcgctcggggatggggcccggccggccggcccccgcgccctggcctcgtcacctgctgcgctgcgtcctgctcctcgggtgcctgcacctcggccgtcccggcgcccctggggacgccgccctcccggaacccaacgtcttcctcatcttcagccatggactgcagggctgcctggaggcccagggcgggcaggtcagagtcaccccggcttgcaataccagcctccctgcccagcgctggaagtgggtctcccgaaaccggctattcaacctgggtaccatgcagtgcctgggcacaggctggccaggcaccaacaccacggcctccctgggcatgtatgagtgtgaccgggaagcactgaatcttcgctggcattgtcgtacactgggtgaccagctgtccttgctcctgggggcccgcaccagcaacatatccaagcctggcacccttgagcgtggtgaccagacccgcagtggccagtggcgcatctacggcagcgaggaggacctatgtgctctgccctaccacgaggtctacaccatccagggaaactcccacggaaagccgtgcaccatccccttcaaatatgacaaccagtggttccacggctgcaccagcacgggccgcgaggatggtcacctgtggtgtgccaccacccaggactacggcaaagacgagcgctggggcttctgccccatcaagagtaacgactgcgagaccttctgggacaaggaccagctgactgacagctgctaccagtttaacttccagtccacgctgtcgtggagggaggcctgggccagctgcgagcagcagggtgcggatctgctgagcatcacggagatccacgagcagacctacatcaacggcctcctcactgggtacagctccaccctgtggatcggcttgaatgacttggacacgagcggaggctggcagtggtcggacaactcgcccctcaagtacctcaactgggagagtgaccagccggacaaccccagtgaggagaactgtggagtgatccgcactgagtcctcgggcggctggcagaaccgtgactgcagcatcgcgctgccctatgtgtgcaagaagaagcccaacgccacggccgagcccacccctccagacaggtgggccaatgtgaaggtggagtgcgagccgagctggcagcccttccagggccactgctaccgcctgcaggccgagaagcgcagctggcaggagtccaagaaggcatgtctacggggcggtggcgacctggtcagcatccacagcatggcggagctggaattcatcaccaagcagatcaagcaagaggtggaggagctgtggatcggcctcaacgatttgaaactgcagatgaattttgagtggtctgacgggagccttgtgagcttcacccactggcacccctttgagcccaacaacttccgggacagtctggaggactgtgtcaccatctggggcccggaaggccgctggaacgacagtccctgtaaccagtccttgccatccatctgcaagaaggcaggccagctgagccagggggccgccgaggaggaccatggctgccggaagggttggacgtggcacagcccatcctgctactggctgggagaagaccaagtgacctacagtgaggcccggcgcctgtgcactgaccatggctctcagctggtcaccatcaccaacaggttcgagcaggccttcgtcagcagcctcatctacaactgggagggcgagtacttctggacggccctgcaggacctcaacagcaccggctccttcttctggctcagtggggatgaagtcatgtacacccactggaaccgggaccagcccgggtacagccgtgggggctgcgtggcgctggccactggcagcgccatggggctgtgggaggtgaagaactgtacctcgttccgggcccgctacatctgccggcagagcctgggcactccagtgacgccggagctgccggggccagatcccacgcccagcctcactggctcctgtccccagggctgggcctcggacaccaaactccggtattgctataaggtgttcagctcagagcggctgcaggacaagaagagctgggtccaggcccagggggcctgccaggagctgggggcccagctgctgagcctggccagctacgaggaggagcactttgtggccaacatgctcaacaagatcttcggtgaatcagaacccgagatccacgagcagcactggttctggatcggcctgaaccgtcgggatcccagagggggtcagagttggcgctggagcgacggcgtagggttctcttaccacaatttcgaccggagccggcacgacgacgacgacatccgaggctgtgcggtgctggacctggcctccctgcagtgggtggccatgcagtgcgacacacagctggactggatctgcaagatccccagaggtacggacgtgcgggagcccgacgacagccctcaaggccgacgggaatggctgcgcttccaggaggccgagtacaagttctttgagcaccactccacgtgggcgcaggcgcagcgcatctgcacgtggttccaggccgagctgacctccgtgcacagccaggcggagctagacttcctgagccacaacttgcagaagttctcccgggcccaggagcagcactggtggatcggcctgcacacctctgagagcgatcgggcgcttcaggcggaacccaggcaggcag

SEQ ID NO: 301915 - DNA, 1079 bp, Homo sapiens
gtcccgacccggaggaggacgcgagccccttgcgggcggtcatcacagcccagcctcggggctgccacagcgcgttgcgcctgtgcgccctcggtccccgcgtccactgagcgccgcgctcggggatggggcccggccggccggcccccgcgccctggcctcgtcacctgctgcgctgcgtcctgctcctcgggtgcctgcacctcggccgtcccggcgcccctggggacgccgccctcccggaacccaacgtcttcctcatcttcagccatggactgcagggctgcctggaggcccagggcgggcaggtcagagtcaccccggcttgcaataccagcctccctgcccagcgctggaagtgggtctcccgaaaccggctattcaacctgggtaccatgcagtgcctgggcacaggctggccaggcaccaacaccacggcctccctgggcatgtatgagtgtgaccgggaagcactgaatcttcgctggcattgtcgtacactgggtgaccagctgtccttgctcctgggggcccgcaccagcaacatatccaagcctggcacccttgagcgtggtgaccagacccgcagtggccagtggcgcatctacggcagcgaggaggacctatgtgctctgccctaccacgaggtctacaccatccagggaaactcccacggaaagccgtgcaccatccccttcaaatatgacaaccagtggttccacggctgcaccagcacgggccgcgaggatggtcacctgtggtgtgccaccacccaggactacggcaaagaggagcaggagtctgggagggcccagagttcaccctctagtggatccaggaggagcagcacccgagccctggagtggcccagtacccttccaagaggccacagtcccagccaggacaaagtatgcggcccatcctggtgcgacagcgtgggacaatgtgaacatggactcgaagacatggccctttctctgtagttgattttttaaatgtgccattattgtttttaaaaaaaaaggaaaaaagaaaagcaaacaaataaaacacctttaagaggcttgaaagagaaggtt

SEQ ID NO: 301916 - DNA, 2830 bp, Homo sapiens
gtcccgacccggaggaggacgcgagccccttgcgggcggtcatcacagcccagcctcggggctgccacagcgcgttgcgcctgtgcgccctcggtccccgcgtccactgagcgccgcgctcggggatggggcccggccggccggcccccgcgccctggcctcgtcacctgctgcgctgcgtcctgctcctcgggtgcctgcacctcggccgtcccggcgcccctggggacgccgccctcccggaacccaacgtcttcctcatcttcagccatggactgcagggctgcctggaggcccagggcgggcaggtcagagtcaccccggcttgcaataccagcctccctgcccagcgctggaagtgggtctcccgaaaccggctattcaacctgggtaccatgcagtgcctgggcacaggctggccaggcaccaacaccacggcctccctgggcatgtatgagtgtgaccgggaagcactgaatcttcgctggcattgtcgtacactgggtgaccagctgtccttgctcctgggggcccgcaccagcaacatatccaagcctggcacccttgagcgtggtgaccagacccgcagtggccagtggcgcatctacggcagcgaggaggacctatgtgctctgccctaccacgaggtctacaccatccagggaaactcccacggaaagccgtgcaccatccccttcaaatatgacaaccagtggttccacggctgcaccagcacgggccgcgaggatggtcacctgtggtgtgccaccacccaggactacggcaaagacgagcgctggggcttctgccccatcaagagtaacgactgcgagaccttctgggacaaggaccagctgactgacagctgctaccagtttaacttccagtccacgctgtcgtggagggaggcctgggccagctgcgagcagcagggtgcggatctgctgagcatcacggagatccacgagcagacctacatcaacggcctcctcactgggtacagctccaccctgtggatcggcttgaatgacttggacacgagcggaggctggcagtggtcggacaactcgcccctcaagtacctcaactgggagagtgaccagccggacaaccccagtgaggagaactgtggagtgatccgcactgagtcctcgggcggctggcagaaccgtgactgcagcatcgcgctgccctatgtgtgcaagaagaagcccaacgccacggccgagcccacccctccagacaggtgggccaatgtgaaggtggagtgcgagccgagctggcagcccttccagggccactgctaccgcctgcaggccgagaagcgcagctggcaggagtccaagaaggcatgtctacggggcggtggcgacctggtcagcatccacagcatggcggagctggaattcatcaccaagcagatcaagcaagaggtggaggagctgtggatcggcctcaacgatttgaaactgcagatgaattttgagtggtctgacgggagccttgtgagcttcacccactggcacccctttgagcccaacaacttccgggacagtctggaggactgtgtcaccatctggggcccggaaggccgctggaacgacagtccctgtaaccagtccttgccatccatctgcaagaaggcaggccagctgagccagggggccgccgaggaggaccatggctgccggaagggttggacgtggcacagcccatcctgctactggctgggagaagaccaagtgacctacagtgaggcccggcgcctgtgcactgaccatggctctcagctggtcaccatcaccaacaggttcgagcaggccttcgtcagcagcctcatctacaactgggagggcgagtacttctggacggccctgcaggacctcaacagcaccggctccttcttctggctcagtggggatgaagtcatgtacacccactggaaccgggaccagcccgggtacagccgtgggggctgcgtggcgctggccactggcagcgccatggggctgtgggaggtgaagaactgtacctcgttccgggcccgctacatctgccggcagagcctgggcactccagtgacgccggagctgccggggccagatcccacgcccagcctcactggctcctgtccccagggctgggcctcggacaccaaactccggtattgctataaggtgttcagctcagagcggctgcaggacaagaagagctgggtccaggcccagggggcctgccaggagctgggggcccagctgctgagcctggccagctacgaggaggagcactttgtggccaacatgctcaacaagatcttcggtgaatcagaacccgagatccacgagcagcactggttctggatcggcctgaaccgtcgggatcccagagggggtcagagttggcgctggagcgacggcgtagggttctcttaccacaatttcgaccggagccggcacgacgacgacgacatccgaggctgtgcggtgctggacctggcctccctgcagtgggtggccatgcagtgcgacacacagctggactggatctgcaagatccccagaggtacggacgtgcgggagcccgacgacagccctcaaggccgacgggaatggctgcgcttccaggaggccgagtacaagttctttgagcaccactccacgtgcacatgcgctgcgcctgtccccacgtggagtggtgctcaaagaacttgtactcggcctcctggaagcgcgatccttctagatctcgacctgagggctttcgtccttctcacgcaccttcgtatctcatgggtctcgagtggatccagcctagcggtgtgtcgcactgc

SEQ ID NO: 301917 - DNA, 891 bp, Homo sapiens
gtcccgacccggaggaggacgcgagccccttgcgggcggtcatcacagcccagcctcggggctgccacagcgcgttgcgcctgtgcgccctcggtccccgcgtccactgagcgccgcgctcggggatggggcccggccggccggcccccgcgccctggcctcgtcacctgctgcgctgcgtcctgctcctcgggtgcctgcacctcggccgtcccggcgcccctggggacgccgccctcccggaacccaacgtcttcctcatcttcagccatggactgcagggctgcctggaggcccagggcgggcaggtcagagtcaccccggcttgcaataccagcctccctgcccagcgctggaagtgggtctcccgaaaccggctattcaacctgggtaccatgcagtgcctgggcacaggctggccaggcaccaacaccacggcctccctgggcatgtatgagtgtgaccgggaagcactgaatcttcgctggcattgtcgtacactgggtgaccagctgtccttgctcctgggggcccgcaccagcaacatatccaagcctggcacccttgagcgtggtgaccagacccgcagtggccagtggcgcatctacggcagcgaggaggacctatgtgctctgccctaccacgaggtctacaccatccagggaaactcccacggaaagccgtgcaccatccccttcaaatatgacaaccagtggttccacggctgcaccatcctggtgcgacagcgtgggacaatgtgaacatggactcgaagacatggccctttctctgtagttgattttttaaatgtgccattattgtttttaaaaaaaaaggaaaaaagaaaagcaaacaaataaaacacctttaagaggcttgaaagagaaggtt

SEQ ID NO: 301918 - DNA, 1883 bp, Homo sapiens
gtcccgacccggaggaggacgcgagccccttgcgggcggtcatcacagcccagcctcggggctgccacagcgcgttgcgcctgtgcgccctcggtccccgcgtccactgagcgccgcgctcggggatggggcccggccggccggcccccgcgccctggcctcgtcacctgctgcgctgcgtcctgctcctcgggtgcctgcacctcggccgtcccggcgcccctggggacgccgccctcccggaacccaacgtcttcctcatcttcagccatggactgcagggctgcctggaggcccagggcgggcaggtcagagtcaccccggcttgcaataccagcctccctgcccagcgctggaagtgggtctcccgaaaccggctattcaacctgggtaccatgcagtgcctgggcacaggctggccaggcaccaacaccacggcctccctgggcatgtatgagtgtgaccgggaagcactgaatcttcgctggcattgtcgtacactgggtgaccagctgtccttgctcctgggggcccgcaccagcaacatatccaagcctggcacccttgagcgtggtgaccagacccgcagtggccagtggcgcatctacggcagcgaggaggacctatgtgctctgccctaccacgaggtctacaccatccagggaaactcccacggaaagccgtgcaccatccccttcaaatatgacaaccagtggttccacggctgcaccagcacgggccgcgaggatggtcacctgtggtgtgccaccacccaggactacggcaaagacgagcgctggggcttctgccccatcaagagtaacgactgcgagaccttctgggacaaggaccagctgactgacagctgctaccagtttaacttccagtccacgctgtcgtggagggaggcctgggccagctgcgagcagcagggtgcggatctgctgagcatcacggagatccacgagcagacctacatcaacggcctcctcactgggtacagctccaccctgtggatcggcttgaatgacttggacacgagcggaggctggcagtggtcggacaactcgcccctcaagtacctcaactgggagagtgaccagccggacaaccccagtgaggagaactgtggagtgatccgcactgagtcctcgggcggctggcagaaccgtgactgcagcatcgcgctgccctatgtgtgcaagaagaagcccaacgccacggccgagcccacccctccagacaggtgggccaatgtgaaggtggagtgcgagccgagctggcagcccttccagggccactgctaccgcctgcaggccgagaagcgcagctggcaggagtccaagaaggcatgtctacggggcggtggcgacctggtcagcatccacagcatggcggagctggaattcatcaccaagcagatcaagcaagaggtggaggagctgtggatcggcctcaacgatttgaaactgcagatgaattttgagtggtctgacgggagccttgtgagcttcacccactggcacccctttgagcccaacaacttccgggacagtctggaggactgtgtcaccatctggggcccggaaggccgctggaacgacagtccctgtaaccagtccttgccatccatctgcaagaaggcaggccagctgagccagggggccgccgaggaggaccatggctgccggaagagtcccagccaggacaaagtatgcggcccatcctggtgcgacagcgtgggacaatgtgaacatggactcgaagacatggccctttctctgtagttgattttttaaatgtgccattattgtttttaaaaaaaaaggaaaaaagaaaagcaaacaaataaaacacctttaagaggcttgaaagagaaggtt

SEQ ID NO: 301919 - DNA, 645 bp, Homo sapiens
gtcccgacccggaggaggacgcgagccccttgcgggcggtcatcacagcccagcctcggggctgccacagcgcgttgcgcctgtgcgccctcggtccccgcgtccactgagcgccgcgctcggggatggggcccggccggccggcccccgcgccctggcctcgtcacctgctgcgctgcgtcctgctcctcgggtgcctgcacctcggccgtcccggcgcccctggggacgccgccctcccggaacccaacgtcttcctcatcttcagccatggactgcagggctgcctggaggcccagggcgggcaggtcagagtcaccccggcttgcaataccagcctccctgcccagcgctggaagtgggtctcccgaaaccggctattcaacctgggtaccatgcagtgcctgggcacaggctggccaggcaccaacaccacggcctccctgggcatgtatgagtgtgaccgggaagcactgaatcttcgcatcctggtgcgacagcgtgggacaatgtgaacatggactcgaagacatggccctttctctgtagttgattttttaaatgtgccattattgtttttaaaaaaaaaggaaaaaagaaaagcaaacaaataaaacacctttaagaggcttgaaagagaaggtt

SEQ ID NO: 301920 - DNA, 826 bp, Homo sapiens
agaaagaggcgggatggcggggcggatgctggcggcccgggtctggccacctgggtcagctgcacgcccccgccccgggctggccggacctcgtagcccaggtcccaccacgccgtgaagtttgcggaaagttttgcagttgcttccccgcccgcgccagcgggggagttgtgacgcagcgtctggggatcctggccgggacagaagagagggaaggcgaggcggggagagactgggaaacagagcagcaagagaaagggcgcacgctggggtcctcctggacccggcgtgtcctcctctccgccacccctttctctccctcccgacgctctagccccagacccgcgcctcctccccttcccctcccacgctgcccacttcccttcccctctacccctcgaaccctcctccccggttctgcgctcctccctccgcccgggctgcctcctccctcctcctccccgggaggcatcacttcgtcccgacccggaggaggacgcgagccccttgcgggcggtcatcacagcccagcctcggggctgccacagcgcgttgcgcctgtgcgccctcggtccccgcgtccactgagcgccgcgctcggggatggggcccggccggccggcccccgcgccctggcctcgtcacctgctgcgctgcgtcctgctcctcgggtgcctgcacctcggccgtcccggcgcccctggggacgccgccctcccgggtaaggcgctgccaacttggccaacttcagggcccgggcggggggagcgccgaggcgcgggccgctctcgacttttccctccttttcccccctcttttctccaga

SEQ ID NO: 301921 - DNA, 89 bp, Homo sapiens
tcactgcacccagcctttgaccactattctttatgtccttgccacaaagtgggattgaccaaagatgtactgtctggagattaacagtt

SEQ ID NO: 301922 - DNA, 2134 bp, Homo sapiens
atgggaggtgcggcgacagtgtttgacgagagccgaaggaggctgtgggaggtgttggcggcggcggcgcgggcgcctgaggaggaggaggagaagcggatgagatcgtggggctcaccagcgtcccccatggcttctgagtagcgtgggagtggagtcagcaccaagccaggctccccgcgcctgccttgccctcacctgctcctgctctctgccagaggcagcatggtccgcagggcaccatggggcccgacagagtgacagcacgagaactgtgcgagaacgacgacctggccaccagcctcgtcctggacccctacctcggtttccgcacccataagatgaacgtcaggtctatcgctacctccgtgccttcctgccggaaagtggctttaccatcctgccctgcacgcgctactccatggagaccaacggggccaagatcgtgtccactcgtgcttggaaaaagaatgagaagctggagctgctggtgggctgcattgcagagctgcgggaggcagatgaggggctgctgagggccggtgagaatgacttcagcatcatgtactcaacccgcaagcggagtgctcagctgtggctgggcccagccgccttcatcaaccatgactgcaaacccaactgcaagtttgtgcctgcagatgggaacgcagcctgcgtgaaggtgctccgggacattgagcctggggacgaggtgacatgcttctacggcgagggcttcttcggcgagaagaatgagcactgtgaatgccacacctgtgagaggaaaggtgaaggagctttccgaaccaggcctagggagcccgcgttgccaccacggcccctggacaagtaccagctgcgtgagaccaagcggcggctgcagcaaggcctggacagtggcagccgacagggcctgctgggccctcgggcctgcgtgcacccatccccgctgcgccgggacccattctgcgccgcctgccagcccctgcgcctgccagcctgcagcgcccgcccagacacctcacccctctggctccagtggctgcctcagccccagccccgagtgcggccccggaagcgccgacgcccccggccccggagggccccagtgctctccacccaccacgctgcccgcgtctccctgcaccgatggggaggctgtggcccccactgccgcctgcgaggagaggccctggtggccctgggccagcccccccacgcccgctgggcccctcagcaggactggcactgggcccggcgctatgggctgccttacgtggtgcgtgtggaccttcgtcgcctggccccagccccaccagctaccccagcccctgctgggaccccaggccccatcctgatcccgaagcaggccctcgccttcgcccccttctccccacccaagcgcctacggctggtggtcagccacggctccatcgacctggatgtcggcggtgaagagctgtgacaggccggacggggaggcccagcagggagagagggtctctctcctagctgctacccaggacctccagaaggagcccttggacctctgggagggagctgacccttgactccagcatagctctgaccctggaatggggttggtttggacacccccagggatctgagccctgaccctttgtgactgctgacccctgagccacccccactcccacagggagccccggccatttgctgccctccccacccctgccccagcctcaggactgcaggagccatccgcccccctcagccccttcctccccagggagcaaagccataaggggcaggggccaccccacggcatctccccagaagtacaggcctcaggaggaggtggaactgatgtagggggtggcactccccagagactgccctcacgaggggactgggttcgctctcagctctgcagctgtctgcggtggggggaaggttggggggtgtctggaggcatgttcccctcaccaccccccgtgggtctcagggaggccgggtgtgacctcatctttctcatggtgctatcctggtgctattggggtggggagctccctcccctcccccacaccagaaaggggtatgttgggggcttggaagcacttgaactttttattttattaaaaccttgttataagca

SEQ ID NO: 301923 - DNA, 2616 bp, Homo sapiens
atgggaggtgcggcgacagtgtttgacgagagccgaaggaggctgtgggaggtgttggcggcggcggcgcgggcgcctgaggaggaggaggagaagcggatgagatcgtggggctcaccagcgtcccccatggcttctgagtagcgtgggagtggagtcagcaccaagccaggctccccgcgcctgccttgccctcacctgctcctgctctctgccagaggcagcatggtccgcagggcaccatggggcccgacagagtgacagcacgagaactgtgcgagaacgacgacctggccaccagcctcgtcctggacccctacctcggtttccgcacccataagatgaacgtcaggtctatcgctacctccgtgccttcctgccggaaagtggctttaccatcctgccctgcacgcgctactccatggagaccaacggggccaagatcgtgtccactcgtgcttggaaaaagaatgagaagctggagctgctggtgggctgcattgcagagctgcgggaggcagatgaggggctgctgagggccggtgagaatgacttcagcatcatgtactcaacccgcaagcggagtgctcagctgtggctgggcccagccgccttcatcaaccatgactgcaaacccaactgcaagtttgtgcctgcagatgggaacgcagcctgcgtgaaggtgctccgggacattgagcctggggacgaggtgacatgcttctacggcgagggcttcttcggcgagaagaatgagcactgtgaatgccacacctgtgagaggaaaggtgaaggagctttccgaaccaggcctagggagcccgcgttgccaccacggcccctggacaagtaccagctgcgtgagaccaagcggcggctgcagcaaggcctggacagtggcagccgacagggcctgctgggccctcgggcctgcgtgcacccatccccgctgcgccgggacccattctgcgccgcctgccagcccctgcgcctgccagcctgcagcgcccgcccagacacctcacccctctggctccagtggctgcctcagccccagccccgagtgcggccccggaagcgccgacgcccccggccccggagggccccagtgctctccacccaccacgctgcccgcgtctccctgcaccgatggggaggctgtggcccccactgccgcctgcgaggagaggccctggtggccctgggccagcccccccacgcccgctgggcccctcagcaggactggcactgggcccggcgctatgggctgccttacgtggtgcgtgtggaccttcgtcgcctggccccagccccaccagctaccccagcccctgctgggaccccaggccccatcctgatcccgaagcaggccctcgccttcgcccccttctccccacccaagcgcctacggctggtggtcagccacggctccatcgacctggatgtcggcggtgaagagctgtgacaggccggacggggaggcccagcagggagagagggtctctctcctagctgctacccaggacctccagaaggagcccttggacctctgggagggagctgacccttgactccagcatagctctgaccctggaatggggttggtttggacacccccagggatctgagccctgaccctttgtgactgctgacccctgagccacccccactcccacagggagccccggccatttgctgccctccccacccctgccccagcctcaggactgcaggagccatccgcccccctcagccccttcctccccagggagcaaagccataaggggcaggggccaccccacggcatctccccagaagtacaggcctcaggaggaggtggaactgatgtagggggtggcactccccagagactgccctcacgaggggactgggttcgctctcagctctgcagctgtctgcggtggggggaaggttggggggtgtctggaggcatgttcccctcaccaccccccgtgggtctcagggaggccgggtgtgacctcatctttctcatggtgctatcctggtgctattggggtggggagctccctcccctcccccacaccagaaaggggtatgttgggggcttggaagcacttgaactttttattttattaaaaccttgttataagcagcacccttggcggttttttgttttggcttatgttttgaagggatgtgaggagggtgagaccctcagctgtgctgatgagagggggaggaggcaacacaggccttcagccctgagagctgtcgggagagggatttgggagcgtgatggactaggggactgaggctggagccccatccccactcaggctgtgcttgtaaaaatgccttgagacccatactctcctaggagtgggtcctcccattttccaggcgaggtcaacatcgtttagcaagcagagtgacttgccaaggccacgtggggacttgagggcccttctcccttctcgcgcttctcaatgagatgcccctcccacatctcactccaaacggagagagactgctgggggcctggctgagtgagggtgtgggggctgcccaggacaccagagccgagcctgggggaggcggcgctgacaggaccttcctcagctgtggcatcttggg

SEQ ID NO: 301924 - DNA, 2782 bp, Homo sapiens
atgggaggtgcggcgacagtgtttgacgagagccgaaggaggctgtgggaggtgttggcggcggcggcgcgggcgcctgaggaggaggaggagaagcggatgagatcgtggggctcaccagcgtcccccatggcttctgagtagcgtgggagtggagtcagcaccaagccaggctccccgcgcctgccttgccctcacctgctcctgctctctgccagaggcagcatggtccgcagggcaccatggggcccgacagagtgacagcacgagaactgtgcgagaacgacgacctggccaccagcctcgtcctggacccctacctcggtttccgcacccataagatgaacgtcagccctgtgccccccctgcggcgacagcagcacctgcgctcagcgctggaaactttcctgaggcagcgggacctggaggctgcgtaccgggccctgacgctgggaggctggacggcccgctacttccagagccggggcccgcggcaggaggctgccctcaagacccacgtctatcgctacctccgtgccttcctgccggaaagtggctttaccatcctgccctgcacgcgctactccatggagaccaacggggccaagatcgtgtccactcgtgcttggaaaaagaatgagaagctggagctgctggtgggctgcattgcagagctgcgggaggcagatgaggggctgctgagggccggtgagaatgacttcagcatcatgtactcaacccgcaagcggagtgctcagctgtggctgggcccagccgccttcatcaaccatgactgcaaacccaactgcaagtttgtgcctgcagatgggaacgcagcctgcgtgaaggtgctccgggacattgagcctggggacgaggtgacatgcttctacggcgagggcttcttcggcgagaagaatgagcactgtgaatgccacacctgtgagaggaaaggtgaaggagctttccgaaccaggcctagggagcccgcgttgccaccacggcccctggacaagtaccagctgcgtgagaccaagcggcggctgcagcaaggcctggacagtggcagccgacagggcctgctgggccctcgggcctgcgtgcacccatccccgctgcgccgggacccattctgcgccgcctgccagcccctgcgcctgccagcctgcagcgcccgcccagacacctcacccctctggctccagtggctgcctcagccccagccccgagtgcggccccggaagcgccgacgcccccggccccggagggccccagtgctctccacccaccacgctgcccgcgtctccctgcaccgatggggaggctgtggcccccactgccgcctgcgaggagaggccctggtggccctgggccagcccccccacgcccgctgggcccctcagcaggactggcactgggcccggcgctatgggctgccttacgtggtgcgtgtggaccttcgtcgcctggccccagccccaccagctaccccagcccctgctgggaccccaggccccatcctgatcccgaagcaggccctcgccttcgcccccttctccccacccaagcgcctacggctggtggtcagccacggctccatcgacctggatgtcggcggtgaagagctgtgacaggccggacggggaggcccagcagggagagagggtctctctcctagctgctacccaggacctccagaaggagcccttggacctctgggagggagctgacccttgactccagcatagctctgaccctggaatggggttggtttggacacccccagggatctgagccctgaccctttgtgactgctgacccctgagccacccccactcccacagggagccccggccatttgctgccctccccacccctgccccagcctcaggactgcaggagccatccgcccccctcagccccttcctccccagggagcaaagccataaggggcaggggccaccccacggcatctccccagaagtacaggcctcaggaggaggtggaactgatgtagggggtggcactccccagagactgccctcacgaggggactgggttcgctctcagctctgcagctgtctgcggtggggggaaggttggggggtgtctggaggcatgttcccctcaccaccccccgtgggtctcagggaggccgggtgtgacctcatctttctcatggtgctatcctggtgctattggggtggggagctccctcccctcccccacaccagaaaggggtatgttgggggcttggaagcacttgaactttttattttattaaaaccttgttataagcagcacccttggcggttttttgttttggcttatgttttgaagggatgtgaggagggtgagaccctcagctgtgctgatgagagggggaggaggcaacacaggccttcagccctgagagctgtcgggagagggatttgggagcgtgatggactaggggactgaggctggagccccatccccactcaggctgtgcttgtaaaaatgccttgagacccatactctcctaggagtgggtcctcccattttccaggcgaggtcaacatcgtttagcaagcagagtgacttgccaaggccacgtggggacttgagggcccttctcccttctcgcgcttctcaatgagatgcccctcccacatctcactccaaacggagagagactgctgggggcctggctgagtgagggtgtgggggctgcccaggacaccagagccgagcctgggggaggcggcgctgacaggaccttcctcagctgtggcatcttggg

SEQ ID NO: 301925 - DNA, 2738 bp, Homo sapiens
atgggaggtgcggcgacagtgtttgacgagagccgaaggaggctgtgggaggtgttggcggcggcggcgcgggcgcctgaggaggaggaggagaagcggatgagatcgtggggctcaccagcgtcccccatggcttctgagtagcgtgggagtggagtcagcaccaagccaggctccccgcgcctgccttgccctcacctgctcctgctctctgccagaggcagcatggtccgcagggcaccatggggcccgacagagtgacagcacgagaactgtgcgagaacgacgacctggccaccagcctcgtcctggacccctacctcggtttccgcacccataagatgaacgtcagccctgtgccccccctgcggcgacagcagcacctgcgctcagcgctggaaactttcctgaggcagcgggacctggaggctgcgtaccgggccctgacgctgggaggctggacggcccgctacttccagagccggggcccgcggcaggaggctgccctcaagacccacgtctatcgctacctccgtgccttcctgccggaaagtggctttaccatcctgccctgcacgcgctactccatggagaccaacggggccaagatcgtgtccactcgtgcttgagctgcgggaggcagatgaggggctgctgagggccggtgagaatgacttcagcatcatgtactcaacccgcaagcggagtgctcagctgtggctgggcccagccgccttcatcaaccatgactgcaaacccaactgcaagtttgtgcctgcagatgggaacgcagcctgcgtgaaggtgctccgggacattgagcctggggacgaggtgacatgcttctacggcgagggcttcttcggcgagaagaatgagcactgtgaatgccacacctgtgagaggaaaggtgaaggagctttccgaaccaggcctagggagcccgcgttgccaccacggcccctggacaagtaccagctgcgtgagaccaagcggcggctgcagcaaggcctggacagtggcagccgacagggcctgctgggccctcgggcctgcgtgcacccatccccgctgcgccgggacccattctgcgccgcctgccagcccctgcgcctgccagcctgcagcgcccgcccagacacctcacccctctggctccagtggctgcctcagccccagccccgagtgcggccccggaagcgccgacgcccccggccccggagggccccagtgctctccacccaccacgctgcccgcgtctccctgcaccgatggggaggctgtggcccccactgccgcctgcgaggagaggccctggtggccctgggccagcccccccacgcccgctgggcccctcagcaggactggcactgggcccggcgctatgggctgccttacgtggtgcgtgtggaccttcgtcgcctggccccagccccaccagctaccccagcccctgctgggaccccaggccccatcctgatcccgaagcaggccctcgccttcgcccccttctccccacccaagcgcctacggctggtggtcagccacggctccatcgacctggatgtcggcggtgaagagctgtgacaggccggacggggaggcccagcagggagagagggtctctctcctagctgctacccaggacctccagaaggagcccttggacctctgggagggagctgacccttgactccagcatagctctgaccctggaatggggttggtttggacacccccagggatctgagccctgaccctttgtgactgctgacccctgagccacccccactcccacagggagccccggccatttgctgccctccccacccctgccccagcctcaggactgcaggagccatccgcccccctcagccccttcctccccagggagcaaagccataaggggcaggggccaccccacggcatctccccagaagtacaggcctcaggaggaggtggaactgatgtagggggtggcactccccagagactgccctcacgaggggactgggttcgctctcagctctgcagctgtctgcggtggggggaaggttggggggtgtctggaggcatgttcccctcaccaccccccgtgggtctcagggaggccgggtgtgacctcatctttctcatggtgctatcctggtgctattggggtggggagctccctcccctcccccacaccagaaaggggtatgttgggggcttggaagcacttgaactttttattttattaaaaccttgttataagcagcacccttggcggttttttgttttggcttatgttttgaagggatgtgaggagggtgagaccctcagctgtgctgatgagagggggaggaggcaacacaggccttcagccctgagagctgtcgggagagggatttgggagcgtgatggactaggggactgaggctggagccccatccccactcaggctgtgcttgtaaaaatgccttgagacccatactctcctaggagtgggtcctcccattttccaggcgaggtcaacatcgtttagcaagcagagtgacttgccaaggccacgtggggacttgagggcccttctcccttctcgcgcttctcaatgagatgcccctcccacatctcactccaaacggagagagactgctgggggcctggctgagtgagggtgtgggggctgcccaggacaccagagccgagcctgggggaggcggcgctgacaggaccttcctcagctgtggcatcttggg

SEQ ID NO: 301926 - DNA, 2762 bp, Homo sapiens
atgggaggtgcggcgacagtgtttgacgagagccgaaggaggctgtgggaggtgttggcggcggcggcgcgggcgcctgaggaggaggaggagaagcggatgagatcgtggggctcaccagcgtcccccatggcttctgagtagcgtgggagtggagtcagcaccaagccaggctccccgcgcctgccttgccctcacctgctcctgctctctgccagaggcagcatggtccgcagggcaccatggggcccgacagagtgacagcacgagaactgtgcgagaacgacgacctggccaccagcctcgtcctggacccctacctcggtttccgcacccataagatgaacgtcaggtctatcgctacctccgtgccttcctgccggaaagtggctttaccatcctgccctgcacgcgctactccatggagaccaacggggccaagatcgtgtccactcgtgcttgctgtgcctctggtaaatgaggaactgacgtaagcttggacgctgctgtgtgggcttgcatttgcatgagactgcgggagggcagactgaggggcttgcttgacgcggcgcgggtgagcgaactcgacgttcaggcattctagtcgctatcgtcgaagcgctcggctacgccggacgatcgctcatgccttggtggccttgtggcctcacgcctgccttctcgactctagagcgcgactgtagcttgcagagagccccagagcttcgcgagacccgttgtgtggccgtgctcccatgcgcgaacgtcatgcctagcgctgtgaatgggtgactccggtggacatttgcaggtcctggtggcactgaggctgcaccatgcctttctaccgcgcgacggtgcttcttcggcgatgaaggaattgagcgactgtgaatgcgcacaacctgtgatgacggacaccgtgactggaaaggtgaaggagctttccgaaccaggcctagggagcccgcgttgccaccacggcccctggacaagtaccagctgcgtgagaccaagcggcggctgcagcaaggcctggacagtggcagccgacagggcctgctgggccctcgggcctgcgtgcacccatccccgctgcgccgggacccattctgcgccgcctgccagcccctgcgcctgccagcctgcagcgcccgcccagacacctcacccctctggctccagtggctgcctcagccccagccccgagtgcggccccggaagcgccgacgcccccggccccggagggccccagtgctctccacccaccacgctgcccgcgtctccctgcaccgatggggaggctgtggcccccactgccgcctgcgaggagaggccctggtggccctgggccagcccccccacgcccgctgggcccctcagcaggactggcactgggcccggcgctatgggctgccttacgtggtgcgtgtggaccttcgtcgcctggccccagccccaccagctaccccagcccctgctgggaccccaggccccatcctgatcccgaagcaggccctcgccttcgcccccttctccccacccaagcgcctacggctggtggtcagccacggctccatcgacctggatgtcggcggtgaagagctgtgacaggccggacggggaggcccagcagggagagagggtctctctcctagctgctacccaggacctccagaaggagcccttggacctctgggagggagctgacccttgactccagcatagctctgaccctggaatggggttggtttggacacccccagggatctgagccctgaccctttgtgactgctgacccctgagccacccccactcccacagggagccccggccatttgctgccctccccacccctgccccagcctcaggactgcaggagccatccgcccccctcagccccttcctccccagggagcaaagccataaggggcaggggccaccccacggcatctccccagaagtacaggcctcaggaggaggtggaactgatgtagggggtggcactccccagagactgccctcacgaggggactgggttcgctctcagctctgcagctgtctgcggtggggggaaggttggggggtgtctggaggcatgttcccctcaccaccccccgtgggtctcagggaggccgggtgtgacctcatctttctcatggtgctatcctggtgctattggggtggggagctccctcccctcccccacaccagaaaggggtatgttgggggcttggaagcacttgaactttttattttattaaaaccttgttataagcagcacccttggcggttttttgttttggcttatgttttgaagggatgtgaggagggtgagaccctcagctgtgctgatgagagggggaggaggcaacacaggccttcagccctgagagctgtcgggagagggatttgggagcgtgatggactaggggactgaggctggagccccatccccactcaggctgtgcttgtaaaaatgccttgagacccatactctcctaggagtgggtcctcccattttccaggcgaggtcaacatcgtttagcaagcagagtgacttgccaaggccacgtggggacttgagggcccttctcccttctcgcgcttctcaatgagatgcccctcccacatctcactccaaacggagagagactgctgggggcctggctgagtgagggtgtgggggctgcccaggacaccagagccgagcctgggggaggcggcgctgacaggaccttcctcagctgtggcatcttggg

SEQ ID NO: 301927 - DNA, 2112 bp, Homo sapiens
ctcggaatgccacttttaggggctcagctgttgccccattccaggagaggacgctccgggccagggtgcccggccaggtgtggggagtgggtgagccctcccctgtgccctgggccaggcgctgagtgggcttggccctcagtttgtgcctgcagatgggaacgcagcctgcgtgaaggtgctccgggacattgagcctggggacgaggtgacatgcttctacggcgagggcttcttcggcgagaagaatgagcactgtgaatgccacacctgtgagaggaaaggtgaaggagctttccgaaccaggcctagggagcccgcgttgccaccacggcccctggacaagtaccagctgcgtgagaccaagcggcggctgcagcaaggcctggacagtggcagccgacagggcctgctgggccctcgggcctgcgtgcacccatccccgctgcgccgggacccattctgcgccgcctgccagcccctgcgcctgccagcctgcagcgcccgcccagacacctcacccctctggctccagtggctgcctcagccccagccccgagtgcggccccggaagcgccgacgcccccggccccggagggccccagtgctctccacccaccacgctgcccgcgtctccctgcaccgatggggaggctgtggcccccactgccgcctgcgaggagaggccctggtggccctgggccagcccccccacgcccgctgggcccctcagcaggactggcactgggcccggcgctatgggctgccttacgtggtgcgtgtggaccttcgtcgcctggccccagccccaccagctaccccagcccctgctgggaccccaggccccatcctgatcccgaagcaggccctcgccttcgcccccttctccccacccaagcgcctacggctggtggtcagccacggctccatcgacctggatgtcggcggtgaagagctgtgacaggccggacggggaggcccagcagggagagagggtctctctcctagctgctacccaggacctccagaaggagcccttggacctctgggagggagctgacccttgactccagcatagctctgaccctggaatggggttggtttggacacccccagggatctgagccctgaccctttgtgactgctgacccctgagccacccccactcccacagggagccccggccatttgctgccctccccacccctgccccagcctcaggactgcaggagccatccgcccccctcagccccttcctccccagggagcaaagccataaggggcaggggccaccccacggcatctccccagaagtacaggcctcaggaggaggtggaactgatgtagggggtggcactccccagagactgccctcacgaggggactgggttcgctctcagctctgcagctgtctgcggtggggggaaggttggggggtgtctggaggcatgttcccctcaccaccccccgtgggtctcagggaggccgggtgtgacctcatctttctcatggtgctatcctggtgctattggggtggggagctccctcccctcccccacaccagaaaggggtatgttgggggcttggaagcacttgaactttttattttattaaaaccttgttataagcagcacccttggcggttttttgttttggcttatgttttgaagggatgtgaggagggtgagaccctcagctgtgctgatgagagggggaggaggcaacacaggccttcagccctgagagctgtcgggagagggatttgggagcgtgatggactaggggactgaggctggagccccatccccactcaggctgtgcttgtaaaaatgccttgagacccatactctcctaggagtgggtcctcccattttccaggcgaggtcaacatcgtttagcaagcagagtgacttgccaaggccacgtggggacttgagggcccttctcccttctcgcgcttctcaatgagatgcccctcccacatctcactccaaacggagagagactgctgggggcctggctgagtgagggtgtgggggctgcccaggacaccagagccgagcctgggggaggcggcgctgacaggaccttcctcagctgtggcatcttggg

SEQ ID NO: 301928 - DNA, 1183 bp, Homo sapiens
atgggaggtgcggcgacagtgtttgacgagagccgaaggaggctgtgggaggtgttggcggcggcggcgcgggcgcctgaggaggaggaggagaagcggatgagatcgtggggctcaccagcgtcccccatggcttctgagtagcgtgggagtggagtcagcaccaagccaggctccccgcgcctgccttgccctcacctgctcctgctctctgccagaggcagcatggtccgcagggcaccatggggcccgacagagtgacagcacgagaactgtgcgagaacgacgacctggccaccagcctcgtcctggacccctacctcggtttccgcacccataagatgaacgtcagccctgtgccccccctgcggcgacagcagcacctgcgctcagcgctggaaactttcctgaggcagcgggacctggaggctgcgtaccgggccctgacgctgggaggctggacggcccgctacttccagagccggggcccgcggcaggaggctgccctcaagacccacgtctatcgctacctccgtgccttcctgccggaaagtggctttaccatcctgccctgcacgcgctactccatggagaccaacggggccaagatcgtgtccactcgtgcttggaaaaagaatgagaagctggagctgctggtgggctgcattgcagagctgcgggaggcagatgaggggctgctgagggccggtgagaatgacttcagcatcatgtactcaacccgcaagcggagtgctcagctgtggctgggcccagccgccttcatcaaccatgactgcaaacccaactgcaaggtaaggccttgggactcgggaggagagggcacgcaggaagaaagggtgcctgtggcctggggaaagggtttttggtcagtaaagagccaaacaccggccgggcgcggtggctcatgcctgtaatcccagcactttgggaggccgaggtgggcagatcacgaggtcaggagatggagaccacggtgaaaccccatctctactaaaaacacaaaaaattagtcgggcgtggtggcgggcgcctgtagtctcagctacttgggaggctgaggcaggagaatggtgtgaacccgggaggcggagcttgcggtgagccgagatcgcgccactgcactccagcctgggccacagagcgagactctgtctcaaaaaaa

SEQ ID NO: 301929 - DNA, 1484 bp, Homo sapiens
tgggattacaggcgtgagccacctcacccggcctattgatccatattctgtaatcaaaatatcataagcctccataatgtagtggggcatacaaaaggctttcatccattcaggtgaaaggtgaagtttgggtgtggtggtgcatgcctgtaatcccagctacttgggaggctgaggcaggagaattgtttgaacctgggaggtggaggttgcagtgagcccagatcacaccactgcactccagcctggacgacagagcgaaattctgtgtaaaaaaaaaaaaaaaaaaaaggtgaggtttcagatgtgtatgttaatctactcaatctaattagtttattgaattgctacaatgtattcagtattgtgctttataatatggaggatgatgtctctgtgcttttgctcattcttatccttgacttcaaattgtttcctattattctagcctcatctgttaaaatcctaccctcctttccctcaagagccatctaaagatgacacctttgtcacaaagcctttcatgatctcacagccacgaatttagaacttcctcctatagcattttctatcttttttatggcatttattttattctatcttgttatgattacataatctgtttaatccccaattatatattgtaaataccttgaaggaaaggagtctttattatctttggtgcctggtgtttagttttaatattttattaaatacatccaaggaaagtttttggtttctgcctttacttcaagaagaaagttgtagaacagataatagttgttccatttccatgggttactgagtaaagactcaccagttcgccataacagacataagagtgacaaaaaaataaaccttcattgtgtaaaaaaaaaaaaggccaggcgcagtggctcatgcctgtaatcccagcactttgggaggctgagccaggcagatcacttgaggtcaggagttcgagaccagcctggcctacatggtgaaacctcatctctactaaaaatacaaaaatcagcccagtatggtggtgcacaccagtaaacccaacaactggggaggctgaagcaggagaatcgcttgaacctgggaggtggcagttgcagtgaacccagatcacaccactgcactccaacctgggcgacagagcaagactctgtctcaaaaaaagaaaaaaatgaaagttgtgtttagggggacaaatacagtatagtgtttaattaaggacctagatatatggtttagatggtgctgtccaatatggaagccaccagccactttgtggctttttaaatttttaaatttagttaaaactaaataaagtaagcctggctaacatggcgaaaccccatctctattttaaaaaatacaaaaattaaatcccagcactttgggaggccaaggcaggcagatcacaaggtcaggagattgagaccatcctggctaacacggtgaaaccccgtctctactaaaaatacaaaaaa

SEQ ID NO: 301930 - DNA, 1285 bp, Homo sapiens
aaaaaaaaaaaaaaaaaaaaaaaaaaaaaaaaaaaaaaaaaaaaaaaaaaaaaaaaaaaaaaaaaaaaaaaaaaaaaaaaaaaaaaaaaaaaggtgaggtttcagatgtgtatgttaatctactcaatctaattagtttattgaattgctacaatgtattcagtattgtgctttataatatggaggatgatgtctctgtgcttttgctcattcttatccttgacttcaaattgtttcctattattctagcctcatctgttaaaatcctaccctcctttccctcaagagccatctaaagatgacacctttgtcacaaagcctttcatgatctcacagccacgaatttagaacttcctcctatagcattttctatcttttttatggcatttattttattctatcttgttatgattacataatctgtttaatccccaattatatattgtaaataccttgaaggaaaggagtctttattatctttggtgcctggtgtttagttttaatattttattaaatacatccaaggaaagtttttggtttctgcctttacttcaagaagaaagttgtagaacagataatagttgttccatttccatgggttactgagtaaagactcaccagttcgccataacagacataagagtgacaaaaaaataaaccttcattgtgtaaaaaaaaaaaaggccaggcgcagtggctcatgcctgtaatcccagcactttgggaggctgagccaggcagatcacttgaggtcaggagttcgagaccagcctggcctacatggtgaaacctcatctctactaaaaatacaaaaatcagcccagtatggtggtgcacaccagtaaacccaacaactggggaggctgaagcaggagaatcgcttgaacctgggaggtggcagttgcagtgaacccagatcacaccactgcactccaacctgggcgacagagcaagactctgtctcaaaaaaagaaaaaaatgaaagttgtgtttagggggacaaatacagtatagtgtttaattaaggacctagatatatggtttagatggtgctgtccaatatggaagccaccagccactttgtggctttttaaatttttaaatttagttaaaactaaataaagtaagcctggctaacatggcgaaaccccatctctattttaaaaaatacaaaaattaaatcccagcactttgggaggccaaggcaggcagatcacaaggtcaggagattgagaccatcctggctaacacggtgaaaccccgtctctactaaaaatacaaaaaa

SEQ ID NO: 301931 - DNA, 781 bp, Homo sapiens
aaatggagttaggctcgcgccggcgcagtgtcggctgccggtgccgcggcctttgtctcgcagtcaggagggagcaagtgacgtttgaggacgtggtagtggacttcagccaggaggagtgggggcagctgaagcctgcccagaggaccctgtaccgtgatgtaatgctggacaccttcaggcttctggtctctgtggctcccctttgccttccgccatgattggaagcttcctgaggcctccccatagtgcagatgccagcactatgcttcctgtacagcctgcagaaccgtgagccaaataaatctcttttctttgtaaattacccatcctcaggtattcctttatagccgtgtaaacagactaacacagccagggccgttggaagttttgtggaagcactgggtaggactgacgtgtggtagtcactgtccctcctgagtctcctcttatactgtatgtgagagggagattctttcaggcagcaagtattttccaagcaccaactatagctcaggcacaattccagactctggcaactaaactgatgaaactcgtggtctcaggagcttatattttggtggggaaatggaaaatagagaaattaggatgttatgggcacattacacagtaagtgttatgtagaaacaaaatggtccaagaagggaaaccccaggctgggcgcagtggctcaagcctgtaatcccagcactttgtgaggccaaggcaggcagattgcctgaggtcgagagttcaagaccagcctggccaacatggagaa

SEQ ID NO: 301932 - DNA, 3036 bp, Homo sapiens
aaatggagttaggctcgcgccggcgcagtgtcggctgccggtgccgcggcctttgtctcgcagtcaggaggagcagggccagccgttcctgccagaagccaggcatgacccctggggtgcgcgtctccacagacccggagcaagtgacgtttgaggacgtggtagtggacttcagccaggaggagtgggggcagctgaagcctgcccagaggaccctgtaccgtgatgtaatgctggacaccttcaggcttctggtctctgtgggacattggttaccgaagccgaatgtcatctccctgctggagcaagaggcagagctgtgggcggtggagtctagacttccccaaggcgtgtacccagacttggaaactagacccaaagtcaaactgtcagttctaaagcaaggcatctctgaagaaatatccaacagtgtcatcttggtagaaagattcctgtgggatggtctgtggtactgcaggggtgaggacactgagggccactgggaatggagttgtgagagtctagagagcctggcagtgccggtggccttcacgcctgtgaagacgcctgttctggagcagtggcagaggaatgggtttggggaaaacataagtctgaaccctgatctcccacatcaaccaatgactcctgaaagacaaagcccccacacatggggaacacgtggaaaaagggagaagccagacctaaatgttttacagaaaacctgtgtaaaagagaaaccctacaaatgtcaggaatgcggaaaggcctttagtcacagctcagcacttatcgaacaccaccggacgcacacaggagagagaccttacgaatgtcacgaatgcttaaaaggcttccggaacagctcggcacttaccaaacaccagagaatccatactggggagaaaccctataaatgcactcagtgtgggaggaccttcaaccaaattgccccactgatccagcaccagagaactcacacaggtgagaagccctatgaatgcagcgaatgtgggaaatccttcagttttaggtcctccttcagccagcacgagcgaactcacacaggcgagaagccctacgagtgcagtgagtgtgggaaagccttccggcaaagcatccacctcacccagcatctgcgaatccacactggggagaaaccctatcagtgtggtgagtgtggcaaggccttcagccacagctcatccttgaccaaacaccagcgaatccacacaggggagaagccctacgagtgccatgagtgtggaaaagccttcacccagatcacaccactgattcagcaccagaggacccacacaggagaaaagccctatgagtgtggtgagtgtgggaaagccttcagtcagagcacactcctgaccgagcatcggaggattcacacaggagagaagccctatggatgcaacgagtgtgggaaaaccttcagccacagctcctcactcagccagcatgagcggacacacacaggagagaagccctatgagtgcagtcagtgtgggaaggccttccggcagagcacacacctcacccaacaccagcgaatccacacaggggagaagccctatgaatgcaatgactgcggcaaggcattcagtcacagctcgtccctcaccaaacatcagcgaatccacactggggagaagccctacgaatgcaaccagtgtggcagagccttcagccagcttgctcccctcattcagcatcagaggatccacacaggagagaaaccctatgaatgtaaccagtgtggcagagccttcagccagagctcccttctcatcgaacaccagaggattcacaccaaggaaaagccgtatgggtgcaatgagtgtgggaaatccttcagccacagctcctcgctcagccagcacgaaaggacgcacactggggaaaagccctatgagtgtcacgattgcggaaagtcctttaggcagagcacccacctcactcagcaccggaggatccacacaggagagaagccatatgcatgcagggactgtggaaaggcctttacccacagctcctcccttaccaagcaccagagaactcacactggataaacccactccacatgtgctggggacataggaagaccttaagccatagctcatccctttctagatttgacccaatcatacacatgagaaacgtacattcatacacaagccttttcacacagcactcccctcagacaccctcagagagttcacactgatgggaaatgaccatgggaccaccaagctctaggtcatccatctctgcatccaaatagtagggaaacgtggagataatcaacactcaggaccttcagccttgaacgcccattagtgctatgttatagaacctacaaaaaagaaatggaacaaatgtagtggatccagggaacgcttttgtccaaggattcaccgtattccaaaccagagatgttcaaattggtgagaaacccaacaaatgcctttcatatatacgagaaccaaatgaagtcagaatttgccattattgcacatcacatttttgggggggaaagtgcttatgaatggtgcaggttgactctgatattcattcccaaatgacagtatggcagagtgttccagaaatgagagtggcatctttatggaatcactgtggatactgactgtctcagtaaacagctgtcttgtctgtgtgtatattgtttgatcagggtacatggcagccagtcacagattggaattacatatgacaaagtatcagtgtactataaacaggtttttagttatccctgcattatttttgcaattaatctttatatgcaatgagattgaaaagctttgtatgggaagactcaaaatgtaaagctgcttccatagagtctcactgattctgagatggcttttgctgctctgttctccctctacatttctctgcagaactcgcgttagaaacacagatatttgttttacaaaaagggagatttttcctttgttaaaccatcgtcttataagcaatagcaaattcatgttagaaaaactttag

SEQ ID NO: 301933 - DNA, 1390 bp, Homo sapiens
gcttataatcgaggtttctcttttacacagggttatctgtaaaacatttaggtctggcttgctcccctcattcagcatcagaggatccacacaggagagaaaccctatgaatgtaaccagtgtggcagagccttcagccagagctcccttctcatcgaacaccagaggattcacaccaaggaaaagccgtatgggtgcaatgagtgtgggaaatccttcagccacagctcctcgctcagccagcacgaaaggacgcacactggggaaaagccctatgagtgtcacgattgcggaaagtcctttaggcagagcacccacctcactcagcaccggaggatccacacaggagagaagccatatgcatgcagggactgtggaaaggcctttacccacagctcctcccttaccaagcaccagagaactcacactggataaacccactccacatgtgctggggacataggaagaccttaagccatagctcatccctttctagatttgacccaatcatacacatgagaaacgtacattcatacacaagccttttcacacagcactcccctcagacaccctcagagagttcacactgatgggaaatgaccatgggaccaccaagctctaggtcatccatctctgcatccaaatagtagggaaacgtggagataatcaacactcaggaccttcagccttgaacgcccattagtgctatgttatagaacctacaaaaaagaaatggaacaaatgtagtggatccagggaacgcttttgtccaaggattcaccgtattccaaaccagagatgttcaaattggtgagaaacccaacaaatgcctttcatatatacgagaaccaaatgaagtcagaatttgccattattgcacatcacatttttgggggggaaagtgcttatgaatggtgcaggttgactctgatattcattcccaaatgacagtatggcagagtgttccagaaatgagagtggcatctttatggaatcactgtggatactgactgtctcagtaaacagctgtcttgtctgtgtgtatattgtttgatcagggtacatggcagccagtcacagattggaattacatatgacaaagtatcagtgtactataaacaggtttttagttatccctgcattatttttgcaattaatctttatatgcaatgagattgaaaagctttgtatgggaagactcaaaatgtaaagctgcttccatagagtctcactgattctgagatggcttttgctgctctgttctccctctacatttctctgcagaactcgcgttagaaacacagatatttgttttacaaaaagggagatttttcctttgttaaaccatcgtcttataagcaatagcaaattcatgttagaaaaactttag

SEQ ID NO: 301934 - DNA, 614 bp, Homo sapiens
aaatggagttaggctcgcgccggcgcagtgtcggctgccggtgccgcggcctttgtctcgcagtcaggaggagcagggccagccgttcctgccagaagccaggcatgacccctggggtgcgcgtctccacagacccggagcaagtgacgtttgaggacgtggtagtggacttcagccaggaggagtgggggcagctgaagcctgcccagaggaccctgtaccgtgatgtaatgctggacaccttcaggcttctggtctctgtgggacattggttaccgaagccgaatgtcatctccctgctggagcaagaggcagagctgtgggcggtggagtctagacttccccaaggcgtgtacccaggtgagatgggagcccttcggggcagagagaagcctgtccatgcttgcttcctggtttctccctctgcatctgctctctaattcttcagagcaaatttactactcagtcttagtgaagatttaccaagcacccattttgctgtgagtgacgacaccacgtcctcatctccactgaatttatattcttggtgagggagtgggggaaacaaacaataaatcggtaaaataataataataaaacaagttggatgatta

SEQ ID NO: 301935 - DNA, 5617 bp, Homo sapiens
  misc_feature (587)..(587): n is a, c, g, or t
cggctgtacgcccggaattatgggatagcaaccgagcggggcccggcccgagcggggcctgggggtgcgacgccgagggcgggggagagcgcgccgctgctcccggaccgggccgcgcacgccgcctcaggaaccatcactgttgctggaggcacctgacaaatcctagcgaatttttggagcatctccacccaggaacctcgccatccagaagtgtgcttcccgcacagctgcagccatggggtctgaggaccacggcgcccagaaccccagctgtaaaatcatgacgtttcgcccaaccatggaagaatttaaagacttcaacaaatacgtggcctacatagagtcgcagggagcccaccgggcggggcctggccaagatcatccccccgaaggagtggaagccgcggcagacgtatgatgacatcgacgacgtggtgatcccggcgcccatccagcaggtggtgacgggccagtcgggcctcttcacgcagtacaatatccagaagaaggccatgacagtgggcgagtaccgccgcctggccaacagcgagaagtactgtaccccgcggcaccaggactttgangaccttgaacgcaaatactggaagaacctcacctttgtctccccgatctacggggctgacatcagcggctctttgtatgatgacgacgtggcccagtggaacatcgggagcctccggaccatcctggacatggtggagcgcgagtgcggcaccatcatcgagggcgtgaacacgccctacctgtacttcggcatgtggaagaccaccttcgcctggcacaccgaggacatggacctgtacagcatcaactacctgcactttggggagcctaagtcctggtacgccatcccaccagagcacggcaagcgcctggagcggctggccatcggcttcttccccgggagctcgcagggctgcgacgccttcctgcggcataagatgaccctcatctcgcccatcatcctgaagaagtacgggatccccttcagccggatcacgcaggaggccggggaattcatgatcacatttccctacggctaccacgccggcttcaatcacgggttcaactgcgcagaatctaccaacttcgccaccctgcggtggattgactacggcaaagtggccactcagtgcacgtgccggaaggacatggtcaagatctccatggacgtgttcgtgcgcatcctgcagcccgagcgctacgagctgtggaagcagggcaaggacctcacggtgctggaccacacgcggcccacggcgctcaccagccccgagctgagctcctggagtgcgtcccgggcctcgctgaaggccaagctcctccgcaggtctcaccggaaacggagccagcccaagaagccgaagcccgaagaccccaagttccctggggagggtacggctggggcagcgctcctagaggaggctgggggcagcgtgaaggaggaggctgggccggaggttgaccccgaggaggaggaggaggagccgcagccactgccacacggccgggaggccgagggcgcagaagaggacgggaggggcaagctgcggccaaccaaggccaagagcgagcggaagaagaagagcttcggcctgctgcccccacagctgccgcccccgcctgctcacttcccctcagaggaggcgctgtggctgccatccccactggagcccccggtgctgggcccaggccctgcagccatggaggagagccccctgccggcaccccttaatgtcgtgccccctgaggtgcccagtgaggagctagaggccaagcctcggcccatcatccccatgctgtacgtggtgccgcggccgggcaaggcagccttcaaccaggagcacgtgtcctgccagcaggcctttgagcactttgcccagaagggtccgacctggaaggaaccagtttcccccatggagctgacggggccagaggacggtgcagccagcagtggggcaggtcgcatggagaccaaagcccgggccggagaggggcaggcaccgtccacattttccaaattgaagatggagatcaagaagagccggcgccatcccctgggccggccgcccacccggtccccactgtcggtggtgaagcaggaggcctcaagtgacgaggaggcatcccctttctccggggaggaagatgtgagtgacccggacgccttgaggccgctgctgtctctgcagtggaagaacagggcggccagcttccaggccgagaggaagttcaacgcagcggctgcgcgcacggagccctactgcgccatctgcacgctcttctacccctactgccaggccctacagactgagaaggaggcacccatagcctccctcggagagggctgcccggccacattaccctccaaaagccgtcagaagacccgaccgctcatccctgagatgtgcttcacctctggcggtgagaacacggagccgctgcctgccaactcctacatcggcgacgacgggaccagccccctgatcgcctgcggcaagtgctgcctgcaggtccatgccagttgctatggcatccgtcccgagctggtcaatgaaggctggacgtgttcccggtgcgcggcccacgcctggactgcggagtgctgcctgtgcaacctgcgaggaggtgcgctgcagatgaccaccgataggaggtggatccacgtgatctgtgccatcgcagtccccgaggcgcgcttcctgaacgtgattgagcgccaccctgtggacatcagcgccatccccgagcagcggtggaagctgaaatgcgtgtactgccggaagcggatgaagaaggtgtcaggtgcctgtatccagtgctcctacgagcactgctccacgtccttccacgtgacctgcgcccacgccgcaggcgtgctcatggagccggacgactggccctatgtggtctccatcacctgcctcaagcacaagtcggggggtcacgctgtccaactcctgagggccgtgtccctaggccaggtggtcatcaccaagaaccgcaacgggctgtactaccgctgtcgcgtcatcggtgccgcctcgcagacctgctacgaagtgaacttcgacgatggctcctacagcgacaacctgtaccctgagagcatcacgagtagggactgtgtccagctgggacccccttccgagggggagctggtggagctccggtggactgacggcaacctctacaaggccaagttcatctcctccgtcaccagccacatctaccaggtggagtttgaggacgggtcccagctgacggtgaagcgtggggacatcttcaccctggaggaggagctgcccaagagggtccgctctcggctgtcactgagcacgggggcaccgcaggagcccgccttctcgggggaggaggccaaggccgccaagcgcccgcgtgtgggcaccccgcttgccacggaggactccgggcggagccaggactacgtggccttcgtggagagcctcctgcaggtgcagggccggcccggagcccccttctaggacagctggccgctcaggcgaccctcagcccggcggggaggccatggcatgccccgggcgttcgcttgctgtgaattcctgtcctcgtgtccccgacccccgagaggccacctccaagccgcgggtgccccctagggcgacaggagccagcgggacgccgcacgcggccccagactcagggagcagggccaggcgggctcgggggccggccaggggagcaccccactcaactactcagaattttaaaccatgtaagctctcttcttctcgaaaaggtgctactgcaatgccctactgagcaacctttgagattgtcacttctgtacataaaccacctttgtgaggctctttctataaatacatattgtttaaaaaaaagcaagaaaaaaaggaaaacaaaggaaaatatccccaaagttgttttctagatttgtggctttaagaaaaacaaaacaaaacaaacacattgtttttctcagaaccaggattctctgagaggtcagagcatctcgctgtttttttgttgttgttttaaaatattatgatttggctacagaccaggcagggaaagagacccggtaattggagggtgagcctcggggggggggcaggacgccccggtttcggcacagcccggtcactcacggcctcgctctcgcctcaccccggctcctgggctttgatggtctggtgccagtgcctgtgcccactctgtgcctgctgggaggaggcccaggctctctggtggccgcccctgtgcacctggccaggggaagcccgggggtctggggcctccctccgtctgcgcccacctttgcagaataaactctctcctggggtttgtctatctttgtttctctcacctgagagaaacgcaggtgttccagaggcttccttgcagacaaagcacccctgcacctcctatggctcaggatgagggaggcccccaggcccttctggttggtagtgagtgtggacagcttcccagctcttcgggtacaaccctgagcaggtcgggggacacagggccgaggcaggccttcggggcccctttcgcctgcttccgggcagggacgaggcctggtgtcctcgctccacccacccacgctgctgtcacctgaggggaatctgcttcttaggagtgggttgagctgatagagaaaaaacggccttcagcccaggctgggaagcgccttctccaggtgcctctccctcaccagctctgcacccctctggggagccttccccaccttagctgtctcctgccccagggagggatggaggagataatttgcttatattaaaaacaaaaaatggctgaggcaggagtttgggaccagcctgggctatatagcaagaccccatcactacaaattttttacaaattagctaggtgtggtggtgcgcacctgtggtcccagctactcgggaggctgtggtgggaggattgcttgagtccaggaggttgaggctgcagtcagctcagattgcaccactgcactccagcctgggcaacagagcgagaccctgtctccaaaaaaaaaaaaaagcaatgtttatattataaaagagtgtcctaacagtccccgggctagagaggactaaggaaaacagagagagtgttacgcaggagcaagcctttcatttccttggtgggggaggggggcggttgccctggagagggccggggtcggggaggttggggggtgtcagccaaaacgtggaggtgtccctctgcacgcagccctcgcccggcgtggcgctgacactgtattcttatgttgtttgaaaatgctatttatattgtaaagaagcgggcgggtgcccctgctgcccttgtcccttgggggtcacacccatcccctggtgggctcctgggcggcctgcgcagatgggccacagaagggcaggccggagctgcacactctccccacgaaggtatctctgtgtcttactctgtgcaaagacgcggcaaaacccagtgccctggtttttccccacccgagatgaaggatacgctgtattttttgcctaatgtccctgcctctaggttcataatgaattaaaggttcatgaacgctgcgaaa

SEQ ID NO: 301936 - DNA, 3980 bp, Homo sapiens
ggcagcaggccgaagctcttcttcttccgctcgctcttggccttggttggccgcagcttgcccccggtgctgggcccaggccctgcagccatggaggagagccccctgccggcaccccttaatgtcgtgccccctgaggtgcccagtgaggagctagaggccaagcctcggcccatcatccccatgctgtacgtggtgccgcggccgggcaaggcagccttcaaccaggagcacgtgtcctgccagcaggcctttgagcactttgcccagaagggtccgacctggaaggaaccagtttcccccatggagctgacggggccagaggacggtgcagccagcagtggggcaggtcgcatggagaccaaagcccgggccggagaggggcaggcaccgtccacattttccaaattgaagatggagatcaagaagagccggcgccatcccctgggccggccgcccacccggtccccactgtcggtggtgaagcaggaggcctcaagtgacgaggaggcatcccctttctccggggaggaagatgtgagtgacccggacgccttgaggccgctgctgtctctgcagtggaagaacagggcggccagcttccaggccgagaggaagttcaacgcagcggctgcgcgcacggagccctactgcgccatctgcacgctcttctacccctactgccaggccctacagactgagaaggaggcacccatagcctccctcggagagggctgcccggccacattaccctccaaaagccgtcagaagacccgaccgctcatccctgagatgtgcttcacctctggcggtgagaacacggagccgctgcctgccaactcctacatcggcgacgacgggaccagccccctgatcgcctgcggcaagtgctgcctgcaggtccatgccagttgctatggcatccgtcccgagctggtcaatgaaggctggacgtgttcccggtgcgcggcccacgcctggactgcggagtgctgcctgtgcaacctgcgaggaggtgcgctgcagatgaccaccgataggaggtggatccacgtgatctgtgccatcgcagtccccgaggcgcgcttcctgaacgtgattgagcgccaccctgtggacatcagcgccatccccgagcagcggtggaagctgaaatgcgtgtactgccggaagcggatgaagaaggtgtcaggtgcctgtatccagtgctcctacgagcactgctccacgtccttccacgtgacctgcgcccacgccgcaggcgtgctcatggagccggacgactggccctatgtggtctccatcacctgcctcaagcacaagtcggggggtcacgctgtccaactcctgagggccgtgtccctaggccaggtggtcatcaccaagaaccgcaacgggctgtactaccgctgtcgcgtcatcggtgccgcctcgcagacctgctacgaagtgaacttcgacgatggctcctacagcgacaacctgtaccctgagagcatcacgagtagggactgtgtccagctgggacccccttccgagggggagctggtggagctccggtggactgacggcaacctctacaaggccaagttcatctcctccgtcaccagccacatctaccaggtggagtttgaggacgggtcccagctgacggtgaagcgtggggacatcttcaccctggaggaggagctgcccaagagggtccgctctcggctgtcactgagcacgggggcaccgcaggagcccgccttctcgggggaggaggccaaggccgccaagcgcccgcgtgtgggcaccccgcttgccacggaggactccgggcggagccaggactacgtggccttcgtggagagcctcctgcaggtgcagggccggcccggagcccccttctaggacagctggccgctcaggcgaccctcagcccggcggggaggccatggcatgccccgggcgttcgcttgctgtgaattcctgtcctcgtgtccccgacccccgagaggccacctccaagccgcgggtgccccctagggcgacaggagccagcgggacgccgcacgcggccccagactcagggagcagggccaggcgggctcgggggccggccaggggagcaccccactcaactactcagaattttaaaccatgtaagctctcttcttctcgaaaaggtgctactgcaatgccctactgagcaacctttgagattgtcacttctgtacataaaccacctttgtgaggctctttctataaatacatattgtttaaaaaaaagcaagaaaaaaaggaaaacaaaggaaaatatccccaaagttgttttctagatttgtggctttaagaaaaacaaaacaaaacaaacacattgtttttctcagaaccaggattctctgagaggtcagagcatctcgctgtttttttgttgttgttttaaaatattatgatttggctacagaccaggcagggaaagagacccggtaattggagggtgagcctcggggggggggcaggacgccccggtttcggcacagcccggtcactcacggcctcgctctcgcctcaccccggctcctgggctttgatggtctggtgccagtgcctgtgcccactctgtgcctgctgggaggaggcccaggctctctggtggccgcccctgtgcacctggccaggggaagcccgggggtctggggcctccctccgtctgcgcccacctttgcagaataaactctctcctggggtttgtctatctttgtttctctcacctgagagaaacgcaggtgttccagaggcttccttgcagacaaagcacccctgcacctcctatggctcaggatgagggaggcccccaggcccttctggttggtagtgagtgtggacagcttcccagctcttcgggtacaaccctgagcaggtcgggggacacagggccgaggcaggccttcggggcccctttcgcctgcttccgggcagggacgaggcctggtgtcctcgctccacccacccacgctgctgtcacctgaggggaatctgcttcttaggagtgggttgagctgatagagaaaaaacggccttcagcccaggctgggaagcgccttctccaggtgcctctccctcaccagctctgcacccctctggggagccttccccaccttagctgtctcctgccccagggagggatggaggagataatttgcttatattaaaaacaaaaaatggctgaggcaggagtttgggaccagcctgggctatatagcaagaccccatcactacaaattttttacaaattagctaggtgtggtggtgcgcacctgtggtcccagctactcgggaggctgtggtgggaggattgcttgagtccaggaggttgaggctgcagtcagctcagattgcaccactgcactccagcctgggcaacagagcgagaccctgtctccaaaaaaaaaaaaaagcaatgtttatattataaaagagtgtcctaacagtccccgggctagagaggactaaggaaaacagagagagtgttacgcaggagcaagcctttcatttccttggtgggggaggggggcggttgccctggagagggccggggtcggggaggttggggggtgtcagccaaaacgtggaggtgtccctctgcacgcagccctcgcccggcgtggcgctgacactgtattcttatgttgtttgaaaatgctatttatattgtaaagaagcgggcgggtgcccctgctgcccttgtcccttgggggtcacacccatcccctggtgggctcctgggcggcctgcgcagatgggccacagaagggcaggccggagctgcacactctccccacgaaggtatctctgtgtcttactctgtgcaaagacgcggcaaaacccagtgccctggtttttccccacccgagatgaaggatacgctgtattttttgcctaatgtccctgcctctaggttcataatgaattaaaggttcatgaacgctgcgaaa

SEQ ID NO: 301937 - DNA, 229 bp, Homo sapiens
acttataggttacagtccggaattacccaggtcaacaactacttttaaattagaggccgtgtcgacccccactcaactactcagaattttaaaccatgtaagctctcttcttctcgaaaaggtgctactgcaatgccctactgagcaacctttgagattgtcacttctgtacataaaccacctttgtgaggctctttctataaatacatattgtttaaaaaaaagcaag

SEQ ID NO: 301938 - DNA, 5719 bp, Homo sapiens
  misc_feature (587)..(587): n is a, c, g, or t
cggctgtacgcccggaattatgggatagcaaccgagcggggcccggcccgagcggggcctgggggtgcgacgccgagggcgggggagagcgcgccgctgctcccggaccgggccgcgcacgccgcctcaggaaccatcactgttgctggaggcacctgacaaatcctagcgaatttttggagcatctccacccaggaacctcgccatccagaagtgtgcttcccgcacagctgcagccatggggtctgaggaccacggcgcccagaaccccagctgtaaaatcatgacgtttcgcccaaccatggaagaatttaaagacttcaacaaatacgtggcctacatagagtcgcagggagcccaccgggcggggcctggccaagatcatccccccgaaggagtggaagccgcggcagacgtatgatgacatcgacgacgtggtgatcccggcgcccatccagcaggtggtgacgggccagtcgggcctcttcacgcagtacaatatccagaagaaggccatgacagtgggcgagtaccgccgcctggccaacagcgagaagtactgtaccccgcggcaccaggactttgangaccttgaacgcaaatactggaagaacctcacctttgtctccccgatctacggggctgacatcagcggctctttgtatgatgacgacgtggcccagtggaacatcgggagcctccggaccatcctggacatggtggagcgcgagtgcggcaccatcatcgagggcgtgaacacgccctacctgtacttcggcatgtggaagaccaccttcgcctggcacaccgaggacatggacctgtacagcatcaactacctgcactttggggagcctaagtcctggtacgccatcccaccagagcacggcaagcgcctggagcggctggccatcggcttcttccccgggagctcgcagggctgcgacgccttcctgcggcataagatgaccctcatctcgcccatcatcctgaagaagtacgggatccccttcagccggatcacgcaggaggccggggaattcatgatcacatttccctacggctaccacgccggcttcaatcacgggttcaactgcgcagaatctaccaacttcgccaccctgcggtggattgactacggcaaagtggccactcagtgcacgtgccggaaggacatggtcaagatctccatggacgtgttcgtgcgcatcctgcagcccgagcgctacgagctgtggaagcagggcaaggacctcacggtgctggaccacacgcggcccacggcgctcaccagccccgagctgagctcctggagtgcgtcccgggcctcgctgaaggccaagctcctccgcagacaaattagtctgaaagaaaacagacactggagaaagactgaggaggagaggaaaccaagtctagaaaggaagaaagagcagaccaaaaggccggggctgtcgtctcaccggaaacggagccagcccaagaagccgaagcccgaagaccccaagttccctggggagggtacggctggggcagcgctcctagaggaggctgggggcagcgtgaaggaggaggctgggccggaggttgaccccgaggaggaggaggaggagccgcagccactgccacacggccgggaggccgagggcgcagaagaggacgggaggggcaagctgcggccaaccaaggccaagagcgagcggaagaagaagagcttcggcctgctgcccccacagctgccgcccccgcctgctcacttcccctcagaggaggcgctgtggctgccatccccactggagcccccggtgctgggcccaggccctgcagccatggaggagagccccctgccggcaccccttaatgtcgtgccccctgaggtgcccagtgaggagctagaggccaagcctcggcccatcatccccatgctgtacgtggtgccgcggccgggcaaggcagccttcaaccaggagcacgtgtcctgccagcaggcctttgagcactttgcccagaagggtccgacctggaaggaaccagtttcccccatggagctgacggggccagaggacggtgcagccagcagtggggcaggtcgcatggagaccaaagcccgggccggagaggggcaggcaccgtccacattttccaaattgaagatggagatcaagaagagccggcgccatcccctgggccggccgcccacccggtccccactgtcggtggtgaagcaggaggcctcaagtgacgaggaggcatcccctttctccggggaggaagatgtgagtgacccggacgccttgaggccgctgctgtctctgcagtggaagaacagggcggccagcttccaggccgagaggaagttcaacgcagcggctgcgcgcacggagccctactgcgccatctgcacgctcttctacccctactgccaggccctacagactgagaaggaggcacccatagcctccctcggagagggctgcccggccacattaccctccaaaagccgtcagaagacccgaccgctcatccctgagatgtgcttcacctctggcggtgagaacacggagccgctgcctgccaactcctacatcggcgacgacgggaccagccccctgatcgcctgcggcaagtgctgcctgcaggtccatgccagttgctatggcatccgtcccgagctggtcaatgaaggctggacgtgttcccggtgcgcggcccacgcctggactgcggagtgctgcctgtgcaacctgcgaggaggtgcgctgcagatgaccaccgataggaggtggatccacgtgatctgtgccatcgcagtccccgaggcgcgcttcctgaacgtgattgagcgccaccctgtggacatcagcgccatccccgagcagcggtggaagctgaaatgcgtgtactgccggaagcggatgaagaaggtgtcaggtgcctgtatccagtgctcctacgagcactgctccacgtccttccacgtgacctgcgcccacgccgcaggcgtgctcatggagccggacgactggccctatgtggtctccatcacctgcctcaagcacaagtcggggggtcacgctgtccaactcctgagggccgtgtccctaggccaggtggtcatcaccaagaaccgcaacgggctgtactaccgctgtcgcgtcatcggtgccgcctcgcagacctgctacgaagtgaacttcgacgatggctcctacagcgacaacctgtaccctgagagcatcacgagtagggactgtgtccagctgggacccccttccgagggggagctggtggagctccggtggactgacggcaacctctacaaggccaagttcatctcctccgtcaccagccacatctaccaggtggagtttgaggacgggtcccagctgacggtgaagcgtggggacatcttcaccctggaggaggagctgcccaagagggtccgctctcggctgtcactgagcacgggggcaccgcaggagcccgccttctcgggggaggaggccaaggccgccaagcgcccgcgtgtgggcaccccgcttgccacggaggactccgggcggagccaggactacgtggccttcgtggagagcctcctgcaggtgcagggccggcccggagcccccttctaggacagctggccgctcaggcgaccctcagcccggcggggaggccatggcatgccccgggcgttcgcttgctgtgaattcctgtcctcgtgtccccgacccccgagaggccacctccaagccgcgggtgccccctagggcgacaggagccagcgggacgccgcacgcggccccagactcagggagcagggccaggcgggctcgggggccggccaggggagcaccccactcaactactcagaattttaaaccatgtaagctctcttcttctcgaaaaggtgctactgcaatgccctactgagcaacctttgagattgtcacttctgtacataaaccacctttgtgaggctctttctataaatacatattgtttaaaaaaaagcaagaaaaaaaggaaaacaaaggaaaatatccccaaagttgttttctagatttgtggctttaagaaaaacaaaacaaaacaaacacattgtttttctcagaaccaggattctctgagaggtcagagcatctcgctgtttttttgttgttgttttaaaatattatgatttggctacagaccaggcagggaaagagacccggtaattggagggtgagcctcggggggggggcaggacgccccggtttcggcacagcccggtcactcacggcctcgctctcgcctcaccccggctcctgggctttgatggtctggtgccagtgcctgtgcccactctgtgcctgctgggaggaggcccaggctctctggtggccgcccctgtgcacctggccaggggaagcccgggggtctggggcctccctccgtctgcgcccacctttgcagaataaactctctcctggggtttgtctatctttgtttctctcacctgagagaaacgcaggtgttccagaggcttccttgcagacaaagcacccctgcacctcctatggctcaggatgagggaggcccccaggcccttctggttggtagtgagtgtggacagcttcccagctcttcgggtacaaccctgagcaggtcgggggacacagggccgaggcaggccttcggggcccctttcgcctgcttccgggcagggacgaggcctggtgtcctcgctccacccacccacgctgctgtcacctgaggggaatctgcttcttaggagtgggttgagctgatagagaaaaaacggccttcagcccaggctgggaagcgccttctccaggtgcctctccctcaccagctctgcacccctctggggagccttccccaccttagctgtctcctgccccagggagggatggaggagataatttgcttatattaaaaacaaaaaatggctgaggcaggagtttgggaccagcctgggctatatagcaagaccccatcactacaaattttttacaaattagctaggtgtggtggtgcgcacctgtggtcccagctactcgggaggctgtggtgggaggattgcttgagtccaggaggttgaggctgcagtcagctcagattgcaccactgcactccagcctgggcaacagagcgagaccctgtctccaaaaaaaaaaaaaagcaatgtttatattataaaagagtgtcctaacagtccccgggctagagaggactaaggaaaacagagagagtgttacgcaggagcaagcctttcatttccttggtgggggaggggggcggttgccctggagagggccggggtcggggaggttggggggtgtcagccaaaacgtggaggtgtccctctgcacgcagccctcgcccggcgtggcgctgacactgtattcttatgttgtttgaaaatgctatttatattgtaaagaagcgggcgggtgcccctgctgcccttgtcccttgggggtcacacccatcccctggtgggctcctgggcggcctgcgcagatgggccacagaagggcaggccggagctgcacactctccccacgaaggtatctctgtgtcttactctgtgcaaagacgcggcaaaacccagtgccctggtttttccccacccgagatgaaggatacgctgtattttttgcctaatgtccctgcctctaggttcataatgaattaaaggttcatgaacgctgcgaaa

SEQ ID NO: 301939 - DNA, 4651 bp, Homo sapiens
caacagtggtggccttggtgtgggggcagcctcccccttccctttgagcagtgaccttccctctgcagccatccagtctctgctgccttgatcttgtcccagctggcgatggatggtgcccactcgagacccagccactgagcaccaaggttgggggcggctcagccttggccccccaccacgctctgcagaaacaggccttggaactggtttctgaaaagtcacttctggtccagaaccttctcctctaaatgggcgccttctttttcaacacgtccatctgtctacaaattagtctgaaagaaaacagacactggagaaagactgaggaggagaggaaaccaagtctagaaaggaagaaagagcagaccaaaaggccggggctgtcgtctcaccggaaacggagccagcccaagaagccgaagcccgaagaccccaagttccctggggagggtacggctggggcagcgctcctagaggaggctgggggcagcgtgaaggaggaggctgggccggaggttgaccccgaggaggaggaggaggagccgcagccactgccacacggccgggaggccgagggcgcagaagaggacgggaggggcaagctgcggccaaccaaggccaagagcgagcggaagaagaagagcttcggcctgctgcccccacagctgccgcccccgcctgctcacttcccctcagaggaggcgctgtggctgccatccccactggagcccccggtgctgggcccaggccctgcagccatggaggagagccccctgccggcaccccttaatgtcgtgccccctgaggtgcccagtgaggagctagaggccaagcctcggcccatcatccccatgctgtacgtggtgccgcggccgggcaaggcagccttcaaccaggagcacgtgtcctgccagcaggcctttgagcactttgcccagaagggtccgacctggaaggaaccagtttcccccatggagctgacggggccagaggacggtgcagccagcagtggggcaggtcgcatggagaccaaagcccgggccggagaggggcaggcaccgtccacattttccaaattgaagatggagatcaagaagagccggcgccatcccctgggccggccgcccacccggtccccactgtcggtggtgaagcaggaggcctcaagtgacgaggaggcatcccctttctccggggaggaagatgtgagtgacccggacgccttgaggccgctgctgtctctgcagtggaagaacagggcggccagcttccaggccgagaggaagttcaacgcagcggctgcgcgcacggagccctactgcgccatctgcacgctcttctacccctactgccaggccctacagactgagaaggaggcacccatagcctccctcggagagggctgcccggccacattaccctccaaaagccgtcagaagacccgaccgctcatccctgagatgtgcttcacctctggcggtgagaacacggagccgctgcctgccaactcctacatcggcgacgacgggaccagccccctgatcgcctgcggcaagtgctgcctgcaggtccatgccagttgctatggcatccgtcccgagctggtcaatgaaggctggacgtgttcccggtgcgcggcccacgcctggactgcggagtgctgcctgtgcaacctgcgaggaggtgcgctgcagatgaccaccgataggaggtggatccacgtgatctgtgccatcgcagtccccgaggcgcgcttcctgaacgtgattgagcgccaccctgtggacatcagcgccatccccgagcagcggtggaagctgaaatgcgtgtactgccggaagcggatgaagaaggtgtcaggtgcctgtatccagtgctcctacgagcactgctccacgtccttccacgtgacctgcgcccacgccgcaggcgtgctcatggagccggacgactggccctatgtggtctccatcacctgcctcaagcacaagtcggggggtcacgctgtccaactcctgagggccgtgtccctaggccaggtggtcatcaccaagaaccgcaacgggctgtactaccgctgtcgcgtcatcggtgccgcctcgcagacctgctacgaagtgaacttcgacgatggctcctacagcgacaacctgtaccctgagagcatcacgagtagggactgtgtccagctgggacccccttccgagggggagctggtggagctccggtggactgacggcaacctctacaaggccaagttcatctcctccgtcaccagccacatctaccaggtggagtttgaggacgggtcccagctgacggtgaagcgtggggacatcttcaccctggaggaggagctgcccaagagggtccgctctcggctgtcactgagcacgggggcaccgcaggagcccgccttctcgggggaggaggccaaggccgccaagcgcccgcgtgtgggcaccccgcttgccacggaggactccgggcggagccaggactacgtggccttcgtggagagcctcctgcaggtgcagggccggcccggagcccccttctaggacagctggccgctcaggcgaccctcagcccggcggggaggccatggcatgccccgggcgttcgcttgctgtgaattcctgtcctcgtgtccccgacccccgagaggccacctccaagccgcgggtgccccctagggcgacaggagccagcgggacgccgcacgcggccccagactcagggagcagggccaggcgggctcgggggccggccaggggagcaccccactcaactactcagaattttaaaccatgtaagctctcttcttctcgaaaaggtgctactgcaatgccctactgagcaacctttgagattgtcacttctgtacataaaccacctttgtgaggctctttctataaatacatattgtttaaaaaaaagcaagaaaaaaaggaaaacaaaggaaaatatccccaaagttgttttctagatttgtggctttaagaaaaacaaaacaaaacaaacacattgtttttctcagaaccaggattctctgagaggtcagagcatctcgctgtttttttgttgttgttttaaaatattatgatttggctacagaccaggcagggaaagagacccggtaattggagggtgagcctcggggggggggcaggacgccccggtttcggcacagcccggtcactcacggcctcgctctcgcctcaccccggctcctgggctttgatggtctggtgccagtgcctgtgcccactctgtgcctgctgggaggaggcccaggctctctggtggccgcccctgtgcacctggccaggggaagcccgggggtctggggcctccctccgtctgcgcccacctttgcagaataaactctctcctggggtttgtctatctttgtttctctcacctgagagaaacgcaggtgttccagaggcttccttgcagacaaagcacccctgcacctcctatggctcaggatgagggaggcccccaggcccttctggttggtagtgagtgtggacagcttcccagctcttcgggtacaaccctgagcaggtcgggggacacagggccgaggcaggccttcggggcccctttcgcctgcttccgggcagggacgaggcctggtgtcctcgctccacccacccacgctgctgtcacctgaggggaatctgcttcttaggagtgggttgagctgatagagaaaaaacggccttcagcccaggctgggaagcgccttctccaggtgcctctccctcaccagctctgcacccctctggggagccttccccaccttagctgtctcctgccccagggagggatggaggagataatttgcttatattaaaaacaaaaaatggctgaggcaggagtttgggaccagcctgggctatatagcaagaccccatcactacaaattttttacaaattagctaggtgtggtggtgcgcacctgtggtcccagctactcgggaggctgtggtgggaggattgcttgagtccaggaggttgaggctgcagtcagctcagattgcaccactgcactccagcctgggcaacagagcgagaccctgtctccaaaaaaaaaaaaaagcaatgtttatattataaaagagtgtcctaacagtccccgggctagagaggactaaggaaaacagagagagtgttacgcaggagcaagcctttcatttccttggtgggggaggggggcggttgccctggagagggccggggtcggggaggttggggggtgtcagccaaaacgtggaggtgtccctctgcacgcagccctcgcccggcgtggcgctgacactgtattcttatgttgtttgaaaatgctatttatattgtaaagaagcgggcgggtgcccctgctgcccttgtcccttgggggtcacacccatcccctggtgggctcctgggcggcctgcgcagatgggccacagaagggcaggccggagctgcacactctccccacgaaggtatctctgtgtcttactctgtgcaaagacgcggcaaaacccagtgccctggtttttccccacccgagatgaaggatacgctgtattttttgcctaatgtccctgcctctaggttcataatgaattaaaggttcatgaacgctgcgaaa

SEQ ID NO: 301940 - DNA, 1960 bp, Homo sapiens
tggcacgaggtacttgaccgagctcatcgacaggtacaagagatggaaggcgggagcagggccaggcgggctcgggggccggccaggggagcaccccactcaactactcagaattttaaaccatgtaagctctcttcttctcgaaaaggtgctactgcaatgccctactgagcaacctttgagattgtcacttctgtacataaaccacctttgtgaggctctttctataaatacatattgtttaaaaaaaagcaagaaaaaaaggaaaacaaaggaaaatatccccaaagttgttttctagatttgtggctttaagaaaaacaaaacaaaacaaacacattgtttttctcagaaccaggattctctgagaggtcagagcatctcgctgtttttttgttgttgttttaaaatattatgatttggctacagaccaggcagggaaagagacccggtaattggagggtgagcctcggggggggggcaggacgccccggtttcggcacagcccggtcactcacggcctcgctctcgcctcaccccggctcctgggctttgatggtctggtgccagtgcctgtgcccactctgtgcctgctgggaggaggcccaggctctctggtggccgcccctgtgcacctggccaggggaagcccgggggtctggggcctccctccgtctgcgcccacctttgcagaataaactctctcctggggtttgtctatctttgtttctctcacctgagagaaacgcaggtgttccagaggcttccttgcagacaaagcacccctgcacctcctatggctcaggatgagggaggcccccaggcccttctggttggtagtgagtgtggacagcttcccagctcttcgggtacaaccctgagcaggtcgggggacacagggccgaggcaggccttcggggcccctttcgcctgcttccgggcagggacgaggcctggtgtcctcgctccacccacccacgctgctgtcacctgaggggaatctgcttcttaggagtgggttgagctgatagagaaaaaacggccttcagcccaggctgggaagcgccttctccaggtgcctctccctcaccagctctgcacccctctggggagccttccccaccttagctgtctcctgccccagggagggatggaggagataatttgcttatattaaaaacaaaaaatggctgaggcaggagtttgggaccagcctgggctatatagcaagaccccatcactacaaattttttacaaattagctaggtgtggtggtgcgcacctgtggtcccagctactcgggaggctgtggtgggaggattgcttgagtccaggaggttgaggctgcagtcagctcagattgcaccactgcactccagcctgggcaacagagcgagaccctgtctccaaaaaaaaaaaaaagcaatgtttatattataaaagagtgtcctaacagtccccgggctagagaggactaaggaaaacagagagagtgttacgcaggagcaagcctttcatttccttggtgggggaggggggcggttgccctggagagggccggggtcggggaggttggggggtgtcagccaaaacgtggaggtgtccctctgcacgcagccctcgcccggcgtggcgctgacactgtattcttatgttgtttgaaaatgctatttatattgtaaagaagcgggcgggtgcccctgctgcccttgtcccttgggggtcacacccatcccctggtgggctcctgggcggcctgcgcagatgggccacagaagggcaggccggagctgcacactctccccacgaaggtatctctgtgtcttactctgtgcaaagacgcggcaaaacccagtgccctggtttttccccacccgagatgaaggatacgctgtattttttgcctaatgtccctgcctctaggttcataatgaattaaaggttcatgaacgctgcgaaa

SEQ ID NO: 301941 - DNA, 5343 bp, Homo sapiens
  misc_feature (587)..(587): n is a, c, g, or t
cggctgtacgcccggaattatgggatagcaaccgagcggggcccggcccgagcggggcctgggggtgcgacgccgagggcgggggagagcgcgccgctgctcccggaccgggccgcgcacgccgcctcaggaaccatcactgttgctggaggcacctgacaaatcctagcgaatttttggagcatctccacccaggaacctcgccatccagaagtgtgcttcccgcacagctgcagccatggggtctgaggaccacggcgcccagaaccccagctgtaaaatcatgacgtttcgcccaaccatggaagaatttaaagacttcaacaaatacgtggcctacatagagtcgcagggagcccaccgggcggggcctggccaagatcatccccccgaaggagtggaagccgcggcagacgtatgatgacatcgacgacgtggtgatcccggcgcccatccagcaggtggtgacgggccagtcgggcctcttcacgcagtacaatatccagaagaaggccatgacagtgggcgagtaccgccgcctggccaacagcgagaagtactgtaccccgcggcaccaggactttgangaccttgaacgcaaatactggaagaacctcacctttgtctccccgatctacggggctgacatcagcggctctttgtatgatgacgacgtggcccagtggaacatcgggagcctccggaccatcctggacatggtggagcgcgagtgcggcaccatcatcgagggcgtgaacacgccctacctgtacttcggcatgtggaagaccaccttcgcctggcacaccgaggacatggacctgtacagcatcaactacctgcactttggggagcctaagtcctggtacgccatcccaccagagcacggcaagcgcctggagcggctggccatcggcttcttccccgggagctcgcagggctgcgacgccttcctgcggcataagatgaccctcatctcgcccatcatcctgaagaagtacgggatccccttcagccggatcacgcaggaggccggggaattcatgatcacatttccctacggctaccacgccggcttcaatcacgggttcaactgcgcagaatctaccaacttcgccaccctgcggtggattgactacggcaaagtggccactcagtgcacgtgccggaaggacatggtcaagatctccatggacgtgttcgtgcgcatcctgcagcccgagcgctacgagctgtggaagcagggcaaggacctcacggtgctggaccacacgcggcccacggcgctcaccagccccgagctgagctcctggagtgcgtcccgggcctcgctgaaggccaagctcctccgcagacaaattagtctgaaagaaaacagacactggagaaagactgaggaggagaggaaaccaagtctagaaaggaagaaagagcagaccaaaaggccggggctgtcgtctcaccggaaacggagccagcccaagaagccgaagcccgaagaccccaagttccctggggagggtacggctggggcagcgctcctagaggaggctgggggcagcgtgaaggaggaggctgggccggaggttgaccccgaggaggaggaggaggagccgcagccactgccacacggccgggaggccgagggcgcagaagaggacgggaggggcaagctgcggccaaccaaggccaagagcgagcggaagaagaagagcttcggcctgctgcccccacagctgccgcccccgcctgctcacttcccctcagaggaggcgctgtggctgccatccccactggagcccccggtgctgggcccaggccctgcagccatggaggagagccccctgccggcaccccttaatgtcgtgccccctgaggtgcccagtgaggagctagaggccaagcctcggcccatcatccccatgctgtacgtggtgccgcggccgggcaaggcagccttcaaccaggagcacgtgtcctgccagcaggcctttgagcactttgcccagaagggtccgacctggaaggaaccagtttcccccatggagctgacggggccagaggacggtgcagccagcagtggggcaggtcgcatggagaccaaagcccgggccggagaggggcaggcaccgtccacattttccaaattgaagatggagatcaagaagagccggcgccatcccctgggccggccgcccacccggtccccactgtcggtggtgaagcaggaggcctcaagtgacgaggaggcatcccctttctccggggaggaagatgtgagtgacccggacgccttgaggccgctgctgtctctgcagtggaagaacagggcggccagcttccaggccgagaggaagttcaacgcagcggctgcgcgcacggagccctactgcgccatctgcacgctcttctacccctactgccaggccctacagactgagaaggaggcacccatagcctccctcggagagggctgcccggccacattaccctccaaaagccgtcagaagacccgaccgctcatccctgagatgtgcttcacctctggcggtgagaacacggagccgctgcctgccaactcctacatcggcgacgacgggaccagccccctgatcgcctgcggcaagtgctgcctgcaggtccatgccagttgctatggcatccgtcccgagctggtcaatgaaggctggacgtgttcccggtgcgcggcccacgcctggactgcggagtgctgcctgtgcaacctgcgaggaggtgcgctgcagatgaccaccgataggaggtggatccacgtgatctgtgccatcgcagtccccgaggcgcgcttcctgaacgtgattgagcgccaccctgtggacatcagcgccatccccgagcagcggtggaagctgaaatgcgtgtactgccggaagcggatgaagaaggtgtcaggtgcctgtatccagtgctcctacgagcactgctccacgtccttccacgtgacctgcgcccacgccgcaggcgtgctcatggagccggacgactggccctatgtggtctccatcacctgcctcaagcacaagtcggggggtcacgctgtccaactcctgagggccgtgtccctaggccaggtggtcatcaccaagaaccgcaacgggctgtactaccgctgtcgcgtcatcggtgccgcctcgcagacctgctacgaagtgaacttcgacgatggctcctacagcgacaacctgtaccctgagagcatcacgagtagggactgtgtccagctgggacccccttccgagggggagctggtggagctccggtggactgacggcaacctctacaaggccaagttcatctcctccgtcaccagccacatctaccaggtggagtttgaggacgggtcccagctgacggtgaagcgtggggacatcttcaccctggaggaggagctgcccaagagggtccgctctcggctgtcactgagcacgggggcaccgcaggagcccgccttctcgggggaggaggccaaggccgccaagcgcccgcgtgtgggcaccccgcttgccacggaggactccgggcggagccaggactacgtggccttcgtggagagcctcctgcaggtgcagggccggcccggagcccccttctaggacagctggccgctcaggcgaccctcagcccggcggggaggccatggcatgccccgggcgttcgcttgctgtgaattcctgtcctcgtgtccccgacccccgagaggccacctccaagccgcgggtgccccctagggcgacaggagccagcgggacgccgcacgcggccccagactcagggagcagggccaggcgggctcgggggccggccaggggagcaccccactcaactactcagaattttaaaccatgtaagctctcttcttctcgaaaaggtgctactgcaatgccctactgagcaacctttgagattgtcacttctgtacataaaccacctttgtgaggctctttctataaatacatattgtttaaaaaaaagcaagaaaaaaaggaaaacaaaggaaaatatccccaaagttgttttctagatttgtggctttaagaaaaacaaaacaaaacaaacacattgtttttctcagaaccaggattctctgagaggtcagagcatctcgctgtttttttgttgttgttttaaaatattatgatttggctacagaccaggcagggaaagagacccggtaattggagggtgagcctcggggggggggcaggacgccccggtttcggcacagcccggtcgggggacacagggccgaggcaggccttcggggcccctttcgcctgcttccgggcagggacgaggcctggtgtcctcgctccacccacccacgctgctgtcacctgaggggaatctgcttcttaggagtgggttgagctgatagagaaaaaacggccttcagcccaggctgggaagcgccttctccaggtgcctctccctcaccagctctgcacccctctggggagccttccccaccttagctgtctcctgccccagggagggatggaggagataatttgcttatattaaaaacaaaaaatggctgaggcaggagtttgggaccagcctgggctatatagcaagaccccatcactacaaattttttacaaattagctaggtgtggtggtgcgcacctgtggtcccagctactcgggaggctgtggtgggaggattgcttgagtccaggaggttgaggctgcagtcagctcagattgcaccactgcactccagcctgggcaacagagcgagaccctgtctccaaaaaaaaaaaaaagcaatgtttatattataaaagagtgtcctaacagtccccgggctagagaggactaaggaaaacagagagagtgttacgcaggagcaagcctttcatttccttggtgggggaggggggcggttgccctggagagggccggggtcggggaggttggggggtgtcagccaaaacgtggaggtgtccctctgcacgcagccctcgcccggcgtggcgctgacactgtattcttatgttgtttgaaaatgctatttatattgtaaagaagcgggcgggtgcccctgctgcccttgtcccttgggggtcacacccatcccctggtgggctcctgggcggcctgcgcagatgggccacagaagggcaggccggagctgcacactctccccacgaaggtatctctgtgtcttactctgtgcaaagacgcggcaaaacccagtgccctggtttttccccacccgagatgaaggatacgctgtattttttgcctaatgtccctgcctctaggttcataatgaattaaaggttcatgaacgctgcgaaa

SEQ ID NO: 301942 - DNA, 3540 bp, Homo sapiens
  misc_feature (587)..(587): n is a, c, g, or t
cggctgtacgcccggaattatgggatagcaaccgagcggggcccggcccgagcggggcctgggggtgcgacgccgagggcgggggagagcgcgccgctgctcccggaccgggccgcgcacgccgcctcaggaaccatcactgttgctggaggcacctgacaaatcctagcgaatttttggagcatctccacccaggaacctcgccatccagaagtgtgcttcccgcacagctgcagccatggggtctgaggaccacggcgcccagaaccccagctgtaaaatcatgacgtttcgcccaaccatggaagaatttaaagacttcaacaaatacgtggcctacatagagtcgcagggagcccaccgggcggggcctggccaagatcatccccccgaaggagtggaagccgcggcagacgtatgatgacatcgacgacgtggtgatcccggcgcccatccagcaggtggtgacgggccagtcgggcctcttcacgcagtacaatatccagaagaaggccatgacagtgggcgagtaccgccgcctggccaacagcgagaagtactgtaccccgcggcaccaggactttgangaccttgaacgcaaatactggaagaacctcacctttgtctccccgatctacggggctgacatcagcggctctttgtatgatgacgacgtggcccagtggaacatcgggagcctccggaccatcctggacatggtggagcgcgagtgcggcaccatcatcgagggcgtgaacacgccctacctgtacttcggcatgtggaagaccaccttcgcctggcacaccgaggacatggacctgtacagcatcaactacctgcactttggggagcctaagtcctggtacgccatcccaccagagcacggcaagcgcctggagcggctggccatcggcttcttccccgggagctcgcagggctgcgacgccttcctgcggcataagatgaccctcatctcgcccatcatcctgaagaagtacgggatccccttcagccggatcacgcaggaggccggggaattcatgatcacatttccctacggctaccacgccggcttcaatcacgggttcaactgcgcagaatctaccaacttcgccaccctgcggtggattgactacggcaaagtggccactcagtgcacgtgccggaaggacatggtcaagatctccatggacgtgttcgtgcgcatcctgcagcccgagcgctacgagctgtggaagcagggcaaggacctcacggtgctggaccacacgcggcccacggcgctcaccagccccgagctgagctcctggagtgcgtcccgggcctcgctgaaggccaagctcctccgcagacaaattagtctgaaagaaaacagacactggagaaagactgaggaggagaggaaaccaagtctagaaaggaagaaagagcagaccaaaaggccggggctgtcgtctcaccggaaacggagccagcccaagaagccgaagcccgaagaccccaagttccctggggagggtacggctggggcagcgctcctagaggaggctgggggcagcgtgaaggaggaggctgggccggaggttgaccccgaggaggaggaggaggagccgcagccactgccacacgggagcagggccaggcgggctcgggggccggccaggggagcaccccactcaactactcagaattttaaaccatgtaagctctcttcttctcgaaaaggtgctactgcaatgccctactgagcaacctttgagattgtcacttctgtacataaaccacctttgtgaggctctttctataaatacatattgtttaaaaaaaagcaagaaaaaaaggaaaacaaaggaaaatatccccaaagttgttttctagatttgtggctttaagaaaaacaaaacaaaacaaacacattgtttttctcagaaccaggattctctgagaggtcagagcatctcgctgtttttttgttgttgttttaaaatattatgatttggctacagaccaggcagggaaagagacccggtaattggagggtgagcctcggggggggggcaggacgccccggtttcggcacagcccggtcactcacggcctcgctctcgcctcaccccggctcctgggctttgatggtctggtgccagtgcctgtgcccactctgtgcctgctgggaggaggcccaggctctctggtggccgcccctgtgcacctggccaggggaagcccgggggtctggggcctccctccgtctgcgcccacctttgcagaataaactctctcctggggtttgtctatctttgtttctctcacctgagagaaacgcaggtgttccagaggcttccttgcagacaaagcacccctgcacctcctatggctcaggatgagggaggcccccaggcccttctggttggtagtgagtgtggacagcttcccagctcttcgggtacaaccctgagcaggtcgggggacacagggccgaggcaggccttcggggcccctttcgcctgcttccgggcagggacgaggcctggtgtcctcgctccacccacccacgctgctgtcacctgaggggaatctgcttcttaggagtgggttgagctgatagagaaaaaacggccttcagcccaggctgggaagcgccttctccaggtgcctctccctcaccagctctgcacccctctggggagccttccccaccttagctgtctcctgccccagggagggatggaggagataatttgcttatattaaaaacaaaaaatggctgaggcaggagtttgggaccagcctgggctatatagcaagaccccatcactacaaattttttacaaattagctaggtgtggtggtgcgcacctgtggtcccagctactcgggaggctgtggtgggaggattgcttgagtccaggaggttgaggctgcagtcagctcagattgcaccactgcactccagcctgggcaacagagcgagaccctgtctccaaaaaaaaaaaaaagcaatgtttatattataaaagagtgtcctaacagtccccgggctagagaggactaaggaaaacagagagagtgttacgcaggagcaagcctttcatttccttggtgggggaggggggcggttgccctggagagggccggggtcggggaggttggggggtgtcagccaaaacgtggaggtgtccctctgcacgcagccctcgcccggcgtggcgctgacactgtattcttatgttgtttgaaaatgctatttatattgtaaagaagcgggcgggtgcccctgctgcccttgtcccttgggggtcacacccatcccctggtgggctcctgggcggcctgcgcagatgggccacagaagggcaggccggagctgcacactctccccacgaaggtatctctgtgtcttactctgtgcaaagacgcggcaaaacccagtgccctggtttttccccacccgagatgaaggatacgctgtattttttgcctaatgtccctgcctctaggttcataatgaattaaaggttcatgaacgctgcgaaa

SEQ ID NO: 301943 - DNA, 2070 bp, Homo sapiens
tgggtaaatggatcagagcctcccaggtcagtcccaggtctgcagcttgtccagatggcaacagtgacccttcacttctactctagcgttcaaataggaacgatgtcaggatccgtatgaagtgtgaaatactagaaccctagccgctagctcgtggcttggggagcagggccaggcgggctcgggggccggccaggggagcaccccactcaactactcagaattttaaaccatgtaagctctcttcttctcgaaaaggtgctactgcaatgccctactgagcaacctttgagattgtcacttctgtacataaaccacctttgtgaggctctttctataaatacatattgtttaaaaaaaagcaagaaaaaaaggaaaacaaaggaaaatatccccaaagttgttttctagatttgtggctttaagaaaaacaaaacaaaacaaacacattgtttttctcagaaccaggattctctgagaggtcagagcatctcgctgtttttttgttgttgttttaaaatattatgatttggctacagaccaggcagggaaagagacccggtaattggagggtgagcctcggggggggggcaggacgccccggtttcggcacagcccggtcactcacggcctcgctctcgcctcaccccggctcctgggctttgatggtctggtgccagtgcctgtgcccactctgtgcctgctgggaggaggcccaggctctctggtggccgcccctgtgcacctggccaggggaagcccgggggtctggggcctccctccgtctgcgcccacctttgcagaataaactctctcctggggtttgtctatctttgtttctctcacctgagagaaacgcaggtgttccagaggcttccttgcagacaaagcacccctgcacctcctatggctcaggatgagggaggcccccaggcccttctggttggtagtgagtgtggacagcttcccagctcttcgggtacaaccctgagcaggtcgggggacacagggccgaggcaggccttcggggcccctttcgcctgcttccgggcagggacgaggcctggtgtcctcgctccacccacccacgctgctgtcacctgaggggaatctgcttcttaggagtgggttgagctgatagagaaaaaacggccttcagcccaggctgggaagcgccttctccaggtgcctctccctcaccagctctgcacccctctggggagccttccccaccttagctgtctcctgccccagggagggatggaggagataatttgcttatattaaaaacaaaaaatggctgaggcaggagtttgggaccagcctgggctatatagcaagaccccatcactacaaattttttacaaattagctaggtgtggtggtgcgcacctgtggtcccagctactcgggaggctgtggtgggaggattgcttgagtccaggaggttgaggctgcagtcagctcagattgcaccactgcactccagcctgggcaacagagcgagaccctgtctccaaaaaaaaaaaaaagcaatgtttatattataaaagagtgtcctaacagtccccgggctagagaggactaaggaaaacagagagagtgttacgcaggagcaagcctttcatttccttggtgggggaggggggcggttgccctggagagggccggggtcggggaggttggggggtgtcagccaaaacgtggaggtgtccctctgcacgcagccctcgcccggcgtggcgctgacactgtattcttatgttgtttgaaaatgctatttatattgtaaagaagcgggcgggtgcccctgctgcccttgtcccttgggggtcacacccatcccctggtgggctcctgggcggcctgcgcagatgggccacagaagggcaggccggagctgcacactctccccacgaaggtatctctgtgtcttactctgtgcaaagacgcggcaaaacccagtgccctggtttttccccacccgagatgaaggatacgctgtattttttgcctaatgtccctgcctctaggttcataatgaattaaaggttcatgaacgctgcgaaa

SEQ ID NO: 301944 - DNA, 6098 bp, Homo sapiens
  misc_feature (587)..(587): n is a, c, g, or t
cggctgtacgcccggaattatgggatagcaaccgagcggggcccggcccgagcggggcctgggggtgcgacgccgagggcgggggagagcgcgccgctgctcccggaccgggccgcgcacgccgcctcaggaaccatcactgttgctggaggcacctgacaaatcctagcgaatttttggagcatctccacccaggaacctcgccatccagaagtgtgcttcccgcacagctgcagccatggggtctgaggaccacggcgcccagaaccccagctgtaaaatcatgacgtttcgcccaaccatggaagaatttaaagacttcaacaaatacgtggcctacatagagtcgcagggagcccaccgggcggggcctggccaagatcatccccccgaaggagtggaagccgcggcagacgtatgatgacatcgacgacgtggtgatcccggcgcccatccagcaggtggtgacgggccagtcgggcctcttcacgcagtacaatatccagaagaaggccatgacagtgggcgagtaccgccgcctggccaacagcgagaagtactgtaccccgcggcaccaggactttgangaccttgaacgcaaatactggaagaacctcacctttgtctccccgatctacggggctgacatcagcggctctttgtatgatgacgacgtggcccagtggaacatcgggagcctccggaccatcctggacatggtggagcgcgagtgcggcaccatcatcgagggcgtgaacacgccctacctgtacttcggcatgtggaagaccaccttcgcctggcacaccgaggacatggacctgtacagcatcaactacctgcactttggggagcctaagtcctggtacgccatcccaccagagcacggcaagcgcctggagcggctggccatcggcttcttccccgggagctcgcagggctgcgacgccttcctgcggcataagatgaccctcatctcgcccatcatcctgaagaagtacgggatccccttcagccggatcacgcaggaggccggggaattcatgatcacatttccctacggctaccacgccggcttcaatcacgggttcaactgcgcagaatctaccaacttcgccaccctgcggtggattgactacggcaaagtggccactcagtgcacgtgccggaaggacatggtcaagatctccatggacgtgttcgtgcgcatcctgcagcccgagcgctacgagctgtggaagcagggcaaggacctcacggtgctggaccacacgcggcccacggcgctcaccagccccgagctgagctcctggagtgcgtcccgggcctcgctgaaggccaagctcctccgcagacaaattagtctgaaagaaaacagacactggagaaagactgaggaggagaggaaaccaagtctagaaaggaagaaagagcagaccaaaaggccggggctgtcgtctcaccggaaacggagccagcccaagaagccgaagcccgaagaccccaagttccctggggagggtacggctggggcagcgctcctagaggaggctgggggcagcgtgaaggaggaggctgggccggaggttgaccccgaggaggaggaggaggagccgcagccactgccacacggccgggaggccgagggcgcagaagaggacgggaggggcaagctgcggccaaccaaggccaagagcgagcggaagaagaagagcttcggcctgctgcccccacagctgccgcccccgcctgctcacttcccctcagaggaggcgctgtggctgccatccccactggagcccccggtgctgggcccaggccctgcagccatggaggagagccccctgccggcaccccttaatgtcgtgccccctgaggtgcccagtgaggagctagaggccaagcctcggcccatcatccccatgctgtacgtggtgccgcggccgggcaaggcagccttcaaccaggagcacgtgtcctgccagcaggcctttgagcactttgcccagaagggtccgacctggaaggaaccagtttcccccatggagctgacggggccagaggacggtgcagccagcagtggggcaggtcgcatggagaccaaagcccgggccggagaggggcaggcaccgtccacattttccaaattgaagatggagatcaagaagagccggcgccatcccctgggccggccgcccacccggtccccactgtcggtggtgaagcaggaggcctcaagtgacgaggaggcatcccctttctccggggaggaagatgtgagtgacccggacgccttgaggccgctgctgtctctgcagtggaagaacagggcggccagcttccaggccgagaggaagttcaacgcagcggctgcgcgcacggagccctactgcgccatctgcacgctcttctacccctactgccaggccctacagactgagaaggaggcacccatagcctccctcggagagggctgcccggccacattaccctccaaaagccgtcagaagacccgaccgctcatccctgagatgtgcttcacctctggcggtgagaacacggagccgctgcctgccaactcctacatcggcgacgacgggaccagccccctgatcgcctgcggcaagtgctgcctgcaggtccatgccagttgctatggcatccgtcccgagctggtcaatgaaggctggacgtgttcccggtgcgcggcccacgcctggactgcggagtgctgcctgtgcaacctgcgaggaggtgcgctgcagatgaccaccgataggaggtggatccacgtgatctgtgccatcgcagtccccgaggcgcgcttcctgaacgtgattgagcgccaccctgtggacatcagcgccatccccgagcagcggtggaagctgaaatgcgtgtactgccggaagcggatgaagaaggtgtcaggtgcctgtatccagtgctcctacgagcactgctccacgtccttccacgtgacctgcgcccacgccgcaggcgtgctcatggagccggacgactggccctatgtggtctccatcacctgcctcaagcacaagtcggggggtcacgctgtccaactcctgagggccgtgtccctaggccaggtggtcatcaccaagaaccgcaacgggctgtactaccgctgtcgcgtcatcggtgccgcctcgcagacctgctacgaagtgaacttcgacgatggctcctacagcgacaacctgtaccctgagagcatcacgagtagggactgtgtccagctgggacccccttccgagggggagctggtggagctccggtggactgacggcaacctctacaaggccaagttcatctcctccgtcaccagccacatctaccaggtggagtttgaggacgggtcccagctgacggtgaagcgtggggacatcttcaccctggaggaggagctgcccaagagggtccgctctcggctgtcactgagcacgggggcaccgcaggagcccgccttctcgggggaggaggccaaggccgccaagcgcccgcgtgtgggcaccccgcttgccacggaggactccgggcggagccaggactacgtggccttcgtggagagcctcctgcaggtgcagggccggcccggagcccccttctaggacagctggccgctcaggcgaccctcagcccggcggggaggccatggcatgccccgggcgttcgcttgctgtgaattcctgtcctcgtgtccccgacccccgagaggccacctccaagccgcgggtgccccctagggcgacaggagccagcgggacgccgcacgcggccccagactcagggagcagggccaggcgggctcgggggccggccaggggagcaccccactcaactactcagaattttaaaccatgtaagctctcttcttctcgaaaaggtgctactgcaatgccctactgagcaacctttgagattgtcacttctgtacataaaccacctttgtgaggctctttctataaatacatattgtttaaaaaaaagcaagaaaaaaaggaaaacaaaggaaaatatccccaaagttgttttctagatttgtggctttaagaaaaacaaaacaaaacaaacacattgtttttctcagaaccaggattctctgagaggtcagagcatctcgctgtttttttgttgttgttttaaaatattatgatttggctacagaccaggcagggaaagagacccggtaattggagggtgagcctcggggggggggcaggacgccccggtttcggcacagcccggtcactcacggcctcgctctcgcctcaccccggctcctgggctttgatggtctggtgccagtgcctgtgcccactctgtgcctgctgggaggaggcccaggctctctggtggccgcccctgtgcacctggccaggggaagcccgggggtctggggcctccctccgtctgcgcccacctttgcagaataaactctctcctggggtttgtctatctttgtttctctcacctgagagaaacgcaggtgttccagaggcttccttgcagacaaagcacccctgcacctcctatggctcaggatgagggaggcccccaggcccttctggttggtagtgagtgtggacagcttcccagctcttcgggtacaaccctgagcaggtcgggggacacagggccgaggcaggccttcggggcccctttcgcctgcttccgggcagggacgaggcctggtgtcctcgctccacccacccacgctgctgtcacctgaggggaatctgcttcttaggagtgggttgagctgatagagaaaaaacggccttcagcccaggctgggaagcgccttctccaggtgcctctccctcaccagctctgcacccctctggggagccttccccaccttagctgtctcctgccccagggagggatggaggagataatttgcttatattaaaaacaaaaaatggctgaggcaggagtttgggaccagcctgggctatatagcaagaccccatcactacaaattttttacaaattagctaggtgtggtggtgcgcacctgtggtcccagctactcgggaggctgtggtgggaggattgcttgagtccaggaggttgaggctgcagtcagctcagattgcaccactgcactccagcctgggcaacagagcgagaccctgtctccaaaaaaaaaaaaaagcaatgtttatattataaaagagtgtcctaacagtccccgggctagagaggactaaggaaaacagagagagtgttacgcaggagcaagcctttcatttccttggtgggggaggggggcggttgccctggagagggccggggtcggggaggttggggggtgtcagccaaaacgtggaggtgtccctctgcacgcagccctcgcccggcgtggcgctgacactgtattcttatgttgtttgaaaatgctatttatattgtaaagaagcgggcgggtgcccctgctgcccttgtcccttgggggtcacacccatcccctggtgggctcctgggcggcctgcgcagatgggccacagaagggcaggccggagctgcacactctccccacgaaggtatctctgtgtcttactctgtgcaaagacgcggcaaaacccagtgccctggtttttccccacccgagatgaaggatacgctgtattttttgcctaatgtccctgcctctaggttcataatgaattaaaggttcatgaacgctgcgaaaaaaaaaaaaaaaaaaacacctcgagaacaagtctctctctctctctctccctttgaccagcccctgggcggtgggcaaaaacaagcgccttaagaaagggcggcaaaaggggcacccacgaagaacgggggttgacccattttctaagaacagatgggtatgcttgtgaaagcccctgctatgttccaatcatagcgcaactttgggaaagacgcctgttcccccgggtccccctgggacccacattggcttctcgagggtccccagggccgggtgctcgaagatgaatctggcgattggcgcatgatgaagtgcctttgaaaatcacgccgttctgggaatgttcggaaaagccgaaatcccgaggggttaccggaag

SEQ ID NO: 301945 - DNA, 5796 bp, Homo sapiens
  misc_feature (587)..(587): n is a, c, g, or t
cggctgtacgcccggaattatgggatagcaaccgagcggggcccggcccgagcggggcctgggggtgcgacgccgagggcgggggagagcgcgccgctgctcccggaccgggccgcgcacgccgcctcaggaaccatcactgttgctggaggcacctgacaaatcctagcgaatttttggagcatctccacccaggaacctcgccatccagaagtgtgcttcccgcacagctgcagccatggggtctgaggaccacggcgcccagaaccccagctgtaaaatcatgacgtttcgcccaaccatggaagaatttaaagacttcaacaaatacgtggcctacatagagtcgcagggagcccaccgggcggggcctggccaagatcatccccccgaaggagtggaagccgcggcagacgtatgatgacatcgacgacgtggtgatcccggcgcccatccagcaggtggtgacgggccagtcgggcctcttcacgcagtacaatatccagaagaaggccatgacagtgggcgagtaccgccgcctggccaacagcgagaagtactgtaccccgcggcaccaggactttgangaccttgaacgcaaatactggaagaacctcacctttgtctccccgatctacggggctgacatcagcggctctttgtatgatgacgacgtggcccagtggaacatcgggagcctccggaccatcctggacatggtggagcgcgagtgcggcaccatcatcgagggcgtgaacacgccctacctgtacttcggcatgtggaagaccaccttcgcctggcacaccgaggacatggacctgtacagcatcaactacctgcactttggggagcctaagtcctggtacgccatcccaccagagcacggcaagcgcctggagcggctggccatcggcttcttccccgggagctcgcagggctgcgacgccttcctgcggcataagatgaccctcatctcgcccatcatcctgaagaagtacgggatccccttcagccggatcacgcaggaggccggggaattcatgatcacatttccctacggctaccacgccggcttcaatcacgggttcaactgcgcagaatctaccaacttcgccaccctgcggtggattgactacggcaaagtggccactcagtgcacgtgccggaaggacatggtcaagatctccatggacgtgttcgtgcgcatcctgcagcccgagcgctacgagctgtggaagcagggcaaggacctcacggtgctggaccacacgcggcccacggcgctcaccagccccgagctgagctcctggagtgcgtcccgggcctcgctgaaggccaagctcctccgcagacaaattagtctgaaagaaaacagacactggagaaagactgaggaggagaggaaaccaagtctagaaaggaagaaagagcagaccaaaaggccggggctgtcgtctcaccggaaacggagccagcccaagaagccgaagcccgaagaccccaagttccctggggagggtacggctggggcagcgctcctagaggaggctgggggcagcgtgaaggaggaggctgggccggaggttgaccccgaggaggaggaggaggagccgcagccactgccacacggccgggaggccgagggcgcagaagaggacgggaggggcaagctgcggccaaccaaggccaagagcgagcggaagaagaagagcttcggcctgctgcccccacagctgccgcccccgcctgctcacttcccctcagaggaggcgctgtggctgccatccccactggagcccccggtgctgggcccaggccctgcagccatggaggagagccccctgccggcaccccttaatgtcgtgccccctgaggtgcccagtgaggagctagaggccaagcctcggcccatcatccccatgctgtacgtggtgccgcggccgggcaaggcagccttcaaccaggagcacgtgtcctgccagcaggcctttgagcactttgcccagaagggtccgacctggaaggaaccagtttcccccatggagctgacggggccagaggacggtgcagccagcagtggggcaggtcgcatggagaccaaagcccgggccggagaggggcaggcaccgtccacattttccaaattgaagatggagatcaagaagagccggcgccatcccctgggccggccgcccacccggtccccactgtcggtggtgaagcaggaggcctcaagtgacgaggaggcatcccctttctccggggaggaagatgtgagtgacccggacgccttgaggccgctgctgtctctgcagtggaagaacagggcggccagcttccaggccgagaggaagttcaacgcagcggctgcgcgcacggagccctactgcgccatctgcacgctcttctacccctactgccaggccctacagactgagaaggaggcacccatagcctccctcggagagggctgcccggccacattaccctccaaaagccgtcagaagacccgaccgctcatccctgagatgtgcttcacctctggcggtgagaacacggagccgctgcctgccaactcctacatcggcgacgacgggaccagccccctgatcgcctgcggcaagtgctgcctgcaggtccatgccagttgctatggcatccgtcccgagctggtcaatgaaggctggacgtgttcccggtgcgcggcccacgcctggactgcggagtgctgcctgtgcaacctgcgaggaggtgcgctgcagatgaccaccgataggaggtggatccacgtgatctgtgccatcgcagtccccgaggcgcgcttcctgaacgtgattgagcgccaccctgtggacatcagcgccatccccgagcagcggtggaagctgaaatgcgtgtactgccggaagcggatgaagaaggtgtcaggtgcctgtatccagtgctcctacgagcactgctccacgtccttccacgtgacctgcgcccacgccgcaggcgtgctcatggagccggacgactggccctatgtggtctccatcacctgcctcaagcacaagtcggggggtcacgctgtccaactcctgagggccgtgtccctaggccaggtggtcatcaccaagaaccgcaacgggctgtactaccgctgtcgcgtcatcggtgccgcctcgcagacctgctacgaagtgaacttcgacgatggctcctacagcgacaacctgtaccctgagagcatcacgagtagggactgtgtccagctgggacccccttccgagggggagctggtggagctccggtggactgacggcaacctctacaaggccaagttcatctcctccgtcaccagccacatctaccaggtggagtttgaggacgggtcccagctgacggtgaagcgtggggacatcttcaccctggaggaggagctgcccaagagggtccgctctcggctgtcactgagcacgggggcaccgcaggagcccgccttctcgggggaggaggccaaggccgccaagcgcccgcgtgtgggcaccccgcttgccacggaggactccgggcggagccaggactacgtggccttcgtggagagcctcctgcaggtgcagggccggcccggagcccccttctaggacagctggccgctcaggcgaccctcagcccggcggggaggccatggcatgccccgggcgttcgcttgctgtgaattcctgtcctcgtgtccccgacccccgagaggccacctccaagccgcgggtgccccctagggcgacaggagccagcgggacgccgcacgcggccccagactcagggagcagggccaggcgggctcgggggccggccaggggagcaccccactcaactactcagaattttaaaccatgtaagctctcttcttctcgaaaaggtgctactgcaatgccctactgagcaacctttgagattgtcacttctgtacataaaccacctttgtgaggctctttctataaatacatattgtttaaaaaaaagcaagaaaaaaaggaaaacaaaggaaaatatccccaaagttgttttctagatttgtggctttaagaaaaacaaaacaaaacaaacacattgtttttctcagaaccaggattctctgagaggtcagagcatctcgctgtttttttgttgttgttttaaaatattatgatttggctacagaccaggcagggaaagagacccggtaattggagggtgagcctcggggggggggcaggacgccccggtttcggcacagcccggtcactcacggcctcgctctcgcctcaccccggctcctgggctttgatggtctggtgccagtgcctgtgcccactctgtgcctgctgggaggaggcccaggctctctggtggccgcccctgtgcacctggccaggggaagcccgggggtctggggcctccctccgtctgcgcccacctttgcagaataaactctctcctggggtttgtctatctttgtttctctcacctgagagaaacgcaggtgttccagaggcttccttgcagacaaagcacccctgcacctcctatggctcaggatgagggaggcccccaggcccttctggttggtagtgagtgtggacagcttcccagctcttcgggtacaaccctgagcaggtcgggggacacagggccgaggcaggccttcggggcccctttcgcctgcttccgggcagggacgaggcctggtgtcctcgctccacccacccacgctgctgtcacctgaggggaatctgcttcttaggagtgggttgagctgatagagaaaaaacggccttcagcccaggctgggaagcgccttctccaggtgcctctccctcaccagctctgcacccctctggggagccttccccaccttagctgtctcctgccccagggagggatggaggagataatttgcttatattaaaaacaaaaaatggctgaggcaggagtttgggaccagcctgggctatatagcaagaccccatcactacaaattttttacaaattagctaggtgtggtggtgcgcacctgtggtcccagctactcgggaggctgtggtgggaggattgcttgagtccaggaggttgaggctgcagtcagctcagattgcaccactgcactccagcctgggcaacagagcgagaccctgtctccaaaaaaaaaaaaaagcaatgtttatattataaaagagtgtcctaacagtccccgggctagagaggactaaggaaaacagagagagtgttacgcaggagcaagcctttcatttccttggtgggggaggggggcggttgccctggagagggccggggtcggggaggttggggggtgtcagccaaaacgtggaggtgtccctctgcacgcagccctcgcccggcgtggcgctgacactgtattcttatgttgtttgaaaatgctatttatattgtaaagaagcgggcgggtgcccctgctgcccttgtcccttgggggtcacacccatcccctggtgggctcctgggcggcctgcgcagatgggccacagaagggcaggccggagctgcacactctccccacgaaggtatctctgtgtcttactctgtgcaaagacgcggcaaaacccagtgccctggtttttccccacccgagatgaaggatacgctgtattttttgcctaatgtccctgcctctaggttcataatgaattaaaggttcatgaacgctgcgaaaaaaaaaaagaaaacaaaggtttgccctatcagtgagtcggattaattgtccgcgcggccggacatttagtagtagta

SEQ ID NO: 301946 - DNA, 5722 bp, Homo sapiens
  misc_feature (587)..(587): n is a, c, g, or t
  misc_feature (5478)..(5478): n is a, c, g, or t
  misc_feature (5490)..(5490): n is a, c, g, or t
  misc_feature (5577)..(5577): n is a, c, g, or t
cggctgtacgcccggaattatgggatagcaaccgagcggggcccggcccgagcggggcctgggggtgcgacgccgagggcgggggagagcgcgccgctgctcccggaccgggccgcgcacgccgcctcaggaaccatcactgttgctggaggcacctgacaaatcctagcgaatttttggagcatctccacccaggaacctcgccatccagaagtgtgcttcccgcacagctgcagccatggggtctgaggaccacggcgcccagaaccccagctgtaaaatcatgacgtttcgcccaaccatggaagaatttaaagacttcaacaaatacgtggcctacatagagtcgcagggagcccaccgggcggggcctggccaagatcatccccccgaaggagtggaagccgcggcagacgtatgatgacatcgacgacgtggtgatcccggcgcccatccagcaggtggtgacgggccagtcgggcctcttcacgcagtacaatatccagaagaaggccatgacagtgggcgagtaccgccgcctggccaacagcgagaagtactgtaccccgcggcaccaggactttgangaccttgaacgcaaatactggaagaacctcacctttgtctccccgatctacggggctgacatcagcggctctttgtatgatgacgacgtggcccagtggaacatcgggagcctccggaccatcctggacatggtggagcgcgagtgcggcaccatcatcgagggcgtgaacacgccctacctgtacttcggcatgtggaagaccaccttcgcctggcacaccgaggacatggacctgtacagcatcaactacctgcactttggggagcctaagtcctggtacgccatcccaccagagcacggcaagcgcctggagcggctggccatcggcttcttccccgggagctcgcagggctgcgacgccttcctgcggcataagatgaccctcatctcgcccatcatcctgaagaagtacgggatccccttcagccggatcacgcaggaggccggggaattcatgatcacatttccctacggctaccacgccggcttcaatcacgggttcaactgcgcagaatctaccaacttcgccaccctgcggtggattgactacggcaaagtggccactcagtgcacgtgccggaaggacatggtcaagatctccatggacgtgttcgtgcgcatcctgcagcccgagcgctacgagctgtggaagcagggcaaggacctcacggtgctggaccacacgcggcccacggcgctcaccagccccgagctgagctcctggagtgcgtcccgggcctcgctgaaggccaagctcctccgcagacaaattagtctgaaagaaaacagacactggagaaagactgaggaggagaggaaaccaagtctagaaaggaagaaagagcagaccaaaaggccggggctgtcgtctcaccggaaacggagccagcccaagaagccgaagcccgaagaccccaagttccctggggagggtacggctggggcagcgctcctagaggaggctgggggcagcgtgaaggaggaggctgggccggaggttgaccccgaggaggaggaggaggagccgcagccactgccacacggccgggaggccgagggcgcagaagaggacgggaggggcaagctgcggccaaccaaggccaagagcgagcggaagaagaagagcttcggcctgctgcccccacagctgccgcccccgcctgctcacttcccctcagaggaggcgctgtggctgccatccccactggagcccccggtgctgggcccaggccctgcagccatggaggagagccccctgccggcaccccttaatgtcgtgccccctgaggtgcccagtgaggagctagaggccaagcctcggcccatcatccccatgctgtacgtggtgccgcggccgggcaaggcagccttcaaccaggagcacgtgtcctgccagcaggcctttgagcactttgcccagaagggtccgacctggaaggaaccagtttcccccatggagctgacggggccagaggacggtgcagccagcagtggggcaggtcgcatggagaccaaagcccgggccggagaggggcaggcaccgtccacattttccaaattgaagatggagatcaagaagagccggcgccatcccctgggccggccgcccacccggtccccactgtcggtggtgaagcaggaggcctcaagtgacgaggaggcatcccctttctccggggaggaagatgtgagtgacccggacgccttgaggccgctgctgtctctgcagtggaagaacagggcggccagcttccaggccgagaggaagttcaacgcagcggctgcgcgcacggagccctactgcgccatctgcacgctcttctacccctactgccaggccctacagactgagaaggaggcacccatagcctccctcggagagggctgcccggccacattaccctccaaaagccgtcagaagacccgaccgctcatccctgagatgtgcttcacctctggcggtgagaacacggagccgctgcctgccaactcctacatcggcgacgacgggaccagccccctgatcgcctgcggcaagtgctgcctgcaggtccatgccagttgctatggcatccgtcccgagctggtcaatgaaggctggacgtgttcccggtgcgcggcccacgcctggactgcggagtgctgcctgtgcaacctgcgaggaggtgcgctgcagatgaccaccgataggaggtggatccacgtgatctgtgccatcgcagtccccgaggcgcgcttcctgaacgtgattgagcgccaccctgtggacatcagcgccatccccgagcagcggtggaagctgaaatgcgtgtactgccggaagcggatgaagaaggtgtcaggtgcctgtatccagtgctcctacgagcactgctccacgtccttccacgtgacctgcgcccacgccgcaggcgtgctcatggagccggacgactggccctatgtggtctccatcacctgcctcaagcacaagtcggggggtcacgctgtccaactcctgagggccgtgtccctaggccaggtggtcatcaccaagaaccgcaacgggctgtactaccgctgtcgcgtcatcggtgccgcctcgcagacctgctacgaagtgaacttcgacgatggctcctacagcgacaacctgtaccctgagagcatcacgagtagggactgtgtccagctgggacccccttccgagggggagctggtggagctccggtggactgacggcaacctctacaaggccaagttcatctcctccgtcaccagccacatctaccaggtggagtttgaggacgggtcccagctgacggtgaagcgtggggacatcttcaccctggaggaggagctgcccaagagggtccgctctcggctgtcactgagcacgggggcaccgcaggagcccgccttctcgggggaggaggccaaggccgccaagcgcccgcgtgtgggcaccccgcttgccacggaggactccgggcggagccaggactacgtggccttcgtggagagcctcctgcaggtgcagggccggcccggagcccccttctaggacagctggccgctcaggcgaccctcagcccggcggggaggccatggcatgccccgggcgttcgcttgctgtgaattcctgtcctcgtgtccccgacccccgagaggccacctccaagccgcgggtgccccctagggcgacaggagccagcgggacgccgcacgcggccccagactcagggagcagggccaggcgggctcgggggccggccaggggagcaccccactcaactactcagaattttaaaccatgtaagctctcttcttctcgaaaaggtgctactgcaatgccctactgagcaacctttgagattgtcacttctgtacataaaccacctttgtgaggctctttctataaatacatattgtttaaaaaaaagcaagaaaaaaaggaaaacaaaggaaaatatccccaaagttgttttctagatttgtggctttaagaaaaacaaaacaaaacaaacacattgtttttctcagaaccaggattctctgagaggtcagagcatctcgctgtttttttgttgttgttttaaaatattatgatttggctacagaccaggcagggaaagagacccggtaattggagggtgagcctcggggggggggcaggacgccccggtttcggcacagcccggtcactcacggcctcgctctcgcctcaccccggctcctgggctttgatggtctggtgccagtgcctgtgcccactctgtgcctgctgggaggaggcccaggctctctggtggccgcccctgtgcacctggccaggggaagcccgggggtctggggcctccctccgtctgcgcccacctttgcagaataaactctctcctggggtttgtctatctttgtttctctcacctgagagaaacgcaggtgttccagaggcttccttgcagacaaagcacccctgcacctcctatggctcaggatgagggaggcccccaggcccttctggttggtagtgagtgtggacagcttcccagctcttcgggtacaaccctgagcaggtcgggggacacagggccgaggcaggccttcggggcccctttcgcctgcttccgggcagggacgaggcctggtgtcctcgctccacccacccacgctgctgtcacctgaggggaatctgcttcttaggagtgggttgagctgatagagaaaaaacggccttcagcccaggctgggaagcgccttctccaggtgcctctccctcaccagctctgcacccctctggggagccttccccaccttagctgtctcctgccccagggagggatggaggagataatttgcttatattaaaaacaaaaaatggctgaggcaggagtttgggaccagcctgggctatatagcaagaccccatcactacaaattttttacaaattagctaggtgtggtggtgcgcacctgtggtcccagctactcgggaggctgtggtgggaggattgcttgagtccaggaggttgaggctgcagtcagctcagattgcaccactgcactccagcctgggcaacagagcgagaccctgtctctccaggaaaacaaaccgacgtacaaaaaaacatgtaaacactgttcctagcttgtgggttgtacccagacagcacgctggcaggtctggtctttgagccaacagtggtggccttggtgtgggggcagcctcccccttccctttgagcagtgaccttccctctgcagccatccagtctctgctgccttgatcttgtcccagctggcgatggatggtgcccactcgagacccagccactgagcaccaaggttgggggcggctcagccttggccccccaccacgctctgcagaaacaggccttggaactggtttntgaaaagtcacntctggtccagaaccttctcctctaaatgggcgccttctttttcaacacgtccatctgtctgtgagtctgggactcctgggcggtctnggcatctgtctcggcctcctctgtcttccccacctcgcggcctctctcggagaatgttccctctgccccgagtgttttcacgcccctcctgacagcctgccaaggtgaatctgtctcttctgtcttttctgtccttctgatttcc

SEQ ID NO: 301947 - DNA, 4142 bp, Homo sapiens
  misc_feature (587)..(587): n is a, c, g, or t
cggctgtacgcccggaattatgggatagcaaccgagcggggcccggcccgagcggggcctgggggtgcgacgccgagggcgggggagagcgcgccgctgctcccggaccgggccgcgcacgccgcctcaggaaccatcactgttgctggaggcacctgacaaatcctagcgaatttttggagcatctccacccaggaacctcgccatccagaagtgtgcttcccgcacagctgcagccatggggtctgaggaccacggcgcccagaaccccagctgtaaaatcatgacgtttcgcccaaccatggaagaatttaaagacttcaacaaatacgtggcctacatagagtcgcagggagcccaccgggcggggcctggccaagatcatccccccgaaggagtggaagccgcggcagacgtatgatgacatcgacgacgtggtgatcccggcgcccatccagcaggtggtgacgggccagtcgggcctcttcacgcagtacaatatccagaagaaggccatgacagtgggcgagtaccgccgcctggccaacagcgagaagtactgtaccccgcggcaccaggactttgangaccttgaacgcaaatactggaagaacctcacctttgtctccccgatctacggggctgacatcagcggctctttgtatgatgacgacgtggcccagtggaacatcgggagcctccggaccatcctggacatggtggagcgcgagtgcggcaccatcatcgagggcgtgaacacgccctacctgtacttcggcatgtggaagaccaccttcgcctggcacaccgaggacatggacctgtacagcatcaactacctgcactttggggagcctaagtcctggtacgccatcccaccagagcacggcaagcgcctggagcggctggccatcggcttcttccccgggagctcgcagggctgcgacgccttcctgcggcataagatgaccctcatctcgcccatcatcctgaagaagtacgggatccccttcagccggatcacgcaggaggccggggaattcatgatcacatttccctacggctaccacgccggcttcaatcacgggttcaactgcgcagaatctaccaacttcgccaccctgcggtggattgactacggcaaagtggccactcagtgcacgtgccggaaggacatggtcaagatctccatggacgtgttcgtgcgcatcctgcagcccgagcgctacgagctgtggaagcagggcaaggacctcacggtgctggaccacacgcggcccacggcgctcaccagccccgagctgagctcctggagtgcgtcccgggcctcgctgaaggccaagctcctccgcagacaaattagtctgaaagaaaacagacactggagaaagactgaggaggagaggaaaccaagtctagaaaggaagaaagagcagaccaaaaggccggggctgtcgtctcaccggaaacggagccagcccaagaagccgaagcccgaagaccccaagttccctggggagggtacggctggggcagcgctcctagaggaggctgggggcagcgtgaaggaggaggctgggccggaggttgaccccgaggaggaggaggaggagccgcagccactgccacacggccgggaggccgagggcgcagaagaggacgggaggggcaagctgcggccaaccaaggccaagagcgagcggaagaagaagagcttcggcctgctgcccccacagctgccgcccccgcctgctcacttcccctcagaggaggcgctgtggctgccatccccactggagcccccggtgctgggcccaggccctgcagccatggaggagagccccctgccggcaccccttaatgtcgtgccccctgaggtgcccagtgaggagctagaggccaagcctcggcccatcatccccatgctgtacgtggtgccgcggccgggcaaggcagccttcaaccaggagcacgtgtcctgccagcaggcctttgagcactttgcccagaagggtccgacctggaaggaaccagtttcccccatggagctgacggggccagaggacggtgcagccagcagtggggcaggtcgcatggagaccaaagcccgggccggagaggggcaggcaccgtccacattttccaaattgaagatggagatcaagaagagccggcgccatcccctgggccggccgcccacccggtccccactgtcggtggtgaagcaggaggcctcaagtgacgaggaggcatcccctttctccggggaggaagatgtgagtgacccggacgccttgaggccgctgctgtctctgcagtggaagaacagggcggccagcttccaggccgagaggaagttcaacgcagcggctgcgcgcacggagccctactgcgccatctgcacgctcttctacccctactgccaggccctacagactgagaaggaggcacccatagcctccctcggagagggctgcccggccacattaccctccaaaagccgtcagaagacccgaccgctcatccctgagatgtgcttcacctctggcggtgagaacacggagccgctgcctgccaactcctacatcggcgacgacgggaccagccccctgatcgcctgcggcaagtgctgcctgcaggtccatgccagttgctatggcatccgtcccgagctggtcaatgaaggctggacgtgttcccggtgcgcggcccacgcctggactgcggagtgctgcctgtgcaacctgcgaggaggtgcgctgcagatgaccaccgataggaggtggatccacgtgatctgtgccatcgcagtccccgaggcgcgcttcctgaacgtgattgagcgccaccctgtggacatcagcgccatccccgagcagcggtggaagctggtgaggagcctggggcctggaggggcttggccgatcatggcctgggctgcagccctgcagggctgtctgctgcacaccctgtagcccacctgcgcacaaggcacttggggctgtccacgcctgctggaaaatgacactcagctggccctttaaatcagcttcctgcagagccttgggacctggcccagaaagaagatgaggaggccaggcctggtggctcatgcctgtaatcccagcactttgggaggccgaggcgggtcgatctcctgaggtcaggagttcgagaccagcctggccaacatatgaaaccccgtctctactgaaaatgcaaaacttagctctgcatggcgggacgtgcctgtgatcccagctactcgggagactaaggcgggagaattgcttgaacctgggcggcggaggttgcagtgagctgagattgcgccactgcactccagcctgggcgacagagtaagactctgtctcaaaaaaaaaaagatgaggagagcaaaatgcagatgttgctggggccgcgtccccactaagggctgtgcatgtggcagcgctgatggggaggacgcatttgtccctgtgcactccggcctctgcacacgtgtctcgtgggcccctggaggctgggcccgcagccagtagcacccagcagcgtcctgcctgcttttcctgcctggtttatcttcccagccgcggacacagtgcctggtgttgacattcaggcttgcgtggaggtggggctggaagcagacagatcagtctggcagggtgggtctgctggggagaccacaagggtgggactgatgccggccacaaagcccgggctcccatgcactggtgcgaggtgcccacgagcccggcgggcttggatgccatgcttggagcccacaggtgctgggccacctgggcagggctgtgcaggcagtcacagaggctcatctggaaggggagccctctttccttgttcgtggagtggagtgtgcagtgggtcacgccggcctggccgggcacggccaggcgattaggaagccggcagcccgcgggtgatgcttccgaggcaccagtgactcagtccacaaacgtgggcgtaaaaggcctcatgattcaggtggagtgatggtgcgatgcgtggtgcagtgataagtcctcctgcccgacgccttatggatcatctgacatttccagaacgcagcctcttcattaccggtgcttgtaacgatgaattaaaaatccttttacacg

SEQ ID NO: 301948 - DNA, 4015 bp, Homo sapiens
  misc_feature (587)..(587): n is a, c, g, or t
cggctgtacgcccggaattatgggatagcaaccgagcggggcccggcccgagcggggcctgggggtgcgacgccgagggcgggggagagcgcgccgctgctcccggaccgggccgcgcacgccgcctcaggaaccatcactgttgctggaggcacctgacaaatcctagcgaatttttggagcatctccacccaggaacctcgccatccagaagtgtgcttcccgcacagctgcagccatggggtctgaggaccacggcgcccagaaccccagctgtaaaatcatgacgtttcgcccaaccatggaagaatttaaagacttcaacaaatacgtggcctacatagagtcgcagggagcccaccgggcggggcctggccaagatcatccccccgaaggagtggaagccgcggcagacgtatgatgacatcgacgacgtggtgatcccggcgcccatccagcaggtggtgacgggccagtcgggcctcttcacgcagtacaatatccagaagaaggccatgacagtgggcgagtaccgccgcctggccaacagcgagaagtactgtaccccgcggcaccaggactttgangaccttgaacgcaaatactggaagaacctcacctttgtctccccgatctacggggctgacatcagcggctctttgtatgatgacgacgtggcccagtggaacatcgggagcctccggaccatcctggacatggtggagcgcgagtgcggcaccatcatcgagggcgtgaacacgccctacctgtacttcggcatgtggaagaccaccttcgcctggcacaccgaggacatggacctgtacagcatcaactacctgcactttggggagcctaagtcctggtacgccatcccaccagagcacggcaagcgcctggagcggctggccatcggcttcttccccgggagctcgcagggctgcgacgccttcctgcggcataagatgaccctcatctcgcccatcatcctgaagaagtacgggatccccttcagccggatcacgcaggaggccggggaattcatgatcacatttccctacggctaccacgccggcttcaatcacgggttcaactgcgcagaatctaccaacttcgccaccctgcggtggattgactacggcaaagtggccactcagtgcacgtgccggaaggacatggtcaagatctccatggacgtgttcgtgcgcatcctgcagcccgagcgctacgagctgtggaagcagggcaaggacctcacggtgctggaccacacgcggcccacggcgctcaccagccccgagctgagctcctggagtgcgtcccgggcctcgctgaaggccaagctcctccgcagacaaattagtctgaaagaaaacagacactggagaaagactgaggaggagaggaaaccaagtctagaaaggaagaaagagcagaccaaaaggccggggctgtcgtctcaccggaaacggagccagcccaagaagccgaagcccgaagaccccaagttccctggggagggtacggctggggcagcgctcctagaggaggctgggggcagcgtgaaggaggaggctgggccggaggttgaccccgaggaggaggaggaggagccgcagccactgccacacggccgggaggccgagggcgcagaagaggacgggaggggcaagctgcggccaaccaaggccaagagcgagcggaagaagaagagcttcggcctgctgcccccacagctgccgcccccgcctgctcacttcccctcagaggaggcgctgtggctgccatccccactggagcccccggtgctgggcccaggccctgcagccatggaggagagccccctgccggcaccccttaatgtcgtgccccctgaggtgcccagtgaggagctagaggccaagcctcggcccatcatccccatgctgtacgtggtgccgcggccgggcaaggcagccttcaaccaggagcacgtgtcctgccagcaggcctttgagcactttgcccagaagggtccgacctggaaggaaccagtttcccccatggagctgacggggccagaggacggtgcagccagcagtggggcaggtcgcatggagaccaaagcccgggccggagaggggcaggcaccgtccacattttccaaattgaagatggagatcaagaagagccggcgccatcccctgggccggccgcccacccggtccccactgtcggtggtgaagcaggaggcctcaagtgacgaggaggcatcccctttctccggggaggaagatgtgagtgacccggacgccttgaggccgctgctgtctctgcagtggaagaacagggcggccagcttccaggccgagaggaagttcaacgcagcggctgcgcgcacggagccctactgcgccatctgcacgctcttctacccctactgccaggccctacagactgagaaggaggcacccatagcctccctcggagagggctgcccggccacattaccctccaaaagccgtcagaagacccgaccgctcatccctgagatgtgcttcacctctggcggtgagaacacggagccgctgcctgccaactcctacatcggcgacgacgggaccagccccctgatcgcctgcggcaagtgctgcctgcaggtccatgccagttgctatggcatccgtcccgagctggtcaatgaaggctggacgtgttcccggtgcgcggcccacgcctggactgcggagtgctgcctgtgcaacctgcgaggaggtgcgctgcagatgaccaccgataggaggtggatccacgtgatctgtgccatcgcagtccccgaggcgcgcttcctgaacgtgattgagcgccaccctgtggacatcagcgccatccccgagcagcggtggaagctgaaatgcgtgtactgccggaagcggatgaagaaggtgtcaggtgcctgtatccagtgctcctacgagcactgctccacgtccttccacgtgacctgcgcccacgccgcaggcgtgctcatggagccggacgactggccctatgtggtctccatcacctgcctcaagcacaagtcggggggtcacgctgtccaactcctgagggccgtgtccctaggccaggtggtcatcaccaagaaccgcaacgggctgtactaccgctgtcgcgtcatcggtgccgcctcgcagacctgctacgaagtgaacttcgacgatggctcctacagcgacaacctgtaccctgagagcatcacgagtagggactgtgtccagctgggacccccttccgagggggagctggtggagctccggtggactgacggcaacctctacaaggccaagttcatctcctccgtcaccagccacatctaccaggtggagtttgaggacgggtcccagctgacggtgaagcgtggggacatcttcaccctggaggaggagctgcccaagagggtccgctctcggctgtcactgagcacgggggcaccgcaggagcccgccttctcgggggaggaggccaaggccgccaagcgcccgcgtgtgggcaccccgcttgccacggaggactccgggcggagccaggactacgtggccttcgtggagagcctcctgcaggtgcagggccggcccggagcccccttctaggacagctggccgctcaggcgaccctcagcccggcggggaggccatggcatgccccgggcgttcgcttgctgtgaattcctgtcctcgtgtccccgacccccgagaggccacctccaagccgcgggtgccccctagggcgacaggagccagcgggacgccgcacgcggccccagactcagggagcagggccaggcgggctcgggggccggccaggggagcaccccactcaactactcagaattttaaaccatgtaagctctcttcttctcgaaaaggtgctactgcaatgccctactgagcaacctttgagattgtcacttctgtacataaaccacctttgtgaggctctttctataaatacatattgtttaaaaaaaagcaag

SEQ ID NO: 301949 - DNA, 1820 bp, Homo sapiens
  misc_feature (587)..(587): n is a, c, g, or t
cggctgtacgcccggaattatgggatagcaaccgagcggggcccggcccgagcggggcctgggggtgcgacgccgagggcgggggagagcgcgccgctgctcccggaccgggccgcgcacgccgcctcaggaaccatcactgttgctggaggcacctgacaaatcctagcgaatttttggagcatctccacccaggaacctcgccatccagaagtgtgcttcccgcacagctgcagccatggggtctgaggaccacggcgcccagaaccccagctgtaaaatcatgacgtttcgcccaaccatggaagaatttaaagacttcaacaaatacgtggcctacatagagtcgcagggagcccaccgggcggggcctggccaagatcatccccccgaaggagtggaagccgcggcagacgtatgatgacatcgacgacgtggtgatcccggcgcccatccagcaggtggtgacgggccagtcgggcctcttcacgcagtacaatatccagaagaaggccatgacagtgggcgagtaccgccgcctggccaacagcgagaagtactgtaccccgcggcaccaggactttgangaccttgaacgcaaatactggaagaacctcacctttgtctccccgatctacggggctgacatcagcggctctttgtatgatgacgacgtggcccagtggaacatcgggagcctccggaccatcctggacatggtggagcgcgagtgcggcaccatcatcgagggcgtgaacacgccctacctgtacttcggcatgtggaagaccaccttcgcctggcacaccgaggacatggacctgtacagcatcaactacctgcactttggggagcctaagtcctggtacgccatcccaccagagcacggcaagcgcctggagcggctggccatcggcttcttccccgggagctcgcagggctgcgacgccttcctgcggcataagatgaccctcatctcgcccatcatcctgaagaagtacgggatccccttcagccggatcacgcaggaggccggggaattcatgatcacatttccctacggctaccacgccggcttcaatcacgggttcaactgcgcagaatctaccaacttcgccaccctgcggtggattgactacggcaaagtggccactcaggggcagggagtcggcggcttagcttcctctggagcacggttccatcagccagaaaatgctctacctttgatggcgaagatggtctccccactctgtgaatacacaagctcctgcgtcgcacacctggtgaattgtagggcacacgaatctcactgaaactgtccagaaacatccttcccccagatcagctctcagcaaatcaggaacagtaatccagaataaaaactgggcagcctttctggaaggccgtctgccatgggttacacatgtgtctcctgtggcctagcggttctgtctctggaacacgtgcataccggttccatgtctagggatatctgtagccccgtttgttgtagtggaaagttctatgaccaggggatgggttgaaccagtggaatgttatgcagctgtgaaaatgggtttgctccatgaggtttgctctgtatctttgggcatggagagatgagcgcgacaactttaagggaaaaaataggctgtggactgggactcttgtgattcccgttttttgtggggatgtggttcttgaactgggaaagggagatttgcccaagtattggttgatattagtttgatgtcatggaatttgggataccttaaaaatatgcactaacttctcaatatggttctgtctttttttgtact

SEQ ID NO: 301950 - DNA, 1012 bp, Homo sapiens
cacgtttttctaccaaacatactttcaaaagtagaaaatcatggatttaaaaaacttttttgtagggcttgatatgtctaaatgtatcaagtttcaagtgtgctaactttatgaacacttgtctctgttcttaaatgcataacatgatcttaaatttttcagatctttagaaatgttaagcaatgcaaagatttctaccccatctccctccacatctttaaaagccaaaaaccacctaccaaaactccattactgtttgtgaatgaagaattttcatgacttgaaaaccttcctaatgtcccatctttaacacttttttagaaaggagggctcttgttgtgttctttaacctcttttcacatcattaacttcttcatggttgacatcagtactatcctcttaaaaattcaaatgtgaactaacagcatcatttattgaaggcatattatgttaaaattagtgattttcccaaggacaaaatgttaagtggaaaagtcagtactcagattcaggtgtgactcccaggcccaagcatagcctgaaatgaattaagaaggtcaccatattaattttcataaggtgaaagaaaacaagcattatatatttttccacatcagaaaatgttgaagacctaagagactccagtggctggctctgaaccctacagcaagacagtggcagagttggaatggattctggatgtctttgctaaccattaagaaagagttactgaataactttccattactcttaaaaagttactgttcccaagtgtattgagaattcggagatctgaagtaagacagaaatctttgttttcagttgtctttaagcttttgccagtaacatggtcccagtagaagaaaacataaaactgtaatcctaatcaaattttgcaacatcaaatactatttcaatagtttcaaatactattccaatattgttccagcaatattccaaataatactaagaaatattttaaatgaataaagactaacaatcttcaaaagtt

SEQ ID NO: 301951 - DNA, 2692 bp, Homo sapiens
acggagggtatgggtggtgagtcctggccctttaaacccgagggggaggatccggaagtggatgggcggggcgaagggtcctcgtatataaaagggccccggccgcgcggggtctctaatctgccattttctgtccctgagtgagtctctggcgtcccaaattgcctgtttttctcgcaggctctattccgttcgctggttcgccacctcaggggaacgatggccatggagtccacagccactgccgccgtcgccgcggagctggtttctgccgacaaaattgaagatgttcctgctccttctacatctgcagataaagtggagagtctggatgtggatagtgaagctaagaaactattgggtttaggacagaaacatctggtgatgggggatattccagcagctgtcaatgcattccaggaagcagctagtcttttaggtaagaagtatggagagacagctaatgagtgtggagaagccttctttttctatgggaaatcacttctggagttggcaagaatggagaatggtgtgttgggaaacgccttggaaggtgtgcatgtggaagaggaagaaggagaaaaaacagaagatgaatctctggtagaaaataatgataacatagatgaggaagcaagggaagagttgagagaacaggtttatgacgccatgggagaaaaagaagaagccaaaaaaacagaagacaagtctttggcaaagcctgaaactgataaagaacaggacagtgaaatggagaagggtggaagagaagatatggatataagtaaatctgcagaggagccacaggaaaaagttgacttgactctagattggttaactgaaacctctgaagaggcaaaaggaggagcagcaccagaaggaccgaatgaagctgaggtcacttctgggaagccagaacaggaagtaccagatgctgaggaagaaaaatcagtttctggaactgatgtccaagaagagtgcagagaaaaaggaggtcaggagaagcagggagaggtaattgtgagcatagaggagaagccaaaagaagtttcagaagagcagcctgtggtgactctagaaaagcagggcactgcagtggaggtagaagcagagtctttagacccgacagtcaagccagtggatgtgggtggggacgagccagaggagaaggtagttacctctgaaaacgaggcaggaaaggcggttcttgaacaactggtaggtcaagaagtaccacctgctgaagagtcaccagaggtgacaacagaggctgcagaggcctcagctgtagaggctggatcagaagtctctgaaaagcctgggcaggaggctccagttctccctaaggatggtgcagtcaatggaccgtcagttgtaggagatcagactcctattgaaccacagacttctatagaaagactgacagaaacaaaagatggctcaggactagaggagaaggtcagggcaaagctggttcctagtcaggaggagactaagctgtctgtagaagagtctgaggcagctggagatggggttgataccaaggtagcccagggagctactgagaaatcacctgaagacaaagttcagatagctgctaatgaagagacacaagagagagaagaacagatgaaagagggtgaagaaactgaaggctcggaagaggatgataaagaaaatgataagactgaagaaatgccaaatgattcagtccttgaaaacaagtctcttcaagaaaatgaggaggaggagattgggaacctagagcttgcctgggatatgctggatttagcaaagatcatttttaaaaggcaagaaacaaaagaagcacagctttatgctgcccaggcacatcttaaactcggagaagttagtgttgaatctgaaaactatgtgcaagctgtggaggagttccagtcctgccttaacctgcaggaacagtacctggaagcccacgaccgtctccttgcagagacccactaccagctgggcttggcttatgggtacaactctcagtatgatgaggcagtggcacagttcagcaaatctattgaagtcattgagaacagaatggctgtactaaacgagcaggtgaaggaggctgaaggatcgtctgctgaatacaagaaagaaattgaggaactaaaggaactgctacccgaaattagagagaagatagaagatgcaaaggagtctcagcgtagtgggaatgtagctgaactggctctgaaagctactctggtggagagttctacttcaggtttcactcctggtggaggaggctcttcagtctccatgattgccagtagaaagccaacagacggtgcttcctcatcaaattgtgtgactgatatttcccaccttgtcagaaagaagaggaaaccagaggaagagagtccccggaaagatgatgcaaagaaagccaaacaagagccggaggtgaacggaggcagtggggatgctgtccccagtggaaatgaagtttcggaaaacatggaggaggaggctgagaatcaggctgaaagccgggcagcagtggaggggacagtggaggctggagctacagttgaaagcactgcatgttaagagggggcacagccctcctcccaagggaaagtgtttttgtatataatgtattttttcacttttggaggattctttttgtataacttcaataaagattgtaagcaaa

SEQ ID NO: 301952 - DNA, 542 bp, Homo sapiens
atctccctgtgcttccggtagaggggcctgaagtgatatggtgggacagattaatacattctgagagtacaggttggcatctgcctgtggctagggagagagacccttagagctgtgaatcctgatgttcaggatctttgcaccacaagggttaaggaaatgttttgcagttgtctttttaaaaacattaagcacatttgtgaagccttcacaattatatctttagaggaaaccagaggaagagagtccccggaaagatgatgcaaagaaagccaaacaagagccggaggtgaacggaggcagtggggatgctgtccccagtggaaatgaagtttcggaaaacatggaggaggaggctgagaatcaggctgaaagccgggcagcagtggaggggacagtggaggctggagctacagttgaaagcactgcatgttaagagggggcacagccctcctcccaagggaaagtgtttttgtatataatgtattttttcacttttggaggattctttttgtataacttcaataaagattgtaagcaaa

SEQ ID NO: 301953 - DNA, 506 bp, Homo sapiens
acagtttggttatgggagtataggatgactcactgacaaatggaacctgtatattataggtccctcgatgaatatatgagaaggcacttgatgggcaaaaccattaggtcacttccttccacgtgatgattattggctctgtcagccccattatcacagagtattcaagaaatactttgtggtcactgccctcttaatatagggagcaaagcagagtttgggtgacttgtatatgcttcctatgactgaggcctcagttatataagacagaatggcttaaactaggctcactgatgcccaggttctgtttgtcttccaggctgagaatcaggctgaaagccgggcagcagtggaggggacagtggaggctggagctacagttgaaagcactgcatgttaagagggggcacagccctcctcccaagggaaagtgtttttgtatataatgtattttttcacttttggaggattctttttgtataacttcaataaagattgtaagcaaa

SEQ ID NO: 301954 - DNA, 482 bp, Homo sapiens
acggagggtatgggtggtgagtcctggccctttaaacccgagggggaggatccggaagtggatgggcggggcgaagggtcctcgtatataaaagggccccggccgcgcggggtctctaatctgccattttctgtccctgagtgagtctctggcgtcccaaattgcctgtttttctcgcaggctctattccgttcgctggttcgccacctcaggggaacgatggccatggagtccacagccactgccgccgtcgccgcggagctggtttctgccgacaagtaagcgggactgtggaaagcttaaggcactggccagtccgcggggagggctaatggacgggggctccggagaaggggcagaccggtgggcgggagtacttgccttcccaagagcagctgtcgctgtgaaggcctggtcactggagcagtccttcttttgctgagagcctcgcgcagcagcggtaacggcggtcggctggcgcc

SEQ ID NO: 301955 - DNA, 357 bp, Homo sapiens
tgcacagcagtcccctaaacccaactcacgtttctgtatgtcttaggccagtatcccaaacctcttccacgtcgctgttctttccacccattctccctttgcatcttgagcagttatccaactaggatctgccaagtggaaatgaagtttcggaaaacatggaggaggaggctgagaatcaggctgaaagccgggcagcagtggaggggacagtggaggctggagctacagttgaaagcactgcatgttaagagggggcacagccctcctcccaagggaaagtgtttttgtatataatgtattttttcacttttggaggattctttttgtataacttcaataaagattgtaagcaaa

SEQ ID NO: 301956 - DNA, 1675 bp, Homo sapiens
acggagggtatgggtggtgagtcctggccctttaaacccgagggggaggatccggaagtggatgggcggggcgaagggtcctcgtatataaaagggccccggccgcgcggggtctctaatctgccattttctgtccctgagtgagtctctggcgtcccaaattgcctgtttttctcgcaggctctattccgttcgctggttcgccacctcaggggaacgatggccatggagtccacagccactgccgccgtcgccgcggagctggtttctgccgacaaaattgaagatgttcctgctccttctacatctgcagataaagtggagagtctggatgtggatagtgaagctaagaaactattgggtttaggacagaaacatctggtgatgggggatattccagcagctgtcaatgcattccaggaagcagctagtcttttaggtaagaagtatggagagacagctaatgagtgtggagaagccttctttttctatgggaaatcacttctggagttggcaagaatggagaatggtgtgttgggaaacgccttggaaggtgtgcatgtggaagaggaagaaggagaaaaaacagaagatgaatctctggtagaaaataatgataacatagatgaaactgaaggctcggaagaggatgataaagaaaatgataagactgaagaaatgccaaatgattcagtccttgaaaacaagtctcttcaagaaaatgaggaggaggagattgggaacctagagcttgcctgggatatgctggatttagcaaagatcatttttaaaaggcaagaaacaaaagaagcacagctttatgctgcccaggcacatcttaaactcggagaagttagtgttgaatctgaaaactatgtgcaagctgtggaggagttccagtcctgccttaacctgcaggaacagtacctggaagcccacgaccgtctccttgcagagacccactaccagctgggcttggcttatgggtacaactctcagtatgatgaggcagtggcacagttcagcaaatctattgaagtcattgagaacagaatggctgtactaaacgagcaggtgaaggaggctgaaggatcgtctgctgaatacaagaaagaaattgaggaactaaaggaactgctacccgaaattagagagaagatagaagatgcaaaggagtctcagcgtagtgggaatgtagctgaactggctctgaaagctactctggtggagagttctacttcaggtttcactcctggtggaggaggctcttcagtctccatgattgccagtagaaagccaacagacggtgcttcctcatcaaattgtgtgactgatatttcccaccttgtcagaaagaagaggaaaccagaggaagagagtccccggaaagatgatgcaaagaaagccaaacaagagccggaggtgaacggaggcagtggggatgctgtccccagtggaaatgaagtttcggaaaacatggaggaggaggctgagaatcaggctgaaagccgggcagcagtggaggggacagtggaggctggagctacagttgaaagcactgcatgttaagagggggcacagccctcctcccaagggaaagtgtttttgtatataatgtattttttcacttttggaggattctttttgtataacttcaataaagattgtaagcaaa

SEQ ID NO: 301957 - DNA, 1597 bp, Homo sapiens
  misc_feature (25)..(25): n is a, c, g, or t
gttaggctaggtacgaggcggtgtnaatcggcacgaggtcagtccttgaaaacaagccctgagtgagtctctggcgtcccaaattgcctgtttttctcgcaggctctattccgttcgctggttcgccacctcaggggaacgatggccatggagtccacagccactgccgccgtcgccgcggagctggtttctgccgacaaaattgaagatgttcctgctccttctacatctgcagataaagtggagagtctggatgtggatagtgaagctaagaaactattgggtttaggacagaaacatctggtgatgggggatattccagcagctgtcaatgcattccaggaagcagctagtcttttaggtaagaagtatggagagacagctaatgagtgtggagaagccttctttttctatgggaaatcacttctggagttggcaagaatggagaatggtgtgttgggaaacgccttggaaggtgtgcatgtggaagaggaagaaggagaaaaaacagaagatgaatctctggtagaaaataatgataacatagatgaaactgaaggctcggaagaggatgataaagaaaatgataagactgaagaaatgccaaatgattcagtccttgaaaacaagtctcttcaagaaaatgaggaggaggagattgggaacctagagcttgcctgggatatgctggatttagcaaagatcatttttaaaaggcaagaaacaaaagaagcacagctttatgctgcccaggcacatcttaaactcggagaagttagtgttgaatctgaaaactatgtgcaagctgtggaggagttccagtcctgccttaacctgcaggaacagtacctggaagcccacgaccgtctccttgcagagacccactaccagctgggcttggcttatgggtacaactctcagtatgatgaggcagtggcacagttcagcaaatctattgaagtcattgagaacagaatggctgtactaaacgagcaggtgaaggaggctgaaggatcgtctgctgaatacaagaaagaaattgaggaactaaaggaactgctacccgaaattagagagaagatagaagatgcaaaggagtctcagcgtagtgggaatgtagctgaactggctctgaaagctactctggtggagagttctacttcaggtttcactcctggtggaggaggctcttcagtctccatgattgccagtagaaagccaacagacggtgcttcctcatcaaattgtgtgactgatatttcccaccttgtcagaaagaagaggaaaccagaggaagagagtccccggaaagatgatgcaaagaaagccaaacaagagccggaggtgaacggaggcagtggggatgctgtccccagtggaaatgaagtttcggaaaacatggaggaggaggctgagaatcaggctgaaagccgggcagcagtggaggggacagtggaggctggagctacagttgaaagcactgcatgttaagagggggcacagccctcctcccaagggaaagtgtttttgtatataatgtattttttcacttttggaggattctttttgtataacttcaataaagattgtaagcaaa

SEQ ID NO: 301958 - DNA, 2329 bp, Homo sapiens
acggagggtatgggtggtgagtcctggccctttaaacccgagggggaggatccggaagtggatgggcggggcgaagggtcctcgtatataaaagggccccggccgcgcggggtctctaatctgccattttctgtccctgagtgagtctctggcgtcccaaattgcctgtttttctcgcaggctctattccgttcgctggttcgccacctcaggggaacgatggccatggagtccacagccactgccgccgtcgccgcggagctggtttctgccgacaaaattgaagatgttcctgctccttctacatctgcagataaagtggagagtctggatgtggatagtgaagctaagaaactattgggtttaggacagaaacatctggtgatgggggatattccagcagctgtcaatgcattccaggaagcagctagtcttttaggtaagaagtatggagagacagctaatgagtgtggagaagccttctttttctatgggaaatcacttctggagttggcaagaatggagaatggtgtgttgggaaacgccttggaaggtgtgcatgtggaagaggaagaaggagaaaaaacagaagatgaatctctggtagaaaataatgataacatagatgaaactgaaggctcggaagaggatgataaagaaaatgataagactgaagaaatgccaaatgattcagtccttgaaaacaagtctcttcaagaaaatgaggaggaggagattgggaacctagagcttgcctgggatatgctggatttagcaaagatcatttttaaaaggcaagaaacaaaagaagcacagctttatgctgcccaggcacatcttaaactcggagaagttagtgttgaatctgaaaactatgtgcaagctgtggaggagttccagtcctgccttaacctgcaggaacagtacctggaagcccacgaccgtctccttgcagagacccactaccagctgggcttggcttatgggtacaactctcagtatgatgaggcagtggcacagttcagcaaatctattgaagtcattgagaacagaatggctgtactaaacgagcaggtgaaggaggctgaaggatcgtctgctgaatacaagaaagaaattgaggaactaaaggaactgctacccgaaattagagagaagatagaagatgcaaaggagtctcagcgtagtgggaatgtagctgaactggctctgaaagctactctggtggagagttctacttcaggtttcactcctggtggaggaggctcttcagtctccatgattgccagtagaaagccaacagacggtgcttcctcatcaaattgtgtgactgatatttcccaccttgtcagaaagaagaggaaaccagaggaagagagtccccggaaagatgatgcaaagaaagccaaacaagagccggaggtgaacggaggcagtggggatgctgtccccagtggaaatgaagtttcggaaaacatggaggaggaggctgagaatcaggctgaaagccgggcagcagtggaggggacagtggaggctggagctacagttgaaagcactgcatgttaagagggggcacagccctcctcccaagggaaagtgtttttgtatataatgtattttttcacttttggaggattctttttgtataacttcaataaagattgtaagcaaaggttgaggctttgatggtttttttcttaattattggctgaatctgccttggagcactgctggttttatatattagccaaaggttttgttctggccttctgtactgatctgtgttcctgatcctaattcctatctgtctaacgtggaggtgatcaagtgtggctgtaggcctttgttttccaatggtgctatattctgttttcaaacacttcactgaacccagctgtcttgcaaactttcagtggtgctgtccctggatgggggctacaaaaacaagaattggtgaagatcttgctcttcagtgctgaaaatggatgatggactttggctgtgagccaggcctaggatggttcttgtcctatatccacctagtcttcacctggggctataattctgtcctggaaaaagaactctgaaaacctgggtcaggggaatgattcctaaggaaaacggtctgcatttgagctctggtttgaaagtagccaaggggactgatggtggacactccagatgtggttggaagcatatgtggggaggctggctggttgagttttgttattttctgtatagaaaggttgagatatatcaacacttggaattgttacccatctgcagaattgacttctcaaataaagatgctaaaaatcaaaaaaac

SEQ ID NO: 301959 - DNA, 2125 bp, Homo sapiens
acggagggtatgggtggtgagtcctggccctttaaacccgagggggaggatccggaagtggatgggcggggcgaagggtcctcgtatataaaagggccccggccgcgcggggtctctaatctgccattttctgtccctgagtgagtctctggcgtcccaaattgcctgtttttctcgcaggctctattccgttcgctggttcgccacctcaggggaacgatggccatggagtccacagccactgccgccgtcgccgcggagctggtttctgccgacaaaattgaagatgttcctgctccttctacatctgcagataaagtggagagtctggatgtggatagtgaagctaagaaactattgggtttaggacagaaacatctggtgatgggggatattccagcagctgtcaatgcattccaggaagcagctagtcttttaggtaagaagtatggagagacagctaatgagtgtggagaagccttctttttctatgggaaatcacttctggagttggcaagaatggagaatggtgtgttgggaaacgccttggaaggtgtgcatgtggaagaggaagaaggagaaaaaacagaagatgaatctctggtagaaaataatgataacatagatgaaactgaaggctcggaagaggatgataaagaaaatgataagactgaagaaatgccaaatgattcagtccttgaaaacaagtctcttcaagaaaatgaggaggaggagattgggaacctagagcttgcctgggatatgctggatttagcaaagatcatttttaaaaggcaagaaacaaaagaagcacagctttatgctgcccaggcacatcttaaactcggagaagttagtgttgaatctgaaaactatgtgcaagctgtggaggagttccagtcctgccttaacctgcaggaacagtacctggaagcccacgaccgtctccttgcagagacccactaccagctgggcttggcttatgggtacaactctcagtatgatgaggcagtggcacagttcagcaaatctattgaagtcattgagaacagaatggctgtactaaacgagcaggtgaaggaggctgaaggatcgtctgctgaatacaagaaagaaattgaggaactaaaggaactgctacccgaaattagagagaagatagaagatgcaaaggagtctcagcgtagtgggaatgtagctgaactggctctgaaagctactctggtggagagttctacttcaggtttcactcctggtggaggaggctcttcagtctccatgattgccagtagaaagccaacagacggtgcttcctcatcaaattgtgtgactgatatttcccaccttgtcagaaagaagaggaaaccagaggaagagagtccccggaaagatgatgcaaagaaagccaaacaagagccggaggtgaacggaggcagtggggatgctgtccccagtggaaatgaagtttcggaaaacatggaggaggaggctgagaatcaggctgaaagccgggcagcagtggaggggacagtggaggctggagctacagttgaaagcactgcatgttaagagggggcacagccctcctcccaagggaaagtgtttttgtatataatgtattttttcacttttggaggattctttttgtataacttcaataaagattgtaagcaaaggttgaggctttgatggtttttttcttaattattggctgaatctgccttggagcactgctggttttatagatgatgcaggccgccgcggctgctggcccgcctctggtggctgccacgccctattcttcctacatcccctacaaccctcagcagttcccaggccagccagccatgatgcagcccatggcccactacccctcacagccggtgtttgcccccatgcttcagagcaacccacgcatgctgacgtcgggcagccatccccaggccatcgtgtcatcctctacccctcagtacccttctgcagagcagcctaccccccaagccctttatgccactgttcaccagtcctacccacaccatgccacacagctccatgcccaccagccgcagccggctaccacgcctactggaagccagccgcagtcccagcatgcggcccccagtcc

SEQ ID NO: 301960 - DNA, 1770 bp, Homo sapiens
acggagggtatgggtggtgagtcctggccctttaaacccgagggggaggatccggaagtggatgggcggggcgaagggtcctcgtatataaaagggccccggccgcgcggggtctctaatctgccattttctgtccctgagtgagtctctggcgtcccaaattgcctgtttttctcgcaggctctattccgttcgctggttcgccacctcaggggaacgatggccatggagtccacagccactgccgccgtcgccgcggagctggtttctgccgacaaaattgaagatgttcctgctccttctacatctgcagataaagtggagagtctggatgtggatagtgaagctaagaaactattgggtttaggacagaaacatctggtgatgggggatattccagcagctgtcaatgcattccaggaagcagctagtcttttaggtaagaagtatggagagacagctaatgagtgtggagaagccttctttttctatgggaaatcacttctggagttggcaagaatggagaatggtgtgttgggaaacgccttggaaggtgtgcatgtggaagaggaagaaggagaaaaaacagaagatgaatctctggtagaaaataatgataacatagatgaaactgaaggctcggaagaggatgataaagaaaatgataagactgaagaaatgccaaatgattcagtccttgaaaacaagtctcttcaagaaaatgaggaggaggagattgggaacctagagcttgcctgggatatgctggatttagcaaagatcatttttaaaaggcaagaaacaaaagaagcacagctttatgctgcccaggcacatcttaaactcggagaagttagtgttgaatctgaaaactatgtgcaagctgtggaggagttccagtcctgccttaacctgcaggaacagtacctggaagcccacgaccgtctccttgcagagacccactaccagctgggcttggcttatgggtacaactctcagtatgatgaggcagtggcacagttcagcaaatctattgaagtcattgagaacagaatggctgtactaaacgagcaggtgaaggaggctgaaggatcgtctgctgaatacaagaaagaaattgaggaactaaaggaactgctacccgaaattagagagaagatagaagatgcaaaggagtctcagcgtagtgggaatgtagctgaactggctctgaaagctactctggtggagagttctacttcaggtttcactcctggtggaggaggctcttcagtctccatgattgccagtagaaagccaacagacggtgcttcctcatcaaattgtgtgactgatatttcccaccttgtcagaaagaagaggaaaccagaggaagagagtccccggaaagatgatgcaaagaaagccaaacaagagccggaggtgaacggaggcagtggggatgctgtccccagtggaaatgaagtttcggaaaacatggaggaggaggctgagaatcaggctgaaagccgggcagcagtggaggggacagtggaggctggagctacagttgaaagcactgcatgttaagagggggcacagccctcctcccaagggaaagtgtttttgtatataatgtattttttcacttttggaggattctttttgtataacttcaataaagattgtaagcaaaggttgaggctttgatggtttttttcttaattattggctgaatctgccttggagcactgctggttttatactgatgaattcggggatacactagag

SEQ ID NO: 301961 - DNA, 1746 bp, Homo sapiens
  misc_feature (1691)..(1691): n is a, c, g, or t
acggagggtatgggtggtgagtcctggccctttaaacccgagggggaggatccggaagtggatgggcggggcgaagggtcctcgtatataaaagggccccggccgcgcggggtctctaatctgccattttctgtccctgagtgagtctctggcgtcccaaattgcctgtttttctcgcaggctctattccgttcgctggttcgccacctcaggggaacgatggccatggagtccacagccactgccgccgtcgccgcggagctggtttctgccgacaaaattgaagatgttcctgctccttctacatctgcagataaagtggagagtctggatgtggatagtgaagctaagaaactattgggtttaggacagaaacatctggtgatgggggatattccagcagctgtcaatgcattccaggaagcagctagtcttttaggtaagaagtatggagagacagctaatgagtgtggagaagccttctttttctatgggaaatcacttctggagttggcaagaatggagaatggtgtgttgggaaacgccttggaaggtgtgcatgtggaagaggaagaaggagaaaaaacagaagatgaatctctggtagaaaataatgataacatagatgaaactgaaggctcggaagaggatgataaagaaaatgataagactgaagaaatgccaaatgattcagtccttgaaaacaagtctcttcaagaaaatgaggaggaggagattgggaacctagagcttgcctgggatatgctggatttagcaaagatcatttttaaaaggcaagaaacaaaagaagcacagctttatgctgcccaggcacatcttaaactcggagaagttagtgttgaatctgaaaactatgtgcaagctgtggaggagttccagtcctgccttaacctgcaggaacagtacctggaagcccacgaccgtctccttgcagagacccactaccagctgggcttggcttatgggtacaactctcagtatgatgaggcagtggcacagttcagcaaatctattgaagtcattgagaacagaatggctgtactaaacgagcaggtgaaggaggctgaaggatcgtctgctgaatacaagaaagaaattgaggaactaaaggaactgctacccgaaattagagagaagatagaagatgcaaaggagtctcagcgtagtgggaatgtagctgaactggctctgaaagctactctggtggagagttctacttcaggtttcactcctggtggaggaggctcttcagtctccatgattgccagtagaaagccaacagacggtgcttcctcatcaaattgtgtgactgatatttcccaccttgtcagaaagaagaggaaaccagaggaagagagtccccggaaagatgatgcaaagaaagccaaacaagagccggaggtgaacggaggcagtggggatgctgtccccagtggaaatgaagtttcggaaaacatggaggaggaggctgagaatcaggctgaaagccgggcagcagtggaggggacagtggaggctggagctacagttgaaagcactgcatgttaagagggggcacagccctcctcccaagggaaagtgtttttgtatataatgtattttttcacttttggaggattctttttgtataacttcaataaagattgtaagcaaaaaaaaaaaatcggctntttcgggggaaggtaaggctgcatttccggccttgaaggggatgggccggggaag

SEQ ID NO: 301962 - DNA, 1894 bp, Homo sapiens
  misc_feature (1677)..(1677): n is a, c, g, or t
acggagggtatgggtggtgagtcctggccctttaaacccgagggggaggatccggaagtggatgggcggggcgaagggtcctcgtatataaaagggccccggccgcgcggggtctctaatctgccattttctgtccctgagtgagtctctggcgtcccaaattgcctgtttttctcgcaggctctattccgttcgctggttcgccacctcaggggaacgatggccatggagtccacagccactgccgccgtcgccgcggagctggtttctgccgacaaaattgaagatgttcctgctccttctacatctgcagataaagtggagagtctggatgtggatagtgaagctaagaaactattgggtttaggacagaaacatctggtgatgggggatattccagcagctgtcaatgcattccaggaagcagctagtcttttaggtaagaagtatggagagacagctaatgagtgtggagaagccttctttttctatgggaaatcacttctggagttggcaagaatggagaatggtgtgttgggaaacgccttggaaggtgtgcatgtggaagaggaagaaggagaaaaaacagaagatgaatctctggtagaaaataatgataacatagatgaaactgaaggctcggaagaggatgataaagaaaatgataagactgaagaaatgccaaatgattcagtccttgaaaacaagtctcttcaagaaaatgaggaggaggagattgggaacctagagcttgcctgggatatgctggatttagcaaagatcatttttaaaaggcaagaaacaaaagaagcacagctttatgctgcccaggcacatcttaaactcggagaagttagtgttgaatctgaaaactatgtgcaagctgtggaggagttccagtcctgccttaacctgcaggaacagtacctggaagcccacgaccgtctccttgcagagacccactaccagctgggcttggcttatgggtacaactctcagtatgatgaggcagtggcacagttcagcaaatctattgaagtcattgagaacagaatggctgtactaaacgagcaggtgaaggaggctgaaggatcgtctgctgaatacaagaaagaaattgaggaactaaaggaactgctacccgaaattagagagaagatagaagatgcaaaggagtctcagcgtagtgggaatgtagctgaactggctctgaaagctactctggtggagagttctacttcaggtttcactcctggtggaggaggctcttcagtctccatgattgccagtagaaagccaacagacggtgcttcctcatcaaattgtgtgactgatatttcccaccttgtcagaaagaagaggaaaccagaggaagagagtccccggaaagatgatgcaaagaaagccaaacaagagccggaggtgaacggaggcagtggggatgctgtccccagtggaaatgaagtttcggaaaacatggaggaggaggctgagaatcaggctgaaagccgggcagcagtggaggggacagtggaggctggagctacagttgaaagcactgcatgttaagagggggcacagccctcctcccaagggaaagtgtttttgtatataatgtattttttcacttttggaggattctttttgtataacttcaataaagattgtaagcaaaanaacaaaaaacaacacaaggggggggcaaaaaaacccggggggcaagttaccgtcacccgcttttggacaaggggcccaaagggagcggaaaaaacagaagaggcggggctaaagcgcgcggaaagtgcccggtcctggcgaccccctcgggggcaatgcaccacccaataagcccggaaaatcagatgtgacacgctccgcatgtgtaacacaccgg

SEQ ID NO: 301963 - DNA, 1701 bp, Homo sapiens
acggagggtatgggtggtgagtcctggccctttaaacccgagggggaggatccggaagtggatgggcggggcgaagggtcctcgtatataaaagggccccggccgcgcggggtctctaatctgccattttctgtccctgagtgagtctctggcgtcccaaattgcctgtttttctcgcaggctctattccgttcgctggttcgccacctcaggggaacgatggccatggagtccacagccactgccgccgtcgccgcggagctggtttctgccgacaaaattgaagatgttcctgctccttctacatctgcagataaagtggagagtctggatgtggatagtgaagctaagaaactattgggtttaggacagaaacatctggtgatgggggatattccagcagctgtcaatgcattccaggaagcagctagtcttttaggtaagaagtatggagagacagctaatgagtgtggagaagccttctttttctatgggaaatcacttctggagttggcaagaatggagaatggtgtgttgggaaacgccttggaaggtgtgcatgtggaagaggaagaaggagaaaaaacagaagatgaatctctggtagaaaataatgataacatagatgaaactgaaggctcggaagaggatgataaagaaaatgataagactgaagaaatgccaaatgattcagtccttgaaaacaagtctcttcaagaaaatgaggaggaggagattgggaacctagagcttgcctgggatatgctggatttagcaaagatcatttttaaaaggcaagaaacaaaagaagcacagctttatgctgcccaggcacatcttaaactcggagaagttagtgttgaatctgaaaactatgtgcaagctgtggaggagttccagtcctgccttaacctgcaggaacagtacctggaagcccacgaccgtctccttgcagagacccactaccagctgggcttggcttatgggtacaactctcagtatgatgaggcagtggcacagttcagcaaatctattgaagtcattgagaacagaatggctgtactaaacgagcaggtgaaggaggctgaaggatcgtctgctgaatacaagaaagaaattgaggaactaaaggaactgctacccgaaattagagagaagatagaagatgcaaaggagtctcagcgtagtgggaatgtagctgaactggctctgaaagctactctggtggagagttctacttcaggtttcactcctggtggaggaggctcttcagtctccatgattgccagtagaaagccaacagacggtgcttcctcatcaaattgtgtgactgatatttcccaccttgtcagaaagaagaggaaaccagaggaagagagtccccggaaagatgatgcaaagaaagccaaacaagagccggaggtgaacggaggcagtggggatgctgtccccagtggaaatgaagtttcggaaaacatggaggaggaggctgagaatcaggctgaaagccgggcagcagtggaggggacagtggaggctggagctacagttgaaagcactgcatgttaagagggggcacagccctcctcccaagggaaagtgtttttgtatataatgtattttttcacttttggaggattctttttgtataacttcaataaagattgtaagcaaaaaaatcacaccggcctcgtacctgcc

SEQ ID NO: 301964 - DNA, 1638 bp, Homo sapiens
acggagggtatgggtggtgagtcctggccctttaaacccgagggggaggatccggaagtggatgggcggggcgaagggtcctcgtatataaaagggccccggccgcgcggggtctctaatctgccattttctgtccctgagtgagtctctggcgtcccaaattgcctgtttttctcgcaggctctattccgttcgctggttcgccacctcaggggaacgatggccatggagtccacagccactgccgccgtcgccgcggagctggtttctgccgacaaaattgaagatgttcctgctccttctacatctgcagataaagtggagagtctggatgtggatagtgaagctaagaaactattgggtttaggacagaaacatctggtgatgggggatattccagcagctgtcaatgcattccaggaagcagctagtcttttaggtaagaagtatggagagacagctaatgagtgtggagaagccttctttttctatgggaaatcacttctggagttggcaagaatggagaatggtgtgttgggaaacgccttggaaggtgtgcatgtggaagaggaagaaggagaaaaaacagaagatgaatctctggtagaaaataatgataacatagatgaaactgaaggctcggaagaggatgataaagaaaatgataagactgaagaaatgccaaatgattcagtccttgaaaacaagtctcttcaagaaaatgaggaggaggagattgggaacctagagcttgcctgggatatgctggatttagcaaagatcatttttaaaaggcaagaaacaaaagaagcacagctttatgctgcccaggcacatcttaaactcggagaagttagtgttgaatctgaaaactatgtgcaagctgtggaggagttccagtcctgccttaacctgcaggaacagtacctggaagcccacgaccgtctccttgcagagacccactaccagctgggcttggcttatgggtacaactctcagtatgatgaggcagtggcacagttcagcaaatctattgaagtcattgagaacagaatggctgtactaaacgagcaggtgaaggaggctgaaggatcgtctgctgaatacaagaaagaaattgaggaactaaaggaactgctacccgaaattagagagaagatagaagatgcaaaggagtctcagcgtagtgggaatgtagctgaactggctctgaaagctactctggtggagagttctacttcaggtttcactcctggtggaggaggctcttcagtctccatgattgccagtagaaagccaacagacggtgcttcctcatcaaattgtgtgactgatatttcccaccttgtcagaaagaagaggaaaccagaggaagagagtccccggaaagatgatgcaaagaaagccaaacaagagccggaggtgaacggaggcagtggggatgctgtccccagtggaaatgaagtttcggaaaacatggaggaggaggctgagaatcaggctgaaagccgggcagcagtggaggggacagtggaggctggagctacagttgaaagcactgcatgttaagagggggcacagccctcctcccaagggaaagtggggggggatataaggtaggtgggagtgggggaggag

SEQ ID NO: 301965 - DNA, 1627 bp, Homo sapiens
acggagggtatgggtggtgagtcctggccctttaaacccgagggggaggatccggaagtggatgggcggggcgaagggtcctcgtatataaaagggccccggccgcgcggggtctctaatctgccattttctgtccctgagtgagtctctggcgtcccaaattgcctgtttttctcgcaggctctattccgttcgctggttcgccacctcaggggaacgatggccatggagtccacagccactgccgccgtcgccgcggagctggtttctgccgacaaaattgaagatgttcctgctccttctacatctgcagataaagtggagagtctggatgtggatagtgaagctaagaaactattgggtttaggacagaaacatctggtgatgggggatattccagcagctgtcaatgcattccaggaagcagctagtcttttaggtaagaagtatggagagacagctaatgagtgtggagaagccttctttttctatgggaaatcacttctggagttggcaagaatggagaatggtgtgttgggaaacgccttggaaggtgtgcatgtggaagaggaagaaggagaaaaaacagaagatgaatctctggtagaaaataatgataacatagatgaaactgaaggctcggaagaggatgataaagaaaatgataagactgaagaaatgccaaatgattcagtccttgaaaacaagtctcttcaagaaaatgaggaggaggagattgggaacctagagcttgcctgggatatgctggatttagcaaagatcatttttaaaaggcaagaaacaaaagaagcacagctttatgctgcccaggcacatcttaaactcggagaagttagtgttgaatctgaaaactatgtgcaagctgtggaggagttccagtcctgccttaacctgcaggaacagtacctggaagcccacgaccgtctccttgcagagacccactaccagctgggcttggcttatgggtacaactctcagtatgatgaggcagtggcacagttcagcaaatctattgaagtcattgagaacagaatggctgtactaaacgagcaggtgaaggaggctgaaggatcgtctgctgaatacaagaaagaaattgaggaactaaaggaactgctacccgaaattagagagaagatagaagatgcaaaggagtctcagcgtagtgggaatgtagctgaactggctctgaaagctactctggtggagagttctacttcaggtttcactcctggtggaggaggctcttcagtctccatgattgccagtagaaagccaacagacggtgcttcctcatcaaattgtgtgactgatatttcccaccttgtcagaaagaagaggaaaccagaggaagagagtccccggaaagatgatgcaaagaaagccaaacaagagccggaggtgaacggaggcagtggggatgctgtccccagtggaaatgaagtttcggaaaacatggaggaggaggctggagctacagttgaaagcactgcatgttaagagggggcacagccctcctcccaagggaaagtgtttttgtatataatgtattttttcacttttggaggattctttttgtataacttcaataaagattgtaagcaaa

SEQ ID NO: 301966 - DNA, 1518 bp, Homo sapiens
acggagggtatgggtggtgagtcctggccctttaaacccgagggggaggatccggaagtggatgggcggggcgaagggtcctcgtatataaaagggccccggccgcgcggggtctctaatctgccattttctgtccctgagtgagtctctggcgtcccaaattgcctgtttttctcgcaggctctattccgttcgctggttcgccacctcaggggaacgatggccatggagtccacagccactgccgccgtcgccgcggagctggtttctgccgacaaaattgaagatgttcctgctccttctacatctgcagataaagtggagagtctggatgtggatagtgaagctaagaaactattgggtttaggacagaaacatctggtgatgggggatattccagcagctgtcaatgcattccaggaagcagctagtcttttaggtaagaagtatggagagacagctaatgagtgtggagaagccttctttttctatgggaaatcacttctggagttggcaagaatggagaatggtgtgttgggaaacgccttggaaggtgtgcatgtggaagaggaagaaggagaaaaaacagaagatgaatctctggtagaaaataatgataacatagatgaaactgaaggctcggaagaggatgataaagaaaatgataagactgaagaaatgccaaatgattcagtccttgaaaacaagtctcttcaagaaaatgaggaggaggagattgggaacctagagcttgcctgggatatgctggatttagcaaagatcatttttaaaaggcaagaaacaaaagaagcacagctttatgctgcccaggcacatcttaaactcggagaagttagtgttgaatctgaaaactatgtgcaagctgtggaggagttccagtcctgccttaacctgcaggaacagtacctggaagcccacgaccgtctccttgcagagacccactaccagctgggcttggcttatgggtacaactctcagtatgatgaggcagtggcacagttcagcaaatctattgaagtcattgagaacagaatggctgtactaaacgagcaggtgaaggaggctgaaggatcgtctgctgaatacaagaaagaaattgaggaactaaaggaactgctacccgaaattagagagaagatagaagatgcaaaggagtctcagcgtagtgggaatgtagctgaactggctctgaaagctactctggtggagagttctacttcaggtttcactcctggtggaggaggctcttcagtctccatgattgccagtagaaagccaacagacggtgcttcctcatcaaattgtgtgactgatatttcccaccttgtcagaaagaagaggaaaccagaggaagagagtccccggaaagatgatgcaaagaaagccaaacaagagccggaggtgaacggaggcagtggggatgctgtccccagtggaaatgaagtttcggaaaacatggaggaggagactgaagagcctcctccaccaggagtgaaa

SEQ ID NO: 301967 - DNA, 1340 bp, Homo sapiens
acggagggtatgggtggtgagtcctggccctttaaacccgagggggaggatccggaagtggatgggcggggcgaagggtcctcgtatataaaagggccccggccgcgcggggtctctaatctgccattttctgtccctgagtgagtctctggcgtcccaaattgcctgtttttctcgcaggctctattccgttcgctggttcgccacctcaggggaacgatggccatggagtccacagccactgccgccgtcgccgcggagctggtttctgccgacaaaattgaagatgttcctgctccttctacatctgcagataaagtggagagtctggatgtggatagtgaagctaagaaactattgggtttaggacagaaacatctggtgatgggggatattccagcagctgtcaatgcattccaggaagcagctagtcttttaggtaagaagtatggagagacagctaatgagtgtggagaagccttctttttctatgggaaatcacttctggagttggcaagaatggagaatggtgtgttgggaaacgccttggaaggtgtgcatgtggaagaggaagaaggagaaaaaacagaagatgaatctctggtagaaaataatgataacatagatgaaactgaaggctcggaagaggatgataaagaaaatgataagactgaagaaatgccaaatgattcagtccttgaaaacaagtctcttcaagaaaatgaggaggaggagattgggaacctagagcttgcctgggatatgctggatttagcaaagatcatttttaaaaggcaagaaacaaaagaagcacagctttatgctgcccaggcacatcttaaactcggagaagttagtgttgaatctgaaaactatgtgcaagctgtggaggagttccagtcctgccttaacctgcaggaacagtacctggaagcccacgaccgtctccttgcagagacccactaccagctgggcttggcttatgggtacaactctcagtatgatgaggcagtggcacagttcagcaaatctattgaagtcattgagaacagaatggctgtactaaacgagcaggtgaaggaggctgaaggatcgtctgctgaatacaagaaagaaattgaggaactaaaggaactgctacccgaaattagagagaagatagaagatgcaaaggagtctcagcgtagtgggaatgtagctgaactggctctgaaagctactctggtggagagttctacttcaggtttcactcctggtggaggaggctcttcagtctccatgattgccagtacgaacgccaacagaccgacccttccccaccaagttttcccactcacaac

SEQ ID NO: 301968 - DNA, 2765 bp, Homo sapiens
acggagggtatgggtggtgagtcctggccctttaaacccgagggggaggatccggaagtggatgggcggggcgaagggtcctcgtatataaaagggccccggccgcgcggggtctctaatctgccattttctgtccctgagtgagtctctggcgtcccaaattgcctgtttttctcgcaggctctattccgttcgctggttcgccacctcaggggaacgatggccatggagtccacagccactgccgccgtcgccgcggagctggtttctgccgacaaaattgaagatgttcctgctccttctacatctgcagataaagtggagagcaaccattaatctgctttctgtcactgaagatgggttgcattttgtagaatattatctaaatagaatcatacatctggatgtggatagtgaagctaagaaactattgggtttaggacagaaacatctggtgatgggggatattccagcagctgtcaatgcattccaggaagcagctagtcttttaggtaagaagtatggagagacagctaatgagtgtggagaagccttctttttctatgggaaatcacttctggagttggcaagaatggagaatggtgtgttgggaaacgccttggaaggtgtgcatgtggaagaggaagaaggagaaaaaacagaagatgaatctctggtagaaaataatgataacatagatgaggaagcaagggaagagttgagagaacaggtttatgacgccatgggagaaaaagaagaagccaaaaaaacagaagacaagtctttggcaaagcctgaaactgataaagaacaggacagtgaaatggagaagggtggaagagaagatatggatataagtaaatctgcagaggagccacaggaaaaagttgacttgactctagattggttaactgaaacctctgaagaggcaaaaggaggagcagcaccagaaggaccgaatgaagctgaggtcacttctgggaagccagaacaggaagtaccagatgctgaggaagaaaaatcagtttctggaactgatgtccaagaagagtgcagagaaaaaggaggtcaggagaagcagggagaggtaattgtgagcatagaggagaagccaaaagaagtttcagaagagcagcctgtggtgactctagaaaagcagggcactgcagtggaggtagaagcagagtctttagacccgacagtcaagccagtggatgtgggtggggacgagccagaggagaaggtagttacctctgaaaacgaggcaggaaaggcggttcttgaacaactggtaggtcaagaagtaccacctgctgaagagtcaccagaggtgacaacagaggctgcagaggcctcagctgtagaggctggatcagaagtctctgaaaagcctgggcaggaggctccagttctccctaaggatggtgcagtcaatggaccgtcagttgtaggagatcagactcctattgaaccacagacttctatagaaagactgacagaaacaaaagatggctcaggactagaggagaaggtcagggcaaagctggttcctagtcaggaggagactaagctgtctgtagaagagtctgaggcagctggagatggggttgataccaaggtagcccagggagctactgagaaatcacctgaagacaaagttcagatagctgctaatgaagagacacaagagagagaagaacagatgaaagagggtgaagaaactgaaggctcggaagaggatgataaagaaaatgataagactgaagaaatgccaaatgattcagtccttgaaaacaagtctcttcaagaaaatgaggaggaggagattgggaacctagagcttgcctgggatatgctggatttagcaaagatcatttttaaaaggcaagaaacaaaagaagcacagctttatgctgcccaggcacatcttaaactcggagaagttagtgttgaatctgaaaactatgtgcaagctgtggaggagttccagtcctgccttaacctgcaggaacagtacctggaagcccacgaccgtctccttgcagagacccactaccagctgggcttggcttatgggtacaactctcagtatgatgaggcagtggcacagttcagcaaatctattgaagtcattgagaacagaatggctgtactaaacgagcaggtgaaggaggctgaaggatcgtctgctgaatacaagaaagaaattgaggaactaaaggaactgctacccgaaattagagagaagatagaagatgcaaaggagtctcagcgtagtgggaatgtagctgaactggctctgaaagctactctggtggagagttctacttcaggtttcactcctggtggaggaggctcttcagtctccatgattgccagtagaaagccaacagacggtgcttcctcatcaaattgtgtgactgatatttcccaccttgtcagaaagaagaggaaaccagaggaagagagtccccggaaagatgatgcaaagaaagccaaacaagagccggaggtgaacggaggcagtggggatgctgtccccagtggaaatgaagtttcggaaaacatggaggaggaggctgagaatcaggctgaaagccgggcagcagtggaggggacagtggaggctggagctacagttgaaagcactgcatgttaagagggggcacagccctcctcccaagggaaagtgtttttgtatataatgtattttttcacttttggaggattctttttgtataacttcaataaagattgtaagcaaa

SEQ ID NO: 301969 - DNA, 2772 bp, Homo sapiens
acggagggtatgggtggtgagtcctggccctttaaacccgagggggaggatccggaagtggatgggcggggcgaagggtcctcgtatataaaagggccccggccgcgcggggtctctaatctgccattttctgtccctgagtgagtctctggcgtcccaaattgcctgtttttctcgcaggctctattccgttcgctggttcgccacctcaggggaacgatggccatggagtccacagccactgccgccgtcgccgcggagctggtttctgccgacaaaattgaagatgttcctgctccttctacatctgcagataaagtggagagagatgaggtttcgtcacgttgcccaggctggggctcaagccatcttctcacctcagccacctgaagtgctgggattacagtctggatgtggatagtgaagctaagaaactattgggtttaggacagaaacatctggtgatgggggatattccagcagctgtcaatgcattccaggaagcagctagtcttttaggtaagaagtatggagagacagctaatgagtgtggagaagccttctttttctatgggaaatcacttctggagttggcaagaatggagaatggtgtgttgggaaacgccttggaaggtgtgcatgtggaagaggaagaaggagaaaaaacagaagatgaatctctggtagaaaataatgataacatagatgaggaagcaagggaagagttgagagaacaggtttatgacgccatgggagaaaaagaagaagccaaaaaaacagaagacaagtctttggcaaagcctgaaactgataaagaacaggacagtgaaatggagaagggtggaagagaagatatggatataagtaaatctgcagaggagccacaggaaaaagttgacttgactctagattggttaactgaaacctctgaagaggcaaaaggaggagcagcaccagaaggaccgaatgaagctgaggtcacttctgggaagccagaacaggaagtaccagatgctgaggaagaaaaatcagtttctggaactgatgtccaagaagagtgcagagaaaaaggaggtcaggagaagcagggagaggtaattgtgagcatagaggagaagccaaaagaagtttcagaagagcagcctgtggtgactctagaaaagcagggcactgcagtggaggtagaagcagagtctttagacccgacagtcaagccagtggatgtgggtggggacgagccagaggagaaggtagttacctctgaaaacgaggcaggaaaggcggttcttgaacaactggtaggtcaagaagtaccacctgctgaagagtcaccagaggtgacaacagaggctgcagaggcctcagctgtagaggctggatcagaagtctctgaaaagcctgggcaggaggctccagttctccctaaggatggtgcagtcaatggaccgtcagttgtaggagatcagactcctattgaaccacagacttctatagaaagactgacagaaacaaaagatggctcaggactagaggagaaggtcagggcaaagctggttcctagtcaggaggagactaagctgtctgtagaagagtctgaggcagctggagatggggttgataccaaggtagcccagggagctactgagaaatcacctgaagacaaagttcagatagctgctaatgaagagacacaagagagagaagaacagatgaaagagggtgaagaaactgaaggctcggaagaggatgataaagaaaatgataagactgaagaaatgccaaatgattcagtccttgaaaacaagtctcttcaagaaaatgaggaggaggagattgggaacctagagcttgcctgggatatgctggatttagcaaagatcatttttaaaaggcaagaaacaaaagaagcacagctttatgctgcccaggcacatcttaaactcggagaagttagtgttgaatctgaaaactatgtgcaagctgtggaggagttccagtcctgccttaacctgcaggaacagtacctggaagcccacgaccgtctccttgcagagacccactaccagctgggcttggcttatgggtacaactctcagtatgatgaggcagtggcacagttcagcaaatctattgaagtcattgagaacagaatggctgtactaaacgagcaggtgaaggaggctgaaggatcgtctgctgaatacaagaaagaaattgaggaactaaaggaactgctacccgaaattagagagaagatagaagatgcaaaggagtctcagcgtagtgggaatgtagctgaactggctctgaaagctactctggtggagagttctacttcaggtttcactcctggtggaggaggctcttcagtctccatgattgccagtagaaagccaacagacggtgcttcctcatcaaattgtgtgactgatatttcccaccttgtcagaaagaagaggaaaccagaggaagagagtccccggaaagatgatgcaaagaaagccaaacaagagccggaggtgaacggaggcagtggggatgctgtccccagtggaaatgaagtttcggaaaacatggaggaggaggctgagaatcaggctgaaagccgggcagcagtggaggggacagtggaggctggagctacagttgaaagcactgcatgttaagagggggcacagccctcctcccaagggaaagtgtttttgtatataatgtattttttcacttttggaggattctttttgtataacttcaataaagattgtaagcaaa

SEQ ID NO: 301970 - DNA, 2297 bp, Homo sapiens
ctcaagtaaaacaatacctagtgtaacaagcttgggtttcttttgcagtaagttgctctgctagccgggatgctccctttccttttctctagggggcagataatttttaggccatctgctgaaacttggtaggctttttgagggtttaaagggaatgtatttttagtttccatttatgcctttatcattaaactcgaagacatgtttatgcttcatgttctttaaccatgtagaggaagcaagggaagagttgagagaacaggtttatgacgccatgggagaaaaagaagaagccaaaaaaacagaagacaagtctttggcaaagcctgaaactgataaagaacaggacagtgaaatggagaagggtggaagagaagatatggatataagtaaatctgcagaggagccacaggaaaaagttgacttgactctagattggttaactgaaacctctgaagaggcaaaaggaggagcagcaccagaaggaccgaatgaagctgaggtcacttctgggaagccagaacaggaagtaccagatgctgaggaagaaaaatcagtttctggaactgatgtccaagaagagtgcagagaaaaaggaggtcaggagaagcagggagaggtaattgtgagcatagaggagaagccaaaagaagtttcagaagagcagcctgtggtgactctagaaaagcagggcactgcagtggaggtagaagcagagtctttagacccgacagtcaagccagtggatgtgggtggggacgagccagaggagaaggtagttacctctgaaaacgaggcaggaaaggcggttcttgaacaactggtaggtcaagaagtaccacctgctgaagagtcaccagaggtgacaacagaggctgcagaggcctcagctgtagaggctggatcagaagtctctgaaaagcctgggcaggaggctccagttctccctaaggatggtgcagtcaatggaccgtcagttgtaggagatcagactcctattgaaccacagacttctatagaaagactgacagaaacaaaagatggctcaggactagaggagaaggtcagggcaaagctggttcctagtcaggaggagactaagctgtctgtagaagagtctgaggcagctggagatggggttgataccaaggtagcccagggagctactgagaaatcacctgaagacaaagttcagatagctgctaatgaagagacacaagagagagaagaacagatgaaagagggtgaagaaactgaaggctcggaagaggatgataaagaaaatgataagactgaagaaatgccaaatgattcagtccttgaaaacaagtctcttcaagaaaatgaggaggaggagattgggaacctagagcttgcctgggatatgctggatttagcaaagatcatttttaaaaggcaagaaacaaaagaagcacagctttatgctgcccaggcacatcttaaactcggagaagttagtgttgaatctgaaaactatgtgcaagctgtggaggagttccagtcctgccttaacctgcaggaacagtacctggaagcccacgaccgtctccttgcagagacccactaccagctgggcttggcttatgggtacaactctcagtatgatgaggcagtggcacagttcagcaaatctattgaagtcattgagaacagaatggctgtactaaacgagcaggtgaaggaggctgaaggatcgtctgctgaatacaagaaagaaattgaggaactaaaggaactgctacccgaaattagagagaagatagaagatgcaaaggagtctcagcgtagtgggaatgtagctgaactggctctgaaagctactctggtggagagttctacttcaggtttcactcctggtggaggaggctcttcagtctccatgattgccagtagaaagccaacagacggtgcttcctcatcaaattgtgtgactgatatttcccaccttgtcagaaagaagaggaaaccagaggaagagagtccccggaaagatgatgcaaagaaagccaaacaagagccggaggtgaacggaggcagtggggatgctgtccccagtggaaatgaagtttcggaaaacatggaggaggaggctgagaatcaggctgaaagccgggcagcagtggaggggacagtggaggctggagctacagttgaaagcactgcatgttaagagggggcacagccctcctcccaagggaaagtgtttttgtatataatgtattttttcacttttggaggattctttttgtataacttcaataaagattgtaagcaaa

SEQ ID NO: 301971 - DNA, 2581 bp, Homo sapiens
acggagggtatgggtggtgagtcctggccctttaaacccgagggggaggatccggaagtggatgggcggggcgaagggtcctcgtatataaaagggccccggccgcgcggggtctctaatctgccattttctgtccctgagtgagtctctggcgtcccaaattgcctgtttttctcgcaggctctattccgttcgctggttcgccacctcaggggaacgatggccatggagtccacagccactgccgccgtcgccgcggagctggtttctgccgacaaaattgaagatgttcctgctccttctacatctgcagataaagtggagagaggtaagaagtatggagagacagctaatgagtgtggagaagccttctttttctatgggaaatcacttctggagttggcaagaatggagaatggtgtgttgggaaacgccttggaaggtgtgcatgtggaagaggaagaaggagaaaaaacagaagatgaatctctggtagaaaataatgataacatagatgaggaagcaagggaagagttgagagaacaggtttatgacgccatgggagaaaaagaagaagccaaaaaaacagaagacaagtctttggcaaagcctgaaactgataaagaacaggacagtgaaatggagaagggtggaagagaagatatggatataagtaaatctgcagaggagccacaggaaaaagttgacttgactctagattggttaactgaaacctctgaagaggcaaaaggaggagcagcaccagaaggaccgaatgaagctgaggtcacttctgggaagccagaacaggaagtaccagatgctgaggaagaaaaatcagtttctggaactgatgtccaagaagagtgcagagaaaaaggaggtcaggagaagcagggagaggtaattgtgagcatagaggagaagccaaaagaagtttcagaagagcagcctgtggtgactctagaaaagcagggcactgcagtggaggtagaagcagagtctttagacccgacagtcaagccagtggatgtgggtggggacgagccagaggagaaggtagttacctctgaaaacgaggcaggaaaggcggttcttgaacaactggtaggtcaagaagtaccacctgctgaagagtcaccagaggtgacaacagaggctgcagaggcctcagctgtagaggctggatcagaagtctctgaaaagcctgggcaggaggctccagttctccctaaggatggtgcagtcaatggaccgtcagttgtaggagatcagactcctattgaaccacagacttctatagaaagactgacagaaacaaaagatggctcaggactagaggagaaggtcagggcaaagctggttcctagtcaggaggagactaagctgtctgtagaagagtctgaggcagctggagatggggttgataccaaggtagcccagggagctactgagaaatcacctgaagacaaagttcagatagctgctaatgaagagacacaagagagagaagaacagatgaaagagggtgaagaaactgaaggctcggaagaggatgataaagaaaatgataagactgaagaaatgccaaatgattcagtccttgaaaacaagtctcttcaagaaaatgaggaggaggagattgggaacctagagcttgcctgggatatgctggatttagcaaagatcatttttaaaaggcaagaaacaaaagaagcacagctttatgctgcccaggcacatcttaaactcggagaagttagtgttgaatctgaaaactatgtgcaagctgtggaggagttccagtcctgccttaacctgcaggaacagtacctggaagcccacgaccgtctccttgcagagacccactaccagctgggcttggcttatgggtacaactctcagtatgatgaggcagtggcacagttcagcaaatctattgaagtcattgagaacagaatggctgtactaaacgagcaggtgaaggaggctgaaggatcgtctgctgaatacaagaaagaaattgaggaactaaaggaactgctacccgaaattagagagaagatagaagatgcaaaggagtctcagcgtagtgggaatgtagctgaactggctctgaaagctactctggtggagagttctacttcaggtttcactcctggtggaggaggctcttcagtctccatgattgccagtagaaagccaacagacggtgcttcctcatcaaattgtgtgactgatatttcccaccttgtcagaaagaagaggaaaccagaggaagagagtccccggaaagatgatgcaaagaaagccaaacaagagccggaggtgaacggaggcagtggggatgctgtccccagtggaaatgaagtttcggaaaacatggaggaggaggctgagaatcaggctgaaagccgggcagcagtggaggggacagtggaggctggagctacagttgaaagcactgcatgttaagagggggcacagccctcctcccaagggaaagtgtttttgtatataatgtattttttcacttttggaggattctttttgtataacttcaataaagattgtaagcaaa

SEQ ID NO: 301972 - DNA, 1748 bp, Homo sapiens
acggagggtatgggtggtgagtcctggccctttaaacccgagggggaggatccggaagtggatgggcggggcgaagggtcctcgtatataaaagggccccggccgcgcggggtctctaatctgccattttctgtccctgagtgagtctctggcgtcccaaattgcctgtttttctcgcaggctctattccgttcgctggttcgccacctcaggggaacgatggccatggagtccacagccactgccgccgtcgccgcggagctggtttctgccgacaaaattgaagatgttcctgctccttctacatctgcagataaagtggagagcaaccattaatctgctttctgtcactgaagatgggttgcattttgtagaatattatctaaatagaatcatacatctggatgtggatagtgaagctaagaaactattgggtttaggacagaaacatctggtgatgggggatattccagcagctgtcaatgcattccaggaagcagctagtcttttaggtaagaagtatggagagacagctaatgagtgtggagaagccttctttttctatgggaaatcacttctggagttggcaagaatggagaatggtgtgttgggaaacgccttggaaggtgtgcatgtggaagaggaagaaggagaaaaaacagaagatgaatctctggtagaaaataatgataacatagatgaaactgaaggctcggaagaggatgataaagaaaatgataagactgaagaaatgccaaatgattcagtccttgaaaacaagtctcttcaagaaaatgaggaggaggagattgggaacctagagcttgcctgggatatgctggatttagcaaagatcatttttaaaaggcaagaaacaaaagaagcacagctttatgctgcccaggcacatcttaaactcggagaagttagtgttgaatctgaaaactatgtgcaagctgtggaggagttccagtcctgccttaacctgcaggaacagtacctggaagcccacgaccgtctccttgcagagacccactaccagctgggcttggcttatgggtacaactctcagtatgatgaggcagtggcacagttcagcaaatctattgaagtcattgagaacagaatggctgtactaaacgagcaggtgaaggaggctgaaggatcgtctgctgaatacaagaaagaaattgaggaactaaaggaactgctacccgaaattagagagaagatagaagatgcaaaggagtctcagcgtagtgggaatgtagctgaactggctctgaaagctactctggtggagagttctacttcaggtttcactcctggtggaggaggctcttcagtctccatgattgccagtagaaagccaacagacggtgcttcctcatcaaattgtgtgactgatatttcccaccttgtcagaaagaagaggaaaccagaggaagagagtccccggaaagatgatgcaaagaaagccaaacaagagccggaggtgaacggaggcagtggggatgctgtccccagtggaaatgaagtttcggaaaacatggaggaggaggctgagaatcaggctgaaagccgggcagcagtggaggggacagtggaggctggagctacagttgaaagcactgcatgttaagagggggcacagccctcctcccaagggaaagtgtttttgtatataatgtattttttcacttttggaggattctttttgtataacttcaataaagattgtaagcaaa

SEQ ID NO: 301973 - DNA, 1105 bp, Homo sapiens
acggagggtatgggtggtgagtcctggccctttaaacccgagggggaggatccggaagtggatgggcggggcgaagggtcctcgtatataaaagggccccggccgcgcggggtctctaatctgccattttctgtccctgagtgagtctctggcgtcccaaattgcctgtttttctcgcaggctctattccgttcgctggttcgccacctcaggggaacgatggccatggagtccacagccactgccgccgtcgccgcggagctggtttctgccgacaaaattgaagatgttcctgctccttctacatctgcagataaagtggagagtctggatgtggatagtgaagctaagaaactattgggtttaggacagaaacatctggtgatgggggatattccagcagctgtcaatgcattccaggaagcagctagtcttttaggtaagaagtatggagagacagctaatgagtgtggagaagccttctttttctatgggaaatcacttctggagttggcaagaatggagaatggtgtgttgggaaacgccttggaaggtgtgcatgtggaagaggaagaaggagaaaaaacagaagatgaatctctggtagaaaataatgataacatagatgaaactgaaggctcggaagaggatgataaagaaaatgataagactgaagaaatgccaaatgattcagtccttgaaaacaagtctcttcaagaaaatgaggaggaggagattgggaacctagagcttgcctgggatatgctggatttagcaaagatcatttttaaaaggcaagaaacaaaagaagcacagctttatgctgcccaggcacatcttaaactcggagaagttagtgttgaatctgaaaactatgtgcaagctgtggaggagttccagtcctgccttaacctgcaggaacagtacctggaagcccacgaccgtctccttgcagagacccactaccagctgggcttggcttatgggtacaactctcagtatgatgaggcagtggcacagttcagcaaatctattgaagtcattgagaacagaatggctgtactaaacgagcagcaggaggaataagatcctgtgacgacctcac

SEQ ID NO: 301974 - DNA, 1564 bp, Homo sapiens
acggagggtatgggtggtgagtcctggccctttaaacccgagggggaggatccggaagtggatgggcggggcgaagggtcctcgtatataaaagggccccggccgcgcggggtctctaatctgccattttctgtccctgagtgagtctctggcgtcccaaattgcctgtttttctcgcaggctctattccgttcgctggttcgccacctcaggggaacgatggccatggagtccacagccactgccgccgtcgccgcggagctggtttctgccgacaaaattgaagatgttcctgctccttctacatctgcagataaagtggagagaggtaagaagtatggagagacagctaatgagtgtggagaagccttctttttctatgggaaatcacttctggagttggcaagaatggagaatggtgtgttgggaaacgccttggaaggtgtgcatgtggaagaggaagaaggagaaaaaacagaagatgaatctctggtagaaaataatgataacatagatgaaactgaaggctcggaagaggatgataaagaaaatgataagactgaagaaatgccaaatgattcagtccttgaaaacaagtctcttcaagaaaatgaggaggaggagattgggaacctagagcttgcctgggatatgctggatttagcaaagatcatttttaaaaggcaagaaacaaaagaagcacagctttatgctgcccaggcacatcttaaactcggagaagttagtgttgaatctgaaaactatgtgcaagctgtggaggagttccagtcctgccttaacctgcaggaacagtacctggaagcccacgaccgtctccttgcagagacccactaccagctgggcttggcttatgggtacaactctcagtatgatgaggcagtggcacagttcagcaaatctattgaagtcattgagaacagaatggctgtactaaacgagcaggtgaaggaggctgaaggatcgtctgctgaatacaagaaagaaattgaggaactaaaggaactgctacccgaaattagagagaagatagaagatgcaaaggagtctcagcgtagtgggaatgtagctgaactggctctgaaagctactctggtggagagttctacttcaggtttcactcctggtggaggaggctcttcagtctccatgattgccagtagaaagccaacagacggtgcttcctcatcaaattgtgtgactgatatttcccaccttgtcagaaagaagaggaaaccagaggaagagagtccccggaaagatgatgcaaagaaagccaaacaagagccggaggtgaacggaggcagtggggatgctgtccccagtggaaatgaagtttcggaaaacatggaggaggaggctgagaatcaggctgaaagccgggcagcagtggaggggacagtggaggctggagctacagttgaaagcactgcatgttaagagggggcacagccctcctcccaagggaaagtgtttttgtatataatgtattttttcacttttggaggattctttttgtataacttcaataaagattgtaagcaaa

SEQ ID NO: 301975 - DNA, 1081 bp, Homo sapiens
  misc_feature (1027)..(1027): n is a, c, g, or t
  misc_feature (1034)..(1034): n is a, c, g, or t
  misc_feature (1049)..(1049): n is a, c, g, or t
  misc_feature (1054)..(1054): n is a, c, g, or t
  misc_feature (1056)..(1058): n is a, c, g, or t
  misc_feature (1067)..(1067): n is a, c, g, or t
acggagggtatgggtggtgagtcctggccctttaaacccgagggggaggatccggaagtggatgggcggggcgaagggtcctcgtatataaaagggccccggccgcgcggggtctctaatctgccattttctgtccctgagtgagtctctggcgtcccaaattgcctgtttttctcgcaggctctattccgttcgctggttcgccacctcaggggaacgatggccatggagtccacagccactgccgccgtcgccgcggagctggtttctgccgacaaaattgaagatgttcctgctccttctacatctgcagataaagtggagagtctggatgtggatagtgaagctaagaaactattgggtttaggacagaaacatctggtgatgggggatattccagcagctgtcaatgcattccaggaagcagctagtcttttaggtaagaagtatggagagacagctaatgagtgtggagaagccttctttttctatgggaaatcacttctggagttggcaagaatggagaatggtgtgttgggaaacgccttggaaggtgtgcatgtggaagaggaagaaggagaaaaaacagaagatgaatctctggtagaaaataatgataacatagatgaaactgaaggctcggaagaggatgataaagaaaatgataagactgaagaaatgccaaatgattcagtccttgaaaacaagtctcttcaagaaaatgaggaggaggagattgggaacctagagcttgcctgggatatgctggatttagcaaagatcatttttaaaaggcaagaaacaaaagaagcacagctttatgctgcccaggcacatcttaaactcggagaagttagtgttgaatctgaaaactatgtgcaagctgtggaggagttccagtcctgccttaacctgcaggaacagtacctggaagcccacgaccgtctccttgcagagacccactaccagctgggcttggcttatgggtacaactctcagtatgatgaggggggcagtcgaatttganttggaanaggggtaagcggggnggggngnnnggaaaaaanggggggcaaaaaag

SEQ ID NO: 301976 - DNA, 2203 bp, Homo sapiens
ggtgggggagaaaatgtttttttctaagattttccacagatgctatagtactattgacaaactgggttagagaaggagtgtaccgctgtgctgttggcacgaacaccttcagggactggagctgcttttatccttggaagagtattcccagttgaagctgaaaagtacagcacagtgcagctttggttcatattcagtcatctcaggagaacttcagaagagcttgagtaggccaaatgttgaagttaagttttccaataatgtgacttcttaaaagttttattaaaggggaggggcaaatattggcaattagttggcagtggcctgttacggttgggattggtggggtgggtttaggtaattgtttagtctgaggcagctggagatggggttgataccaaggtagcccagggagctactgagaaatcacctgaagacaaagttcagatagctgctaatgaagagacacaagagagagaagaacagatgaaagagggtgaagaaactgaaggctcggaagaggatgataaagaaaatgataagactgaagaaatgccaaatgattcagtccttgaaaacaagtctcttcaagaaaatgaggaggaggagattgggaacctagagcttgcctgggatatgctggatttagcaaagatcatttttaaaaggcaagaaacaaaagaagcacagctttatgctgcccaggcacatcttaaactcggagaagttagtgttgaatctgaaaactatgtgcaagctgtggaggagttccagtcctgccttaacctgcaggaacagtacctggaagcccacgaccgtctccttgcagagacccactaccagctgggcttggcttatgggtacaactctcagtatgatgaggcagtggcacagttcagcaaatctattgaagtcattgagaacagaatggctgtactaaacgagcaggtgaaggaggctgaaggatcgtctgctgaatacaagaaagaaattgaggaactaaaggaactgctacccgaaattagagagaagatagaagatgcaaaggagtctcagcgtagtgggaatgtagctgaactggctctgaaagctactctggtggagagttctacttcaggtttcactcctggtggaggaggctcttcagtctccatgattgccagtagaaagccaacagacggtgcttcctcatcaaattgtgtgactgatatttcccaccttgtcagaaagaagaggaaaccagaggaagagagtccccggaaagatgatgcaaagaaagccaaacaagagccggaggtgaacggaggcagtggggatgctgtccccagtggaaatgaagtttcggaaaacatggaggaggaggctgagaatcaggctgaaagccgggcagcagtggaggggacagtggaggctggagctacagttgaaagcactgcatgttaagagggggcacagccctcctcccaagggaaagtgtttttgtatataatgtattttttcacttttggaggattctttttgtataacttcaataaagattgtaagcaaaggttgaggctttgatggtttttttcttaattattggctgaatctgccttggagcactgctggttttatatattagccaaaggttttgttctggccttctgtactgatctgtgttcctgatcctaattcctatctgtctaacgtggaggtgatcaagtgtggctgtaggcctttgttttccaatggtgctatattctgttttcaaacacttcactgaacccagctgtcttgcaaactttcagtggtgctgtccctggatgggggctacaaaaacaagaattggtgaagatcttgctcttcagtgctgaaaatggatgatggactttggctgtgagccaggcctaggatggttcttgtcctatatccacctagtcttcacctggggctataattctgtcctggaaaaagaactctgaaaacctgggtcaggggaatgattcctaaggaaaacggtctgcatttgagctctggtttgaaagtagccaaggggactgatggtggacactccagatgtggttggaagcatatgtggggaggctggctggttgagttttgttattttctgtatagaaaggttgagatatatcaacacttggaattgttacccatctgcagaattgacttctcaaataaagatgctaaaaatcaaaaaaac

SEQ ID NO: 301977 - DNA, 2161 bp, Homo sapiens
agtagagacggggtttcaccatgttcgccaggatggtctcaatctcctgacctcgtgatccgcccgcctcggcctcccaaagagctgggattacaggtgtgagtcaccgcgcctgaccctgttaaagtattttctaagcttctttgaaaacggaatctctttgtggttgctgctgataaaactcctttgacctgacgattgctctaagtcctaattgccatatttatattcccatagtaagagtgtttggagatagtgtttgagcttttttgctggtgttaaaaatgcataatgaaagatggcagagagaggcatattatatccaattcatgagttgtttgtgttaacagaaagcttattttaatcacttaacattgttgatttgtctaatcacagtagcgctattgattaggagcctgacctttagatggttgacttgtgagtgtattcaatatggtgaaatatggtgttgatatatggctgcagattttagaggtgtcattagcaaaggtataggagtaaaataggggttatagtattccttactcaaattctgtatgtgctagagctggctggagtctgtggcatgctcattggtgtaagtcggtaaggactatgctttttgctccacatctctgttgtgggaaagctagtctcttgagcattcttgatcagaatggactggaataatttaactttcgtactttcccaggctattagtattatctaatgagtggcttaaagataccagaaacactgactgaggtctccacctgcttctggctgaatgaatgggagcttctagccattgaataagaggcagtagccaatgtttcttattctgaatggtccaggttgacttttataagagaaacactcagccttttaattgctgaaggtctggcccatagactaagattgcacattcttagtctaggttacacttgaactagactgcacccactgacgatatattcagttcaggtgttaactcacttggattagcatctggcctgtcctatctgaatataggttgagacgtgtattggaatctctgactagtcagaatacgttcttagttatattctcaatactgaggaatttttacttgtagaaactgaaggctcggaagaggatgataaagaaaatgataagactgaagaaatgccaaatgattcagtccttgaaaacaagtctcttcaagaaaatgaggaggaggagattgggaacctagagcttgcctgggatatgctggatttagcaaagatcatttttaaaaggcaagaaacaaaagaagcacagctttatgctgcccaggcacatcttaaactcggagaagttagtgttgaatctgaaaactatgtgcaagctgtggaggagttccagtcctgccttaacctgcaggaacagtacctggaagcccacgaccgtctccttgcagagacccactaccagctgggcttggcttatgggtacaactctcagtatgatgaggcagtggcacagttcagcaaatctattgaagtcattgagaacagaatggctgtactaaacgagcaggtgaaggaggctgaaggatcgtctgctgaatacaagaaagaaattgaggaactaaaggaactgctacccgaaattagagagaagatagaagatgcaaaggagtctcagcgtagtgggaatgtagctgaactggctctgaaagctactctggtggagagttctacttcaggtttcactcctggtggaggaggctcttcagtctccatgattgccagtagaaagccaacagacggtgcttcctcatcaaattgtgtgactgatatttcccaccttgtcagaaagaagaggaaaccagaggaagagagtccccggaaagatgatgcaaagaaagccaaacaagagccggaggtgaacggaggcagtggggatgctgtccccagtggaaatgaagtttcggaaaacatggaggaggaggctgagaatcaggctgaaagccgggcagcagtggaggggacagtggaggctggagctacagttgaaagcactgcatgttaagagggggcacagccctcctcccaagggaaagtgtttttgtatataatgtattttttcacttttggaggattctttttgtataacttcaataaagattgtaagcaaa

SEQ ID NO: 301978 - DNA, 1483 bp, Homo sapiens
acggagggtatgggtggtgagtcctggccctttaaacccgagggggaggatccggaagtggatgggcggggcgaagggtcctcgtatataaaagggccccggccgcgcggggtctctaatctgccattttctgtccctgagtgagtctctggcgtcccaaattgcctgtttttctcgcaggctctattccgttcgctggttcgccacctcaggggaacgatggccatggagtccacagccactgccgccgtcgccgcggagctggtttctgccgacaaaattgaagatgttcctgctccttctacatctgcagataaagtggagagaatggagaatggtgtgttgggaaacgccttggaaggtgtgcatgtggaagaggaagaaggagaaaaaacagaagatgaatctctggtagaaaataatgataacatagatgaaactgaaggctcggaagaggatgataaagaaaatgataagactgaagaaatgccaaatgattcagtccttgaaaacaagtctcttcaagaaaatgaggaggaggagattgggaacctagagcttgcctgggatatgctggatttagcaaagatcatttttaaaaggcaagaaacaaaagaagcacagctttatgctgcccaggcacatcttaaactcggagaagttagtgttgaatctgaaaactatgtgcaagctgtggaggagttccagtcctgccttaacctgcaggaacagtacctggaagcccacgaccgtctccttgcagagacccactaccagctgggcttggcttatgggtacaactctcagtatgatgaggcagtggcacagttcagcaaatctattgaagtcattgagaacagaatggctgtactaaacgagcaggtgaaggaggctgaaggatcgtctgctgaatacaagaaagaaattgaggaactaaaggaactgctacccgaaattagagagaagatagaagatgcaaaggagtctcagcgtagtgggaatgtagctgaactggctctgaaagctactctggtggagagttctacttcaggtttcactcctggtggaggaggctcttcagtctccatgattgccagtagaaagccaacagacggtgcttcctcatcaaattgtgtgactgatatttcccaccttgtcagaaagaagaggaaaccagaggaagagagtccccggaaagatgatgcaaagaaagccaaacaagagccggaggtgaacggaggcagtggggatgctgtccccagtggaaatgaagtttcggaaaacatggaggaggaggctgagaatcaggctgaaagccgggcagcagtggaggggacagtggaggctggagctacagttgaaagcactgcatgttaagagggggcacagccctcctcccaagggaaagtgtttttgtatataatgtattttttcacttttggaggattctttttgtataacttcaataaagattgtaagcaaa

SEQ ID NO: 301979 - DNA, 1373 bp, Homo sapiens
acggagggtatgggtggtgagtcctggccctttaaacccgagggggaggatccggaagtggatgggcggggcgaagggtcctcgtatataaaagggccccggccgcgcggggtctctaatctgccattttctgtccctgagtgagtctctggcgtcccaaattgcctgtttttctcgcaggctctattccgttcgctggttcgccacctcaggggaacgatggccatggagtccacagccactgccgccgtcgccgcggagctggtttctgccgacaaaattgaagatgttcctgctccttctacatctgcagataaagtggagagaaactgaaggctcggaagaggatgataaagaaaatgataagactgaagaaatgccaaatgattcagtccttgaaaacaagtctcttcaagaaaatgaggaggaggagattgggaacctagagcttgcctgggatatgctggatttagcaaagatcatttttaaaaggcaagaaacaaaagaagcacagctttatgctgcccaggcacatcttaaactcggagaagttagtgttgaatctgaaaactatgtgcaagctgtggaggagttccagtcctgccttaacctgcaggaacagtacctggaagcccacgaccgtctccttgcagagacccactaccagctgggcttggcttatgggtacaactctcagtatgatgaggcagtggcacagttcagcaaatctattgaagtcattgagaacagaatggctgtactaaacgagcaggtgaaggaggctgaaggatcgtctgctgaatacaagaaagaaattgaggaactaaaggaactgctacccgaaattagagagaagatagaagatgcaaaggagtctcagcgtagtgggaatgtagctgaactggctctgaaagctactctggtggagagttctacttcaggtttcactcctggtggaggaggctcttcagtctccatgattgccagtagaaagccaacagacggtgcttcctcatcaaattgtgtgactgatatttcccaccttgtcagaaagaagaggaaaccagaggaagagagtccccggaaagatgatgcaaagaaagccaaacaagagccggaggtgaacggaggcagtggggatgctgtccccagtggaaatgaagtttcggaaaacatggaggaggaggctgagaatcaggctgaaagccgggcagcagtggaggggacagtggaggctggagctacagttgaaagcactgcatgttaagagggggcacagccctcctcccaagggaaagtgtttttgtatataatgtattttttcacttttggaggattctttttgtataacttcaataaagattgtaagcaaa

SEQ ID NO: 301980 - DNA, 2833 bp, Homo sapiens
acggagggtatgggtggtgagtcctggccctttaaacccgagggggaggatccggaagtggatgggcggggcgaagggtcctcgtatataaaagggccccggccgcgcggggtctctaatctgccattttctgtccctgagtgagtctctggcgtcccaaattgcctgtttttctcgcaggctctattccgttcgctggttcgccacctcaggggaacgatggccatggagtccacagccactgccgccgtcgccgcggagctggtttctgccgacaaaattgaagatgttcctgctccttctacatctgcagataaagtggagagtctggatgtggatagtgaagctaagaaactattgggtttaggacagaaacatctggtgatgggggatattccagcagctgtcaatgcattccaggaagcagctagtcttttaggtaagaagtatggagagacagctaatgagtgtggagaagccttctttttctatgggaaatcacttctggagttggcaagaatggagaatggtgtgttgggaaacgccttggaaggtgtgcatgtggaagaggaagaaggagaaaaaacagaagatgaatctctggtagaaaataatgataacatagatgaggaagcaagggaagagttgagagaacaggtttatgacgccatgggagaaaaagaagaagccaaaaaaacagaagacaagtctttggcaaagcctgaaactgataaagaacaggacagtgaaatggagaagggtggaagagaagatatggatataagtaaatctgcagaggagccacaggaaaaagttgacttgactctagattggttaactgaaacctctgaagaggcaaaaggaggagcagcaccagaaggaccgaatgaagctgaggtcacttctgggaagccagaacaggaagtaccagatgctgaggaagaaaaatcagtttctggaactgatgtccaagaagagtgcagagaaaaaggaggtcaggagaagcagggagaggtaattgtgagcatagaggagaagccaaaagaagtttcagaagagcagcctgtggtgactctagaaaagcagggcactgcagtggaggtagaagcagagtctttagacccgacagtcaagccagtggatgtgggtggggacgagccagaggagaaggtagttacctctgaaaacgaggcaggaaaggcggttcttgaacaactggtaggtcaagaagtaccacctgctgaagagtcaccagaggtgacaacagaggctgcagaggcctcagctgtagaggctggatcagaagtctctgaaaagcctgggcaggaggctccagttctccctaaggatggtgcagtcaatggaccgtcagttgtaggagatcagactcctattgaaccacagacttctatagaaagactgacagaaacaaaagatggctcaggactagaggagaaggtcagggcaaagctggttcctagtcaggaggagactaagctgtctgtagaagagtctgaggcagctggagatggggttgataccaaggtagcccagggagctactgagaaatcacctgaagacaaagttcagatagctgctaatgaagagacacaagagagagaagaacagatgaaagagggtgaaggtaaccgggatatgcaagagctgcagtgggtggagtacattctggatttgactcactaattatgggtaaaagtcagccttccattcaggattttccgtctgcctttggattaggaaagggctaaatgaaaaggggggtagtttaacaaggtcgtgatagtcaagtaagttcaatcaaaagcagcaagtcttctttagctggcttataaactaacacttttactaactgcaaaataggccttctgtgtgatttctgagacttggctagctatcagtaacttgttgcagcatactagccaataaagtgggatggaaaaggtagatgaggggtggggtaggtagggaaatagtgggctaggctggcagagaatgctgaatggatgttcacttgcatgcctctggattttaaaattattgttcacatgactccttttctgtgcgttgggaagcagctacagagcagtagaatccactgaattggtacactgaagcaggcatgccatttaaatgaaggcagttaaccttgactgttgtatcaccagagttaaagaattctggtgcccctctttaagtcttcaggaagtgtttagaggcttattcacattagttaaaacaggccccccccaccttccccaaggcaacagaaaacataaccattagctctcttcctgttttccttcctcatttcatgcttgcttcggctgctaaactgaatttttgttacttagaatattataaagtgtggatgctttctataatgctattggtctaagtgtgattaaatttcattaaggtgtataagcctctaattattacataactggcacgtctgacttttgctatcatttgaggattctactgtatataagtttcatctaacattggcattaataaccacaggtatattccaactaattgttacttcttgtaattgccagactacttcaagagttctcgtaagttttagattttcagagacccatcttcaatactttgaactcattctggtaaacttccttctacctatgtgcaggtccctgtactccagccaacacaggctcagtaactggaaatgaattggctaaaatggtagcaccattgggtttcttaatggagctttaggagttctttatggaaaaaagcacagaactaaattcctcaaaaaacaaacaaacaaaaccacacacac

SEQ ID NO: 301981 - DNA, 2779 bp, Homo sapiens
acggagggtatgggtggtgagtcctggccctttaaacccgagggggaggatccggaagtggatgggcggggcgaagggtcctcgtatataaaagggccccggccgcgcggggtctctaatctgccattttctgtccctgagtgagtctctggcgtcccaaattgcctgtttttctcgcaggctctattccgttcgctggttcgccacctcaggggaacgatggccatggagtccacagccactgccgccgtcgccgcggagctggtttctgccgacaaaattgaagatgttcctgctccttctacatctgcagataaagtggagagtctggatgtggatagtgaagctaagaaactattgggtttaggacagaaacatctggtgatgggggatattccagcagctgtcaatgcattccaggaagcagctagtcttttaggtaagaagtatggagagacagctaatgagtgtggagaagccttctttttctatgggaaatcacttctggagttggcaagaatggagaatggtgtgttgggaaacgccttggaaggtgtgcatgtggaagaggaagaaggagaaaaaacagaagatgaatctctggtagaaaataatgataacatagatgaggaagcaagggaagagttgagagaacaggtttatgacgccatgggagaaaaagaagaagccaaaaaaacagaagacaagtctttggcaaagcctgaaactgataaagaacaggacagtgaaatggagaagggtggaagagaagatatggatataagtaaatctgcagaggagccacaggaaaaagttgacttgactctagattggttaactgaaacctctgaagaggcaaaaggaggagcagcaccagaaggaccgaatgaagctgaggtcacttctgggaagccagaacaggaagtaccagatgctgaggaagaaaaatcagtttctggaactgatgtccaagaagagtgcagagaaaaaggaggtcaggagaagcagggagaggtaattgtgagcatagaggagaagccaaaagaagtttcagaagagcagcctgtggtgactctagaaaagcagggcactgcagtggaggtagaagcagagtctttagacccgacagtcaagccagtggatgtgggtggggacgagccagaggagaaggtagttacctctgaaaacgaggcaggaaaggcggttcttgaacaactggtaggtcaagaagtaccacctgctgaagagtcaccagaggtgacaacagaggctgcagaggcctcagctgtagaggctggatcagaagtctctgaaaagcctgggcaggaggctccagttctccctaaggatggtgcagtcaatggaccgtcagttgtaggagatcagactcctattgaaccacagacttctatagaaagactgacagaaacaaaagatggctcaggactagaggagaaggtcagggcaaagctggttcctagtcaggaggagactaagctgtctgtagaagagtctgaggcagctggagatggggttgataccaaggtagcccagggagctactgagaaatcacctgaagacaaagttcagatagctgctaatgaagagacacaagagagagaagaacagatgaaagagggtgaaggtaaccgggatatgcaagagctgcagtgggtggagtacattctggatttgactcactaattatgggtaaaagtcagccttccattcaggattttccgtctgcctttggattaggaaagggctaaatgaaaaggggggtagtttaacaaggtcgtgatagtcaagtaagttcaatcaaaagcagcaagtcttctttagctggcttataaactaacacttttactaactgcaaaataggccttctgtgtgatttctgagacttggctagctatcagtaacttgttgcagcatactagccaataaagtgggatggaaaaggtagatgaggggtggggtaggtagggaaatagtgggctaggctggcagagaatgctgaatggatgttcacttgcatgcctctggattttaaaattattgttcacatgactccttttctgtgcgttgggaagcagctacagagcagtagaatccactgaattggtacactgaagcaggcatgccatttaaatgaaggcagttaaccttgactgttgtatcaccagagttaaagaattctggtgcccctctttaagtcttcaggaagtgtttagaggcttattcacattagttaaaacaggccccccccaccttccccaaggcaacagcggctgctaaactgaatttttgttacttagaatattataaagtgtggatgctttctataatgctattggtctaagtgtgattaaatttcattaaggtgtataagcctctaattattacataactggcacgtctgacttttgctatcatttgaggattctactgtatataagtttcatctaacattggcattaataaccacaggtatattccaactaattgttacttcttgtaattgccagactacttcaagagttctcgtaagttttagattttcagagacccatcttcaatactttgaactcattctggtaaacttccttctacctatgtgcaggtccctgtactccagccaacacaggctcagtaactggaaatgaattggctaaaatggtagcaccattgggtttcttaatggagctttaggagttctttatggaaaaaagcacagaactaaattcctcaaaaaacaaacaaacaaaaccacacacac

SEQ ID NO: 301982 - DNA, 1824 bp, Homo sapiens
acggagggtatgggtggtgagtcctggccctttaaacccgagggggaggatccggaagtggatgggcggggcgaagggtcctcgtatataaaagggccccggccgcgcggggtctctaatctgccattttctgtccctgagtgagtctctggcgtcccaaattgcctgtttttctcgcaggctctattccgttcgctggttcgccacctcaggggaacgatggccatggagtccacagccactgccgccgtcgccgcggagctggtttctgccgacaaaattgaagatgttcctgctccttctacatctgcagataaagtggagagtctggatgtggatagtgaagctaagaaactattgggtttaggacagaaacatctggtgatgggggatattccagcagctgtcaatgcattccaggaagcagctagtcttttaggtaagaagtatggagagacagctaatgagtgtggagaagccttctttttctatgggaaatcacttctggagttggcaagaatggagaatggtgtgttgggaaacgccttggaaggtgtgcatgtggaagaggaagaaggagaaaaaacagaagatgaatctctggtagaaaataatgataacatagatgaggaagcaagggaagagttgagagaacaggtttatgacgccatgggagaaaaagaagaagccaaaaaaacagaagacaagtctttggcaaagcctgaaactgataaagaacaggacagtgaaatggagaagggtggaagagaagatatggatataagtaaatctgcagaggagccacaggaaaaagttgacttgactctagattggttaactgaaacctctgaagaggcaaaaggaggagcagcaccagaaggaccgaatgaagctgaggtcacttctgggaagccagaacaggaagtaccagatgctgaggaagaaaaatcagtttctggaactgatgtccaagaagagtgcagagaaaaaggaggtcaggagaagcagggagaggtaattgtgagcatagaggagaagccaaaagaagtttcagaagagcagcctgtggtgactctagaaaagcagggcactgcagtggaggtagaagcagagtctttagacccgacagtcaagccagtggatgtgggtggggacgagccagaggagaaggtagttacctctgaaaacgaggcaggaaaggcggttcttgaacaactggtaggtcaagaagtaccacctgctgaagagtcaccagaggtgacaacagaggctgcagaggcctcagctgtagaggctggatcagaagtctctgaaaagcctgggcaggaggctccagttctccctaaggatggtgcagtcaatggaccgtcagttgtaggagatcagactcctattgaaccacagacttctatagaaagactgacagaaacaaaagatggctcaggactagaggagaaggtcagggcaaagctggttcctagtcaggaggagactaagctgtctgtagaagagtctgaggcagctggagatggggttgataccaaggtagcccagggagctactgagaaatcacctgaagacaaagttcagatagctgctaatgaagagacacaagagagagaagaacagatgaaagagggtgaagaaactgaaggctcggaagaggatgataaagaaaatgataagactgaagaaatgccaaatgattcagtccttgaaaacaagtctcttcaagaaatgaggaggagagattggacctagactcctggatatctggattagcaaggtcattttaaaggcaggacaaagagcccactttatctc

SEQ ID NO: 301983 - DNA, 1520 bp, Homo sapiens
acggagggtatgggtggtgagtcctggccctttaaacccgagggggaggatccggaagtggatgggcggggcgaagggtcctcgtatataaaagggccccggccgcgcggggtctctaatctgccattttctgtccctgagtgagtctctggcgtcccaaattgcctgtttttctcgcaggctctattccgttcgctggttcgccacctcaggggaacgatggccatggagtccacagccactgccgccgtcgccgcggagctggtttctgccgacaaaattgaagatgttcctgctccttctacatctgcagataaagtggagagtctggatgtggatagtgaagctaagaaactattgggtttaggacagaaacatctggtgatgggggatattccagcagctgtcaatgcattccaggaagcagctagtcttttaggtaagaagtatggagagacagctaatgagtgtggagaagccttctttttctatgggaaatcacttctggagttggcaagaatggagaatggtgtgttgggaaacgccttggaaggtgtgcatgtggaagaggaagaaggagattgggaacctagagcttgcctgggatatgctggatttagcaaagatcatttttaaaaggcaagaaacaaaagaagcacagctttatgctgcccaggcacatcttaaactcggagaagttagtgttgaatctgaaaactatgtgcaagctgtggaggagttccagtcctgccttaacctgcaggaacagtacctggaagcccacgaccgtctccttgcagagacccactaccagctgggcttggcttatgggtacaactctcagtatgatgaggcagtggcacagttcagcaaatctattgaagtcattgagaacagaatggctgtactaaacgagcaggtgaaggaggctgaaggatcgtctgctgaatacaagaaagaaattgaggaactaaaggaactgctacccgaaattagagagaagatagaagatgcaaaggagtctcagcgtagtgggaatgtagctgaactggctctgaaagctactctggtggagagttctacttcaggtttcactcctggtggaggaggctcttcagtctccatgattgccagtagaaagccaacagacggtgcttcctcatcaaattgtgtgactgatatttcccaccttgtcagaaagaagaggaaaccagaggaagagagtccccggaaagatgatgcaaagaaagccaaacaagagccggaggtgaacggaggcagtggggatgctgtccccagtggaaatgaagtttcggaaaacatggaggaggaggctgagaatcaggctgaaagccgggcagcagtggaggggacagtggaggctggagctacagttgaaagcactgcatgttaagagggggcacagccctcctcccaagggaaagtgtttttgtatataatgtattttttcacttttggaggattctttttgtataacttcaataaagattgtaagcaaa

SEQ ID NO: 301984 - DNA, 1023 bp, Homo sapiens
  misc_feature (25)..(25): n is a, c, g, or t
gttaggctaggtacgaggcggtgtnaatcggcacgaggtcagtccttgaaaacaagtctcttcaagaaaatgaggaggaggagattgggaacctagagcttgcctgggatatgctggatttagcaaagatcatttttaaaaggcaagaaacaaaagaagcacagctttatgctgcccaggcacatcttaaactcggagaagttagtgttgaatctgaaaactatgtgcaagctgtggaggagttccagtcctgccttaacctgcaggaacagtacctggaagcccacgaccgtctccttgcagagacccactaccagctgggcttggcttatgggtacaactctcagtatgatgaggcagtggcacagttcagcaaatctattgaagtcattgagaacagaatggctgtactaaacgagcaggtgaaggaggctgaaggatcgtctgctgaatacaagaaagaaattgaggaactaaaggaactgctacccgaaattagagagaagatagaagatgcaaaggagtctcagcgtagtgggaatgtagctgaactggctctgaaagctactctggtggagagttctacttcaggtttcactcctggtggaggaggctcttcagtctccatgattgccagtagaaagccaacagacggtgcttcctcatcaaattgtgtgactgatatttcccaccttgtcagaaagaagaggaaaccagaggaagagagtccccggaaagatgatgcaaagaaagccaaacaagagccggaggtgaacggaggcagtggggatgctgtccccagtggaaatgaagtttcggaaaacatggaggaggaggctgagaatcaggctgaaagccgggcagcagtggaggggacagtggaggctggagctacagttgaaagcactgcatgttaagagggggcacagccctcctcccaagggaaagtgtttttgtatataatgtattttttcacttttggaggattctttttgtataacttcaataaagattgtaagcaaa

SEQ ID NO: 301985 - DNA, 1629 bp, Homo sapiens
  misc_feature (25)..(25): n is a, c, g, or t
gttaggctaggtacgaggcggtgtnaatcggcacgaggtcagtccttgaaaacaagtctcttcaagaaaatgaggaggaggagattgggaacctagagcttgcctgggatatgctggatttagcaaagatcatttttaaaaggcaagaaacaaaagaagcacagctttatgctgcccaggcacatcttaaactcggagaagttagtgttgaatctgaaaactatgtgcaagctgtggaggagttccagtcctgccttaacctgcaggaacagtacctggaagcccacgaccgtctccttgcagagacccactaccagctgggcttggcttatgggtacaactctcagtatgatgaggcagtggcacagttcagcaaatctattgaagtcattgagaacagaatggctgtactaaacgagcaggtgaaggaggctgaaggatcgtctgctgaatacaagaaagaaattgaggaactaaaggaactgctacccgaaattagagagaagatagaagatgcaaaggagtctcagcgtagtgggaatgtagctgaactggctctgaaagctactctggtggagagttctacttcaggtttcactcctggtggaggaggctcttcagtctccatgattgccagtagaaagccaacagacggtgcttcctcatcaaattgtgtgactgatatttcccaccttgtcagaaagaagaggaaaccagaggaagagagtccccggaaagatgatgcaaagaaagccaaacaagagccggaggtgaacggaggcagtggggatgctgtccccagtggaaatgaagtttcggaaaacatggaggaggaggctggagctacagttgaaagcactgcatgttaagagggggcacagccctcctcccaagggaaagtgtttttgtatataatgtattttttcacttttggaggattctttttgtataacttcaataaagattgtaagcaaaggttgaggctttgatggtttttttcttaattattggctgaatctgccttggagcactgctggttttatatattagccaaaggttttgttctggccttctgtactgatctgtgttcctgatcctaattcctatctgtctaacgtggaggtgatcaagtgtggctgtaggcctttgttttccaatggtgctatattctgttttcaaacacttcactgaacccagctgtcttgcaaactttcagtggtgctgtccctggatgggggctacaaaaacaagaattggtgaagatcttgctcttcagtgctgaaaatggatgatggactttggctgtgagccaggcctaggatggttcttgtcctatatccacctagtcttcacctggggctataattctgtcctggaaaaagaactctgaaaacctgggtcaggggaatgattcctaaggaaaacggtctgcatttgagctctggtttgaaagtagccaaggggactgatggtggacactccagatgtggttggaagcatatgtggggaggctggctggttgagttttgttattttctgtatagaaaggttgagatatatcaacacttggaattgttacccatctgcagaattgacttctcaaataaagatgctaaaaatcaaaaaaac

SEQ ID NO: 301986 - DNA, 718 bp, Homo sapiens
acggagggtatgggtggtgagtcctggccctttaaacccgagggggaggatccggaagtggatgggcggggcgaagggtcctcgtatataaaagggccccggccgcgcggggtctctaatctgccattttctgtccctgagtgagtctctggcgtcccaaattgcctgtttttctcgcaggctctattccgttcgctggttcgccacctcaggggaacgatggccatggagtccacagccactgccgccgtcgccgcggagctggtttctgccgacaaaattgaagatgttcctgctccttctacatctgcagataaagtggagagtctggatgtggatagtgaagctaagaaactattgggtttaggacagaaacatctggtgatgggggatattccagcagctgtcaatgcattccaggaagcagctagtcttttaggtaagaagtatggagagacagctaatgagtgtggagaagccttctttttctatgggaaatcacttctggagttggcaagaatggagaatggtgtgttgggaaacgccttggaaggtgtgcatgtggaagaggaagaaggagaaaaaacagaagatgaatctctggtagaaaataatgataacatagatgggtatgtggagttgcatgtgacattcaagagatgcgacgttgtatatttcttgtatacagtggtggaaacggggctctacctgtcctgga

SEQ ID NO: 301987 - DNA, 656 bp, Homo sapiens
acggagggtatgggtggtgagtcctggccctttaaacccgagggggaggatccggaagtggatgggcggggcgaagggtcctcgtatataaaagggccccggccgcgcggggtctctaatctgccattttctgtccctgagtgagtctctggcgtcccaaattgcctgtttttctcgcaggctctattccgttcgctggttcgccacctcaggggaacgatggccatggagtccacagccactgccgccgtcgccgcggagctggtttctgccgacaaaattgaagatgttcctgctccttctacatctgcagataaagtggagagtctggatgtggatagtgaagctaagaaactattgggtttaggacagaaacatctggtgatgggggatattccagcagctgtcaatgcattccaggaagcagctagtcttttaggtaagaagtatggagagacagctaatgagtgtggagaagccttctttttctatgggaaatcacttctggagttggcaagaatggagaatggtgtgttgggaaacgccttggaaggtgtgcatgtggaagaggaagaaggagaaaaaacagaagatgaatctctggtagaaaataatgataacatagatggaaaccagcaccggtaccgagctcgatc

SEQ ID NO: 301988 - DNA, 1186 bp, Homo sapiens
ccgggagcccttaaccctccgggagcccttaaccctccgggagcccttaaccctccgggagcccttaaccctccgggagcccttaaccctccgggagcccttaaccctccgggagcccttaaccctccggagcccttacccctaaggaaatgttttgcagttgtctttttaaaaacattaagcacatttgtgaagccttcacaattatatctttagaggaaaccagaggaagagagtccccggaaagatgatgcaaagaaagccaaacaagagccggaggtgaacggaggcagtggggatgctgtccccagtggaaatgaagtttcggaaaacatggaggaggaggctgagaatcaggctgaaagccgggcagcagtggaggggacagtggaggctggagctacagttgaaagcactgcatgttaagagggggcacagccctcctcccaagggaaagtgtttttgtatataatgtattttttcacttttggaggattctttttgtataacttcaataaagattgtaagcaaaggttgaggctttgatggtttttttcttaattattggctgaatctgccttggagcactgctggttttatatattagccaaaggttttgttctggccttctgtactgatctgtgttcctgatcctaattcctatctgtctaacgtggaggtgatcaagtgtggctgtaggcctttgttttccaatggtgctatattctgttttcaaacacttcactgaacccagctgtcttgcaaactttcagtggtgctgtccctggatgggggctacaaaaacaagaattggtgaagatcttgctcttcagtgctgaaaatggatgatggactttggctgtgagccaggcctaggatggttcttgtcctatatccacctagtcttcacctggggctataattctgtcctggaaaaagaactctgaaaacctgggtcaggggaatgattcctaaggaaaacggtctgcatttgagctctggtttgaaagtagccaaggggactgatggtggacactccagatgtggttggaagcatatgtggggaggctggctggttgagttttgttattttctgtatagaaaggttgagatatatcaacacttggaattgttacccatctgcagaattgacttctcaaataaagatgctaaaaatcaaaaaaac

SEQ ID NO: 301989 - DNA, 1160 bp, Homo sapiens
acagtttggttatgggagtataggatgactcactgacaaatggaacctgtatattataggtccctcgatgaatatatgagaaggcacttgatgggcaaaaccattaggtcacttccttccacgtgatgattattggctctgtcagccccattatcacagagtattcaagaaatactttgtggtcactgccctcttaatatagggagcaaagcagagtttgggtgacttgtatatgcttcctatgactgaggcctcagttatataagacagaatggcttaaactaggctcactgatgcccaggttctgtttgtcttccaggctgagaatcaggctgaaagccgggcagcagtggaggggacagtggaggctggagctacagttgaaagcactgcatgttaagagggggcacagccctcctcccaagggaaagtgtttttgtatataatgtattttttcacttttggaggattctttttgtataacttcaataaagattgtaagcaaaggttgaggctttgatggtttttttcttaattattggctgaatctgccttggagcactgctggttttatatattagccaaaggttttgttctggccttctgtactgatctgtgttcctgatcctaattcctatctgtctaacgtggaggtgatcaagtgtggctgtaggcctttgttttccaatggtgctatattctgttttcaaacacttcactgaacccagctgtcttgcaaactttcagtggtgctgtccctggatgggggctacaaaaacaagaattggtgaagatcttgctcttcagtgctgaaaatggatgatggactttggctgtgagccaggcctaggatggttcttgtcctatatccacctagtcttcacctggggctataattctgtcctggaaaaagaactctgaaaacctgggtcaggggaatgattcctaaggaaaacggtctgcatttgagctctggtttgaaagtagccaaggggactgatggtggacactccagatgtggttggaagcatatgtggggaggctggctggttgagttttgttattttctgtatagaaaggttgagatatatcaacacttggaattgttacccatctgcagaattgacttctcaaataaagatgctaaaaatcaaaaaaac

SEQ ID NO: 301990 - DNA, 103 bp, Homo sapiens
tccaaaagttttaaaaaatgaaactattgctcaaatgtagcaggtattcaaaaaatactgatttaaacagtacttgacactagaaaaaatcttttttttgcag

SEQ ID NO: 301991 - DNA, 458 bp, Homo sapiens
gtttgggaaatagtatggtcctattacaaatggaatgcatataggtcttgttcttttgacaagagacatgcttttcaggcggctggatggaggaatatgcttatttccttcagtgctcttgcagtcttaatttatattactaaagttttgatcattgcttccttgaatatacatagttttgtattgcctgcgcttggcttacacttcttgcttttataatataggactgtattttctgtcttagaaaaaattgctaggttctagccatcaaacctttggtgctttcttttgttctcctagaatggagaatggtgtgttgggaaacgccttggaaggtgtgcatgtggaagaggaagaaggagaaaaaacagaagatgaatctctggtagaaaataatgataacatagatgggtatgtggagttgcatgtgacattcaagagatgcgacgttgtatatt

SEQ ID NO: 301992 - DNA, 3131 bp, Homo sapiens
  misc_feature (13)..(13): n is a, c, g, or t
  misc_feature (96)..(96): n is a, c, g, or t
ggggggggggccncccccccaaaatcccccccgggaaaaaagggtgggttcccgggaaaaaggaaacgaaaccgggaaaggttggccccccccggngatggggaggctgccaaacccgcgctggggaaagggccgcctccgggcgccccatcccgctgcggacggaggtgaggttggagcgagcgctggcggaagagaggctcagcgcagggggcgcagagccggcgctggccaatatgcgccgcatgtgatacctttgagggcgcggcgggggagggtagcgtcaaatttcaaaaaaaaaaaaaaaccaaacccacacagccccggcgggcgggcgcgcgcgatgggcgccctttggctgcgggagcgagtggaggatgctgggaaggaggtaaaatggccaccggcggcggcgcggaggaagagaggaaacgggggcggccgcagcttctgccccccgcgcggcccgcggcccggggcgaggaggccgacggcggccgcgagaagatgggctgggcccaggtggtgaagaatctagccgagaagaagggcgaattccgcgagccgcggccgccgcggcgggaggaggaaagcggcggcggtggagggagcgccgggctcggcggccccgcgggcctggcggcgccggacctcggcgacttcccaccggctggccgcggggatccgaagggccgtcggagagatccggccggcgaggcggtggacccccgcaaaaagaagggcgctgcggaggcgggcaggaggaagaaggccgaggcggcggcggccgccatggcgaccccggccaggcccggcgaggccgaggacgcggccgagcggcccctccaggatgagccggcggcggcggcaggcccgggcaagggtcgcttcctcgtccgcatctgtttccagggagacgagggcgcctgcccgacccgggacttcgtggtaggagcgcttatcctgcgctccatcggcatggacccgagcgacatctacgcggtcatccagatcccgggcagccgcgaattcgacgtgagcttccgctcagcggagaagctggccctgttcctacgcgtctacgaggagaagcgggagcaggaggactgctgggagaactttgtggtgctggggcggagcaagtccagcttgaagacgctcttcatcctcttccggaacgagacggtggacgtggaggacattgtgacttggctcaagcgccactgcgacgtgctggccgtgccggtgaaagtgaccgacaggtttgggatctggaccggggagtacaaatgcgagatcgagctgcgccagggggagggcggggtcaggcacttgccaggggccttcttcctgggggccgagaggggctacagctggtacaaggggcagcccaagacatgctttaaatgtggttcccggacccacatgagcggcagctgcacgcaggacaggtgcttcaggtgcggggaggaggggcacctgagcccttactgccggaagggcatcgtgtgcaacctctgtggcaagcgaggacacgcctttgcccagtgtcccaaagcagtgcacaattccgtggcagctcagctaaccggcgtggccgggcactaaacacccgcctgcctgccagggtgaacacacagccagcttacccctcttaagtgccaaaacttttttttaaaccattttttatcgtttttgaaggagatctttttaaaacctacaagagacatctctctatgccttcttaaaccgagtttactccatttcagcctgttctgaattggtgactctgtcaccaataacgactgcggagaactgtagcgtgcagatgtgttgcccctcccttttaaaattttattttcgtttttctattgggtatttgttttgtttcttgtactttttctctctctccttgcccccctcccgccctccccgccccataccttttcttcccctggattttcaccctttgggctgccttgctcatctttatgccccagcactaggtacggggcccaacacgtggtaggcactccatcagtgtttgctgaattgaaaacattgttgactgtggcttctatcagagtgtctaccttttgcagctcttcccctccctcatttaatttgctgcttttaatctacgtggtctgagaatttgtgaaaccagtgttgttagaagtgtatataatctgaatcaataagctctgaatggtggccaagggcctctcttatggcacaaagatgcatggacttcatgacagctcttttggtggctcagaagccattttttatagaatcatggaatctagaatattcctgctggaaagaacctgagagttggtttggaccaattccctggttttccagcagatgaaacaggcccaaagaggttaaatgactgggtgaaaatcacatagctgtctggtgccagagccagcctatagtagagtcccctgaccccaagcccggtgctcattccactacctctcacacttcacaacaatttcctcaacacttgagggcccagaaagtctgatctctccagaatgatcagcccagaggaatgctgagaaatcacctggaggagggagcagaaagagaaggtttttaaggaggggcttctgaatacttgggagatacggaacggaccaaggaccacactccagggtgcattcgttgctccctggggcaccacttctggattacagtgtgccaggtcctttggaggccctaccccttccccattcattgccaccagtgagaaatgggggtgcccctgtgtaaagaaacctaccaaaggtttacatttgcaccttagcctcaatagctacgaaccctagagaagcagctagctggagctcatgtgcaactcctgattctcaggagaaagatggattttaacccaaaattatgagtgagctgttaactctaaaatgtacttgggagataggccaagcgagaggtcatgggccaactaagtgttatccagtagaaaagacagtacactgcttttcttttagtgtttgcttttcctttgctatatgttttgctatttccttgtggcttagaatgtaaaattgattgttaaaagttttgttctgaataaatatttatcttttgtattgctaaaa

SEQ ID NO: 301993 - DNA, 3297 bp, Homo sapiens
tgtgacagagtaaaattttaatgataaaaagttaatggtaaaatgttcactgtaaaactttcaacttttcttcttgaaaacgtgcataatccgacgtgggaaaaaaaataacgcattgcagtcagttctggggaaacggaaagctaagttttaattttgctattgcttttgcttttttaacagaaaaggtacaaaaaagaaaaaatgggagagatgttgccgaactccgtcccgcctgtgggctgtgggccgttagcaaagctgctagcatgaaatcgtcgagcaccgcttgcgaaacgccaaatcctcgagagcgaggccggaggctgccaaacccgcgctggggaaagggccgcctccgggcgccccatcccgctgcggacggaggtgaggttggagcgagcgctggcggaagagaggctcagcgcagggggcgcagagccggcgctggccaatatgcgccgcatgtgatacctttgagggcgcggcgggggagggtagcgtcaaatttcaaaaaaaaaaaaaaaccaaacccacacagccccggcgggcgggcgcgcgcgatgggcgccctttggctgcgggagcgagtggaggatgctgggaaggaggtaaaatggccaccggcggcggcgcggaggaagagaggaaacgggggcggccgcagcttctgccccccgcgcggcccgcggcccggggcgaggaggccgacggcggccgcgagaagatgggctgggcccaggtggtgaagaatctagccgagaagaagggcgaattccgcgagccgcggccgccgcggcgggaggaggaaagcggcggcggtggagggagcgccgggctcggcggccccgcgggcctggcggcgccggacctcggcgacttcccaccggctggccgcggggatccgaagggccgtcggagagatccggccggcgaggcggtggacccccgcaaaaagaagggcgctgcggaggcgggcaggaggaagaaggccgaggcggcggcggccgccatggcgaccccggccaggcccggcgaggccgaggacgcggccgagcggcccctccaggatgagccggcggcggcggcaggcccgggcaagggtcgcttcctcgtccgcatctgtttccagggagacgagggcgcctgcccgacccgggacttcgtggtaggagcgcttatcctgcgctccatcggcatggacccgagcgacatctacgcggtcatccagatcccgggcagccgcgaattcgacgtgagcttccgctcagcggagaagctggccctgttcctacgcgtctacgaggagaagcgggagcaggaggactgctgggagaactttgtggtgctggggcggagcaagtccagcttgaagacgctcttcatcctcttccggaacgagacggtggacgtggaggacattgtgacttggctcaagcgccactgcgacgtgctggccgtgccggtgaaagtgaccgacaggtttgggatctggaccggggagtacaaatgcgagatcgagctgcgccagggggagggcggggtcaggcacttgccaggggccttcttcctgggggccgagaggggctacagctggtacaaggggcagcccaagacatgctttaaatgtggttcccggacccacatgagcggcagctgcacgcaggacaggtgcttcaggtgcggggaggaggggcacctgagcccttactgccggaagggcatcgtgtgcaacctctgtggcaagcgaggacacgcctttgcccagtgtcccaaagcagtgcacaattccgtggcagctcagctaaccggcgtggccgggcactaaacacccgcctgcctgccagggtgaacacacagccagcttacccctcttaagtgccaaaacttttttttaaaccattttttatcgtttttgaaggagatctttttaaaacctacaagagacatctctctatgccttcttaaaccgagtttactccatttcagcctgttctgaattggtgactctgtcaccaataacgactgcggagaactgtagcgtgcagatgtgttgcccctcctttttctctctctccttgcccccctcccgccctccccgccccataccttttcttcccctggattttcaccctttgggctgccttgctcatctttatgccccagcactaggtacggggcccaacacgtggtaggcactccatcagtgtttgctgaattgaaaacattgttgactgtggcttctatcagagtgtctaccttttgcagctcttcccctccctcatttaatttgctgcttttaatctacgtggtctgagaatttgtgaaaccagtgttgttagaagtgtatataatctgaatcaataagctctgaatggtggccaagggcctctcttatggcacaaagatgcatggacttcatgacagctcttttggtggctcagaagccattttttatagaatcatggaatctagaatattcctgctggaaagaacctgagagttggtttggaccaattccctggttttccagcagatgaaacaggcccaaagaggttaaatgactgggtgaaaatcacatagctgtctggtgccagagccagcctatagtagagtcccctgaccccaagcccggtgctcattccactacctctcacacttcacaacaatttcctcaacacttgagggcccagaaagtctgatctctccagaatgatcagcccagaggaatgctgagaaatcacctggaggagggagcagaaagagaaggtttttaaggaggggcttctgaatacttgggagatacggaacggaccaaggaccacactccagggtgcattcgttgctccctggggcaccacttctggattacagtgtgccaggtcctttggaggccctaccccttccccattcattgccaccagtgagaaatgggggtgcccctgtgtaaagaaacctaccaaaggtttacatttgcaccttagcctcaatagctacgaaccctagagaagcagctagctggagctcatgtgcaactcctgattctcaggagaaagatggattttaacccaaaattatgagtgagctgttaactctaaaatgtacttgggagataggccaagcgagaggtcatgggccaactaagtgttatccagtagaaaagacagtacactgcttttcttttagtgtttgcttttcctttgctatatgttttgctatttccttgtggcttagaatgtaaaattgattgttaaaagttttgttctgaataaatatttatcttttgtattgctaaaa

SEQ ID NO: 301994 - DNA, 2919 bp, Homo sapiens
tgtgacagagtaaaattttaatgataaaaagttaatggtaaaatgttcactgtaaaactttcaacttttcttcttgaaaacgtgcataatccgacgtgggaaaaaaaataacgcattgcagtcagttctggggaaacggaaagctaagttttaattttgctattgcttttgcttttttaacagaaaaggtacaaaaaagaaaaaatgggagagatgttgccgaactccgtcccgcctgtgggctgtgggccgttagcaaagctgctagcatgaaatcgtcgagcaccgcttgcgaaacgccaaatcctcgagagcgaggccggaggctgccaaacccgcgctggggaaagggccgcctccgggcgccccatcccgctgcggacggaggtgaggttggagcgagcgctggcggaagagaggctcagcgcagggggcgcagagccggcgctggccaatatgcgccgcatgtgatacctttgagggcgcggcgggggagggtagcgtcaaatttcaaaaaaaaaaaaaaaccaaacccacacagccccggcgggcgggcgcgcgcgatgggcgccctttggctgcgggagcgagtggaggatgctgggaaggaggtaaaatggccaccggcggcggcgcggaggaagagaggaaacgggggcggccgcagcttctgccccccgcgcggcccgcggcccggggcgaggaggccgacggcggccgcgagaagatgggctgggcccaggtggtgaagaatctagccgagaagaagggcgaattccgcgagccgcggccgccgcggcgggaggaggaaagcggcggcggtggagggagcgccgggctcggcggccccgcgggcctggcggcgccggacctcggcgacttcccaccggctggccgcggggatccgaagggccgtcggagagatccggccggcgaggcggtggacccccgcaaaaagaagggcgctgcggaggcgggcaggaggaagaaggccgaggcggcggcggccgccatggcgaccccggccaggcccggcgaggccgaggacgcggccgagcggcccctccaggatgagccggcggcggcggcaggcccgggcaagggtcgcttcctcgtccgcatctgtttccagggagacgagggcgcctgcccgacccgggacttcgtggtaggagcgcttatcctgcgctccatcggcatggacccgagcgacatctacgcggtcatccagatcccgggcagccgcgaattcgacgtgagcttccgctcagcggagaagctggccctgttcctacgcgtctacgaggagaagcgggagcaggaggactgctgggagaactttgtggtgctggggcggagcaagtccagcttgaagacgctcttcatcctcttccggaacgagacggtggacgtggaggacattgtgacttggctcaagcgccactgcgacgtgctggccgtgccggtgaaagtgaccgacaggtttgggatctggaccggggagtacaaatgcgagatcgagctgcgccagggggagggcggggtcaggcacttgccaggggccttcttcctgggggccgagaggggctacagctggtacaaggggcagcccaagacatgctttaaatgtggttcccggacccacatgagcggcagctgcacgcaggacaggtgcttcaggtgcggggaggaggggcacctgagcccttactgccggaagggcatcgtgtgcaacctctgtggcaagcgaggacacgcctttgcccagtgtcccaaagcagtgcacaattccgtggcagctcagctaaccggcgtggccgggcactaaacacccgcctgcctgccagggtgaacacacagccagcttacccctcttaagtgccaaaacttttttttaaaccattttttatcgtttttgaaggagatctttttaaaacctacaagagacatctctctatgccttcttaaaccgagtttactccatttcagcctgttctgaattggtgactctgtcaccaataacgactgcggagaactgtagcgtgcagatgtgttgcccctcccttttaaaattttattttcgtttttctattgggtatttgttttgtttcttgtactttttctctctctccttgcccccctcccgccctccccgccccataccttttcttcccctggattttcaccctttgggctgccttgctcatctttatgccccagcactaggtacggggcccaacacgtggtaggcactccatcagtgtttgctgaattgaaaacattgttgactgtggcttctatcagagtgtctaccttttgcagctcttcccctccctcatttaatttgctgcttttaatctacgtggtctgagaatttgtgaaaccagtgttgttagaagtgtatataatctgaatacttgggagatacggaacggaccaaggaccacactccagggtgcattcgttgctccctggggcaccacttctggattacagtgtgccaggtcctttggaggccctaccccttccccattcattgccaccagtgagaaatgggggtgcccctgtgtaaagaaacctaccaaaggtttacatttgcaccttagcctcaatagctacgaaccctagagaagcagctagctggagctcatgtgcaactcctgattctcaggagaaagatggattttaacccaaaattatgagtgagctgttaactctaaaatgtacttgggagataggccaagcgagaggtcatgggccaactaagtgttatccagtagaaaagacagtacactgcttttcttttagtgtttgcttttcctttgctatatgttttgctatttccttgtggcttagaatgtaaaattgattgttaaaagttttgttctgaataaatatttatcttttgtattgctaaaa

SEQ ID NO: 301995 - DNA, 3351 bp, Homo sapiens
tgtgacagagtaaaattttaatgataaaaagttaatggtaaaatgttcactgtaaaactttcaacttttcttcttgaaaacgtgcataatccgacgtgggaaaaaaaataacgcattgcagtcagttctggggaaacggaaagctaagttttaattttgctattgcttttgcttttttaacagaaaaggtacaaaaaagaaaaaatgggagagatgttgccgaactccgtcccgcctgtgggctgtgggccgttagcaaagctgctagcatgaaatcgtcgagcaccgcttgcgaaacgccaaatcctcgagagcgaggccggaggctgccaaacccgcgctggggaaagggccgcctccgggcgccccatcccgctgcggacggaggtgaggttggagcgagcgctggcggaagagaggctcagcgcagggggcgcagagccggcgctggccaatatgcgccgcatgtgatacctttgagggcgcggcgggggagggtagcgtcaaatttcaaaaaaaaaaaaaaaccaaacccacacagccccggcgggcgggcgcgcgcgatgggcgccctttggctgcgggagcgagtggaggatgctgggaaggaggtaaaatggccaccggcggcggcgcggaggaagagaggaaacgggggcggccgcagcttctgccccccgcgcggcccgcggcccggggcgaggaggccgacggcggccgcgagaagatgggctgggcccaggtggtgaagaatctagccgagaagaagggcgaattccgcgagccgcggccgccgcggcgggaggaggaaagcggcggcggtggagggagcgccgggctcggcggccccgcgggcctggcggcgccggacctcggcgacttcccaccggctggccgcggggatccgaagggccgtcggagagatccggccggcgaggcggtggacccccgcaaaaagaagggcgctgcggaggcgggcaggaggaagaaggccgaggcggcggcggccgccatggcgaccccggccaggcccggcgaggccgaggacgcggccgagcggcccctccaggatgagccggcggcggcggcaggcccgggcaagggtcgcttcctcgtccgcatctgtttccagggagacgagggcgcctgcccgacccgggacttcgtggtaggagcgcttatcctgcgctccatcggcatggacccgagcgacatctacgcggtcatccagatcccgggcagccgcgaattcgacgtgagcttccgctcagcggagaagctggccctgttcctacgcgtctacgaggagaagcgggagcaggaggactgctgggagaactttgtggtgctggggcggagcaagtccagcttgaagacgctcttcatcctcttccggaacgagacggtggacgtggaggacattgtgacttggctcaagcgccactgcgacgtgctggccgtgccggtgaaagtgaccgacaggtttgggatctggaccggggagtacaaatgcgagatcgagctgcgccagggggagggcggggtcaggcacttgccaggggccttcttcctgggggccgagaggggctacagctggtacaaggggcagcccaagacatgctttaaatgtggttcccggacccacatgagcggcagctgcacgcaggacaggtgcttcaggtgcggggaggaggggcacctgagcccttactgccggaagggcatcgtgtgcaacctctgtggcaagcgaggacacgcctttgcccagtgtcccaaagcagtgcacaattccgtggcagctcagctaaccggcgtggccgggcactaaacacccgcctgcctgccagggtgaacacacagccagcttacccctcttaagtgccaaaacttttttttaaaccattttttatcgtttttgaaggagatctttttaaaacctacaagagacatctctctatgccttcttaaaccgagtttactccatttcagcctgttctgaattggtgactctgtcaccaataacgactgcggagaactgtagcgtgcagatgtgttgcccctcccttttaaaattttattttcgtttttctattgggtatttgttttgtttcttgtactttttctctctctccttgcccccctcccgccctccccgccccataccttttcttcccctggattttcaccctttgggctgccttgctcatctttatgccccagcactaggtacggggcccaacacgtggtaggcactccatcagtgtttgctgaattgaaaacattgttgactgtggcttctatcagagtgtctaccttttgcagctcttcccctccctcatttaatttgctgcttttaatctacgtggtctgagaatttgtgaaaccagtgttgttagaagtgtatataatctgaatcaataagctctgaatggtggccaagggcctctcttatggcacaaagatgcatggacttcatgacagctcttttggtggctcagaagccattttttatagaatcatggaatctagaatattcctgctggaaagaacctgagagttggtttggaccaattccctggttttccagcagatgaaacaggcccaaagaggttaaatgactgggtgaaaatcacatagctgtctggtgccagagccagcctatagtagagtcccctgaccccaagcccggtgctcattccactacctctcacacttcacaacaatttcctcaacacttgagggcccagaaagtctgatctctccagaatgatcagcccagaggaatgctgagaaatcacctggaggagggagcagaaagagaaggtttttaaggaggggcttctgaatacttgggagatacggaacggaccaaggaccacactccagggtgcattcgttgctccctggggcaccacttctggattacagtgtgccaggtcctttggaggccctaccccttccccattcattgccaccagtgagaaatgggggtgcccctgtgtaaagaaacctaccaaaggtttacatttgcaccttagcctcaatagctacgaaccctagagaagcagctagctggagctcatgtgcaactcctgattctcaggagaaagatggattttaacccaaaattatgagtgagctgttaactctaaaatgtacttgggagataggccaagcgagaggtcatgggccaactaagtgttatccagtagaaaagacagtacactgcttttcttttagtgtttgcttttcctttgctatatgttttgctatttccttgtggcttagaatgtaaaattgattgttaaaagttttgttctgaataaatatttatcttttgtattgctaaaa

SEQ ID NO: 301996 - DNA, 3103 bp, Homo sapiens
  misc_feature (1)..(2): n is a, c, g, or t
  misc_feature (35)..(35): n is a, c, g, or t
  misc_feature (62)..(62): n is a, c, g, or t
  misc_feature (69)..(69): n is a, c, g, or t
nnccccccgggggggggggcccccaacccccgggnaaaggggggcccggaaaagaaaagggnccccggnaaagggaggctgccaaacccgcgctggggaaagggccgcctccgggcgccccatcccgctgcggacggaggtgaggttggagcgagcgctggcggaagagaggctcagcgcagggggcgcagagccggcgctggccaatatgcgccgcatgtgatacctttgagggcgcggcgggggagggtagcgtcaaatttcaaaaaaaaaaaaaaaccaaacccacacagccccggcgggcgggcgcgcgcgatgggcgccctttggctgcgggagcgagtggaggatgctgggaaggaggtaaaatggccaccggcggcggcgcggaggaagagaggaaacgggggcggccgcagcttctgccccccgcgcggcccgcggcccggggcgaggaggccgacggcggccgcgagaagatgggctgggcccaggtggtgaagaatctagccgagaagaagggcgaattccgcgagccgcggccgccgcggcgggaggaggaaagcggcggcggtggagggagcgccgggctcggcggccccgcgggcctggcggcgccggacctcggcgacttcccaccggctggccgcggggatccgaagggccgtcggagagatccggccggcgaggcggtggacccccgcaaaaagaagggcgctgcggaggcgggcaggaggaagaaggccgaggcggcggcggccgccatggcgaccccggccaggcccggcgaggccgaggacgcggccgagcggcccctccaggatgagccggcggcggcggcaggcccgggcaagggtcgcttcctcgtccgcatctgtttccagggagacgagggcgcctgcccgacccgggacttcgtggtaggagcgcttatcctgcgctccatcggcatggacccgagcgacatctacgcggtcatccagatcccgggcagccgcgaattcgacgtgagcttccgctcagcggagaagctggccctgttcctacgcgtctacgaggagaagcgggagcaggaggactgctgggagaactttgtggtgctggggcggagcaagtccagcttgaagacgctcttcatcctcttccggaacgagacggtggacgtggaggacattgtgacttggctcaagcgccactgcgacgtgctggccgtgccggtgaaagtgaccgacaggtttgggatctggaccggggagtacaaatgcgagatcgagctgcgccagggggagggcggggtcaggcacttgccaggggccttcttcctgggggccgagaggggctacagctggtacaaggggcagcccaagacatgctttaaatgtggttcccggacccacatgagcggcagctgcacgcaggacaggtgcttcaggtgcggggaggaggggcacctgagcccttactgccggaagggcatcgtgtgcaacctctgtggcaagcgaggacacgcctttgcccagtgtcccaaagcagtgcacaattccgtggcagctcagctaaccggcgtggccgggcactaaacacccgcctgcctgccagggtgaacacacagccagcttacccctcttaagtgccaaaacttttttttaaaccattttttatcgtttttgaaggagatctttttaaaacctacaagagacatctctctatgccttcttaaaccgagtttactccatttcagcctgttctgaattggtgactctgtcaccaataacgactgcggagaactgtagcgtgcagatgtgttgcccctcccttttaaaattttattttcgtttttctattgggtatttgttttgtttcttgtactttttctctctctccttgcccccctcccgccctccccgccccataccttttcttcccctggattttcaccctttgggctgccttgctcatctttatgccccagcactaggtacggggcccaacacgtggtaggcactccatcagtgtttgctgaattgaaaacattgttgactgtggcttctatcagagtgtctaccttttgcagctcttcccctccctcatttaatttgctgcttttaatctacgtggtctgagaatttgtgaaaccagtgttgttagaagtgtatataatctgaatcaataagctctgaatggtggccaagggcctctcttatggcacaaagatgcatggacttcatgacagctcttttggtggctcagaagccattttttatagaatcatggaatctagaatattcctgctggaaagaacctgagagttggtttggaccaattccctggttttccagcagatgaaacaggcccaaagaggttaaatgactgggtgaaaatcacatagctgtctggtgccagagccagcctatagtagagtcccctgaccccaagcccggtgctcattccactacctctcacacttcacaacaatttcctcaacacttgagggcccagaaagtctgatctctccagaatgatcagcccagaggaatgctgagaaatcacctggaggagggagcagaaagagaaggtttttaaggaggggcttctgaatacttgggagatacggaacggaccaaggaccacactccagggtgcattcgttgctccctggggcaccacttctggattacagtgtgccaggtcctttggaggccctaccccttccccattcattgccaccagtgagaaatgggggtgcccctgtgtaaagaaacctaccaaaggtttacatttgcaccttagcctcaatagctacgaaccctagagaagcagctagctggagctcatgtgcaactcctgattctcaggagaaagatggattttaacccaaaattatgagtgagctgttaactctaaaatgtacttgggagataggccaagcgagaggtcatgggccaactaagtgttatccagtagaaaagacagtacactgcttttcttttagtgtttgcttttcctttgctatatgttttgctatttccttgtggcttagaatgtaaaattgattgttaaaagttttgttctgaataaatatttatcttttgtattgctaaaa

SEQ ID NO: 301997 - DNA, 3407 bp, Homo sapiens
  misc_feature (3362)..(3362): n is a, c, g, or t
tgtgacagagtaaaattttaatgataaaaagttaatggtaaaatgttcactgtaaaactttcaacttttcttcttgaaaacgtgcataatccgacgtgggaaaaaaaataacgcattgcagtcagttctggggaaacggaaagctaagttttaattttgctattgcttttgcttttttaacagaaaaggtacaaaaaagaaaaaatgggagagatgttgccgaactccgtcccgcctgtgggctgtgggccgttagcaaagctgctagcatgaaatcgtcgagcaccgcttgcgaaacgccaaatcctcgagagcgaggccggaggctgccaaacccgcgctggggaaagggccgcctccgggcgccccatcccgctgcggacggaggtgaggttggagcgagcgctggcggaagagaggctcagcgcagggggcgcagagccggcgctggccaatatgcgccgcatgtgatacctttgagggcgcggcgggggagggtagcgtcaaatttcaaaaaaaaaaaaaaaccaaacccacacagccccggcgggcgggcgcgcgcgatgggcgccctttggctgcgggagcgagtggaggatgctgggaaggaggtaaaatggccaccggcggcggcgcggaggaagagaggaaacgggggcggccgcagcttctgccccccgcgcggcccgcggcccggggcgaggaggccgacggcggccgcgagaagatgggctgggcccaggtggtgaagaatctagccgagaagaagggcgaattccgcgagccgcggccgccgcggcgggaggaggaaagcggcggcggtggagggagcgccgggctcggcggccccgcgggcctggcggcgccggacctcggcgacttcccaccggctggccgcggggatccgaagggccgtcggagagatccggccggcgaggcggtggacccccgcaaaaagaagggcgctgcggaggcgggcaggaggaagaaggccgaggcggcggcggccgccatggcgaccccggccaggcccggcgaggccgaggacgcggccgagcggcccctccaggatgagccggcggcggcggcaggcccgggcaagggtcgcttcctcgtccgcatctgtttccagggagacgagggcgcctgcccgacccgggacttcgtggtaggagcgcttatcctgcgctccatcggcatggacccgagcgacatctacgcggtcatccagatcccgggcagccgcgaattcgacgtgagcttccgctcagcggagaagctggccctgttcctacgcgtctacgaggagaagcgggagcaggaggactgctgggagaactttgtggtgctggggcggagcaagtccagcttgaagacgctcttcatcctcttccggaacgagacggtggacgtggaggacattgtgacttggctcaagcgccactgcgacgtgctggccgtgccggtgaaagtgaccgacaggtttgggatctggaccggggagtacaaatgcgagatcgagctgcgccagggggagggcggggtcaggcacttgccaggggccttcttcctgggggccgagaggggctacagctggtacaaggggcagcccaagacatgctttaaatgtggttcccggacccacatgagcggcagctgcacgcaggacaggtgcttcaggtgcggggaggaggggcacctgagcccttactgccggaagggcatcgtgtgcaacctctgtggcaagcgaggacacgcctttgcccagtgtcccaaagcagtgcacaattccgtggcagctcagctaaccggcgtggccgggcactaaacacccgcctgcctgccagggtgaacacacagccagcttacccctcttaagtgccaaaacttttttttaaaccattttttatcgtttttgaaggagatctttttaaaacctacaagagacatctctctatgccttcttaaaccgagtttactccatttcagcctgttctgaattggtgactctgtcaccaataacgactgcggagaactgtagcgtgcagatgtgttgcccctcccttttaaaattttattttcgtttttctattgggtatttgttttgtttcttgtactttttctctctctccttgcccccctcccgccctccccgccccataccttttcttcccctggattttcaccctttgggctgccttgctcatctttatgccccagcactaggtacggggcccaacacgtggtaggcactccatcagtgtttgctgaattgaaaacattgttgactgtggcttctatcagagtgtctaccttttgcagctcttcccctccctcatttaatttgctgcttttaatctacgtggtctgagaatttgtgaaaccagtgttgttagaagtgtatataatctgaatcaataagctctgaatggtggccaagggcctctcttatggcacaaagatgcatggacttcatgacagctcttttggtggctcagaagccattttttatagaatcatggaatctagaatattcctgctggaaagaacctgagagttggtttggaccaattccctggttttccagcagatgaaacaggcccaaagaggttaaatgactgggtgaaaatcacatagctgtctggtgccagagccagcctatagtagagtcccctgaccccaagcccggtgctcattccactacctctcacacttcacaacaatttcctcaacacttgagggcccagaaagtctgatctctccagaatgatcagcccagaggaatgctgagaaatcacctggaggagggagcagaaagagaaggtttttaaggaggggcttctgaatacttgggagatacggaacggaccaaggaccacactccagggtgcattcgttgctccctggggcaccacttctggattacagtgtgccaggtcctttggaggccctaccccttccccattcattgccaccagtgagaaatgggggtgcccctgtgtaaagaaacctaccaaaggtttacatttgcaccttagcctcaatagctacgaaccctagagaagcagctagctggagctcatgtgcaactcctgattctcaggagaaagatggattttaacccaaaattatgagtgagctgttaactctaaaatgtacttgggagataggccaagcgagaggtcatgggccaactaagtgttatccagtagaaaagacagtacactgcttttcttttagtgtttgcttttcctttgctatatgttttgctatttccttgtggcttagaatgtaaaattgattgttaaaagttttgttctgaataaatatttatcttttgtattgctaaaaaaaaaaaaaanaaaaaaaaaaaaaagcggccgctcgaatcgcggcgcgtcgactac

SEQ ID NO: 301998 - DNA, 529 bp, Homo sapiens
ccaactctgagcctcagttcctctatctgtgaatgggagtaaaattccttccctgtaggaaggggcagttatgtgaaccaatgtgtgcaaagtattgtgcacagagcctgggtcctagaaagtcctcgaaaaatgtcagctggcctcagtacctataacctttctacatcaaagtcttttgagaatctgataaaaactgtggacttggaaaatatatgtatatatatatatgacaacattttccactttgggacagggagtttggctctctaagccatctcttgaatcagatttagaatctctactgaaaatacaaaaattacctgggcgtggcggtgcacatctgtgatcccagctacttgggaggctgaagcacaagaattgcttgaaccccgttgtagtgagccaagatcctgccactgcactccagcctgtgtgacagatcaagactcttgtcttaaaataaaataaaataaaaataataaataaataaataaaagagactgccaggaaaggacagaatctagcc

SEQ ID NO: 301999 - DNA, 718 bp, Homo sapiens
ggaagaaatgggttggattcacttccaaagaaggaggttgcaagttccctagggctaagctacgtatggttaaaaacccagcagcagctcttctccagaccacactagaccactgactgcttcttgggcaaggaactcgtcagtaacttttaagatttccttaacccttcttaccacttttcttagttgatttcttgaggctaatttcctgaggctaactaaactgagactgtccttcctctttggtaagtctgttttattcagatgggcagacagtgtcatttttgagtgatggttgtaaaacagtggcagtccaggcttattacttatagtcatggcaaataaaaagtcaaaataaatgaatgccgaattttttctcccctcttcaaatagaaaagaacgccctatatcattaggaattttcccattacctgctggagatggattgcttacacctgatgctcagaaaggaggagagacccctggatctgagcaatggaaatttcaggaattaagtcaaccacgttctcataccagcctgaaggtaagctttatgctgctgaaattgtgtcagtttatatttcataaactttcttatcctaattgaagtgctagacgaccacagtatagtaaaatgtaattgtttgtatacatttaagttttgtaaaattggttttttaaaatttggaaatgaagctcttacccaaagagtgtgttt

SEQ ID NO: 302000 - DNA, 839 bp, Homo sapiens
ggaagaaatgggttggattcacttccaaagaaggaggttgcaagttccctagggctaagctacgtatggttaaaaacccagcagcagctcttctccagaccacactagaccactgactgcttcttgggcaaggaactcgtcagtaacttttaagatttccttaacccttcttaccacttttcttagttgatttcttgaggctaatttcctgaggctaactaaactgagactgtccttcctctttggtaagtctgttttattcagatgggcagacagtgtcatttttgagtgatggttgtaaaacagtggcagtccaggcttattacttatagtcatggcaaataaaaagtcaaaataaatgaatgccgaattttttctcccctcttcaaatagaaaagaacgccctatatcattaggaattttcccattacctgctggagatggattgcttacacctgatgctcagaaaggaggagagacccctggatctgagcaatggaaatttcaggaattaagtcaaccacgttctcataccagcctgaaggtaagctttatgctgctgaaattgtgtcagtttatatttcataaactttcttatcctaattgaagtgctagacgaccacagtatagtaaaatgtaattgtttgtatacatttaagttttgtaaaattggttttttaaaatttggaaatgaagctcttacccaaagagtgtgttttttactattttatttcaaattatataggaaaaaaagtgaagcattatatcatcttgattagtatactaatgacaaaaattaatttctatttgatttaggctatatgagtttagagtagggt

SEQ ID NO: 302001 - DNA, 512 bp, Homo sapiens
  misc_feature (462)..(462): n is a, c, g, or t
  misc_feature (490)..(490): n is a, c, g, or t
gggcagtagagcgaccctgtctcaaaaaaacaaaaaaacaaaaaacctgaacttgatttcaaggagtaaataacagcagtgcttgctcatgtctcagtggatctgtaataagttcacttttgatgaggcttactaatgtgcctttttcactcctccttccaccattattaggtaaccaatggtcaaggtgaaaataagatgaaaaatttacctgtgcctgtctatctcagacctctggatgaaaaagatacatcaatgaagctgtggtgtgctgttggagtcaatttatctggtgggaagaccagagatggtggttctgttgttggagcaagtgtattttacaaggatgttgctggtttggatacagaaggcagtaaacagcgaagtgcctctcagagtagtttagataagttagatcaggaacttaaggacaccgaagggttatcagagaattatccgtcnagttggactgtaccagcactcattcggnacgtcctataatggggcgttcc

SEQ ID NO: 302002 - DNA, 8218 bp, Homo sapiens
tccggccccggcccccaccccgccgggcccagccccagccccggcccgggctccagccctagtacccgtcccagcccgagtcgggtccgtcccgtgcgggcaggtgccgcccctctgccggcgacgccccgggccgcccgcccgtccgcttgccaccatggagctggaggacggtgtggtgtatcaggaggagcccggcggctccggggccgtgatgtcggagcgggtgtccggcctggccggctccatctaccgcgagttcgagcggcttatcgggcgctatgacgaggaggtggtcaaagagctgatgccgctggtggtggctgtgctggagaacctggactcggtgttcgcgcaggaccaggagcaccaggtggagctggagctgctgcgggacgacaacgagcagctcatcacccagtacgagcgggagaaggcgctgcgcaagcacgctgaggagaaattcattgaatttgaagactctcaagaacaggaaaaaaaggacttacagacccgagtggaatctttagaatctcaaacaagacaacttgagctgaaagcgaaaaactatgctgaccagattagcagacttgaagaaagagaagcagaactgaagaaggaatataatgcattacatcaaagacacactgagatgatccataattatatggaacatttagaaagaacaaaacttcatcagctctcagggagtgatcaactagaatccacagctcatagtagaattagaaaagaacgccctatatcattaggaattttcccattacctgctggagatggattgcttacacctgatgctcagaaaggaggagagacccctggatctgagcaatggaaatttcaggaattaagtcaaccacgttctcataccagcctgaaggatgagctttctgatgttagccaaggcggatctaaagctaccactccagcatcaacagctaattcagatgtggcaacaattcctactgatactcccttaaaggaagaaaacgaaggatttgtgaaggttacagatgcgccaaataaatcagagataagcaaacacattgaagtacaggtagcccaggaaactagaaatgtatctactggctctgctgaaaatgaagaaaagtcagaagttcaagcaatcatcgaatctactcctgagctggatatggacaaagatctcagtggatataaaggttcaagcactcccaccaaaggcatagagaacaaagcttttgatcgcaatacagaatctctctttgaagaactgtcttcagctggctcaggcctaataggagatgtggatgaaggagcagatttactaggaatgggtcgggaagttgagaatcttatattagaaaatacacaactgttggaaaccaaaaatgctttgaacatagtgaagaatgatttgatagcaaaagtggatgaactgacctgtgagaaagatgtgctgcaaggggaattggaggctgtgaagcaagccaaactgaaactagaggaaaagaacagagaattggaggaagagcttaggaaagctcgggcagaagctgaagatgcaaggcaaaaagcaaaagatgacgatgatagtgatattcccacagcccagaggaaacggtttactagagtagaaatggcccgtgttctcatggagcgaaaccagtataaagagagattgatggagcttcaggaagctgttcgatggacagagatgattcgggcatcacgagaaaatccagccatgcaggaaaaaaaaaggtcaagcatttggcagtttttcagccgacttttcagctcctcaagtaacacgactaagaagcctgaaccacctgttaatctgaagtacaatgcacccacgtctcatgttactccgtccgtcaagaaaagaagcagcaccttatctcagctccctggggataagtccaaagcctttgatttccttagtgaagaaactgaagctagtttagcctcacgcagagaacaaaagagagagcagtatcgtcaggtaaaagcacatgttcagaaggaagacggtagagtgcaggcttttggctggagtctgcctcagaagtacaaacaggtaaccaatggtcaaggtgaaaataagatgaaaaatttacctgtgcctgtctatctcagacctctggatgaaaaagatacatcaatgaagctgtggtgtgctgttggagtcaatttatctggtgggaagaccagagatggtggttctgttgttggagcaagtgtattttacaaggatgttgctggtttggatacagaaggcagtaaacagcgaagtgcctctcagagtagtttagataagttagatcaggaacttaaggaacagcagaaggagttaaaaaatcaagaagaattatccagtctagtttggatctgtaccagcactcattcggctacaaaagttcttattattgatgctgttcaacctggcaacatcctagacagtttcactgtttgcaactctcatgttctgtgcattgcaagtgtgccaggtgcacgagaaacagactaccctgcaggagaagatctttcagaatctggtcaggtagacaaagcatctttatgtggaagtatgacaagcaacagctcagcagagacagacagcctgttaggaggcatcacagtggttggttgttctgcagaaggtgtgacgggagctgccacttcccctagtacaaatggtgcttctccagtgatggataaaccaccagaaatggaagcagaaaatagtgaggttgatgaaaatgttccaacagcagaagaagcaactgaagctacagaagggaatgcggggtcagctgaagacacagtggacatctcccaaactggcgtctacacagagcatgtctttacagatcctttgggagttcagatcccagaagacctctccccagtgtatcagtcgagcaatgactcagatgcatataaagatcaaatatcagtactgccaaatgaacaagacttggtgagagaagaagcccagaaaatgagtagtcttttaccaactatgtggcttggagctcaaaatggctgtttgtatgtccattcatctgtagcccagtggaggaaatgtctccattccattaaacttaaagattcgattctcagtattgtacacgtgaagggaatcgtgttagtagccctggctgacggcacccttgcaatctttcacagaggagtggatgggcagtgggatttgtcaaactatcacctcttagaccttggacggcctcatcattccatccgttgcatgactgtggtacatgacaaagtctggtgtggctataggaacaaaatctatgtggtgcagccaaaggccatgaaaatagagaaatcttttgatgcacatcccaggaaggagagccaagtgcgacagcttgcgtgggtgggggatggcgtgtgggtctccattcgcttggattctacgctccgtctctatcatgcacacacttatcaacatctacaggatgtggacattgagccttatgtaagcaaaatgttaggtactggaaaactgggcttctcttttgtgagaattacagctcttatggtgtcttgtaatcgtttgtgggtggggacaggaaatggtgtcattatctccatcccattgacagaaaccgtaatcctccaccagggacgtttactggggctgagggcaaataaaacctcaggtgtaccaggaaatcgtcctggaagtgtaatccgtgtatatggtgatgaaaacagtgataaagtgactccagggacatttataccctattgttcaatggcacatgcacagctttgcttccatgggcaccgggatgctgtgaaattctttgtggcagtcccaggtcaagtcatcagcccacaaagtagcagtagtggcacggatctgacgggtgacaaagcagggccatctgcacaggagcctggtagtcagacgcccttgaagtctatgcttgtcatcagtggaggagagggctacatcgacttccgaatgggtgatgaaggtggagaatcagaacttcttggagaggatcttccacttgaaccttctgtcaccaaagcagaaaggagtcacttgatagtgtggcaagtgatgtatggcaatgagtgagcccatgggaaacaggtggagatggggaagccgtctcttctgcatggtttattttccctctatccttttatttaatgctcttttgtgagataagtttcaccacataatgtgtgagcattttttcctgttaactttatattacaaaatccgttctaccataacaatacagaggaactagctgtgttactgcaccagtgttataggtaacttcagtatattatgaacaaatcaaagaatgtttacttcctgcaaactggtgaattatagaaagcaatccagatgtggtttactctgccacagtctaatgtcattcacttcatttgatggggtcacttgttagctgtcactaataatggaattaatgggaaacacttgataaatgaaactgtaccgttaaatacaatagctgagttttccccagtgtattgtaaaattgacacacactaatacaagatggattatcaggatgtatctaaatgtcccgagagggttaaaagctaactgtaaattactttaactttcactttcaaatctgacaaatcttgtttatatggtatataaaactttgttttcatcagatttgggggggttttatattaaagaaattaagactacactatttaaataaacgtttcctgtttctgacttattagagctctaaagtttatgaggcctacttctctgaatattctgatgggttttttttgagaccagtctcattttcatactgacatgtctgaaagatttattatttataaagcttaggacatactctgggaagcttagaagatacttcagcactgggaggattttttaaaggaaatgtgttttgtatttcttgtaccagagaatggtgatgttgattgagttttttccatgtaaaaaatgtacttgtttgccaaatgttcctagattgctcttaacctgttaatacaagtaaaactgtagtggggatggagtctggcctaagtacagaatgagggatttaattagaaaagttattttcttttgttctgtatcaaactgcagaacagctatatacttggtattttgtacgtgaataacgttttagcttttgtgcccttttgagcttgaagggttatcctcaaaggggaaaactatgaaggggaagaagacaaacctaagataccataaagtaaaggttgacattacatattttcattcacaatgcccattaaaaaaaaaaaataggttgggcatggtggctcacgcctgtaatcccagcactttaggaggctgaggcggatggattgcttgagcccaggagttcaagaccagcctgggcaacatggcgaaaccctgtctctaccaaaaaaaaaaaacaaaataaattaaccgggtgtggtggcacatgcctgtagtcccagctacttgggaggctgaggtgggaggatgacctgggcccaggaggtggaggttgcagtgagccttgatagcaccactgcactccagcctgggtgacggagcaagaccctgtctcaaaacagacaaacaagcaaaaaatagattaaagtctggatttcactgattttcttgcttaataagttttttaaaaccacgatgctgcaattttttccctctcaagcttcttgaaaatgtgtgatttacccttttttatctattactctaggcaaagctaaatatgatttttttttttttttttgagacggagtctggctctgttgcccaggctggaatgcagtggtgcgatctcagctcactgcaacctccacctctcaggttcaagtagttctcctgcctcagcctcccaagtagctgggattacaggtgtgtgccaccctgcccagctaatttttgtatttttagtagagacagggtttcgccacgttggccaggctggtctcaaactcctgacctcagatgatctacccgccttggcctcccgaagtgcttgaattacaggcgtgagcccccgcgccggtccgaagcaaagctaaatgtaattttatgtactgttttaacagtataaacctatgggataaaggcccccaatcatcagaaggactactgaaaagaaaagaaagcaaacgtagatgtcaaattgtctaaacattcttaagtaccactgattttttttttctggactattatacaaagatgtctgtaaaaagtataccagtggcttttatgcatatacacgattaggctagattgtgaagtacatgggatttcatgagccagaggaggcatttggatccattgggccacatgtgactataagcacattgtgtacacaataaaattgtagccactcatgtattaaaactgttttggtaaaagctgtattaaaagaataattttttgcttgagctacttagtcacttttttgcagggcaccaaaatgtaggctacttttccatagcttgtttgctatgtttttatttcatcttaaatctgagccatttttggcaatatcttttaaaaaatcattattaaacatttattggaaatgttgtatagattcacaagaaagagacaccaaagtgtttgggaattttaatcccaagaagtaaacatcccagagtcagatcccatttgctgttgttcagccatgtttgtatgactgaatgtaatttaggaaatcaggagttagagatgaaaaatacaaacatgtcaaatggttgtaattgctttttttgaacttactggctttaacttaagtaatataggtgtgtagttgttttatctaaagatgtcagattatctgtggccctgttaattaactgcagggaccagagagaggacaaaaatgcctgtataatttgctttaaaggcttgtccttatgtttgtaatttcagttaaatattttctacagattgcttcacttcccctttcccccaataacaagttcatattcttgtaatgtttactttggtcaacgtggtaatttttggaagaaaatgccaaaatgtaagcttctcacaagcagcaaaggaatgtaactgcctgtagctaccacatcaagggagagaagaggcttgcgtactttgggttgatctcactgtacaaaaaaagtgtacccctattggaagaaataaggaatacttgaaggtttctcctttttttacacttgagtcatgtgcaaggttgaaccatatgaaattgccagtgttcaaccattgctgatctgcaaaagcgacaatatcatatgcctcaacctaacacttactcttaaatgcaggttaaaatctctgtgaggcaaagggataatattctctaggaactcacttttgagagtatttttctctaacccatgtggatctaaattttaaaaataggaatgaatctcttaattgcagcttgtggagagtataaaacattttgagcacaatatgcagcacataacttttcagattgtgtttgcatagaaaaggttaaaatcaattctttcagttactgtattgttcatttcttgtaaaggtcttcctacatttgagacgagaccctttaacataggctgccttagtaacaaaataaaacagatgtgtcataatattaactgtcctaaagaacatgtgtcttgcaaatgccatggaactgaatatttatttccttgtgagtattatgaccgttaccaaaggactcaaccagatttagggctcttcttaattgatcatgttcagaaagggactcatttggtcccactttgtaacatgggaagagtagaagagaaaattaaatgtggaaatcataaatgcttttctaacagggttatgctattctgtaacactaaatgtctgtcttttctcttaaaagattaagttttattaattttgtcatacatttctctatttgaatatatcttaaccattttatgttccaaattcgttttttgtccaagacattctatcagaattttacttgcctctataatctgaaaaatgggttctagaatgtcccacttgctgtctcttagaggctgagcttcatttctatgagcaaagagctcatttagcaatgtagttatttcagtatttatttctattatggaatccctggggttcagaatgtaactttgtacatgagatatatataaatatgtatatgaacatgta

SEQ ID NO: 302003 - DNA, 7899 bp, Homo sapiens
tccggccccggcccccaccccgccgggcccagccccagccccggcccgggctccagccctagtacccgtcccagcccgagtcgggtccgtcccgtgcgggcaggtgccgcccctctgccggcgacgccccgggccgcccgcccgtccgcttgccaccatggagctggaggacggtgtggtgtatcaggaggagcccggcggctccggggccgtgatgtcggagcgggtgtccggcctggccggctccatctaccgcgagttcgagcggcttatcgggcgctatgacgaggaggtggtcaaagagctgatgccgctggtggtggctgtgctggagaacctggactcggtgttcgcgcaggaccaggagcaccaggtggagctggagctgctgcgggacgacaacgagcagctcatcacccagtacgagcgggagaaggcgctgcgcaagcacgctgaggagaaattcattgaatttgaagactctcaagaacaggaaaaaaaggacttacagacccgagtggaatctttagaatctcaaacaagacaacttgagctgaaagcgaaaaactatgctgaccagattagcagacttgaagaaagagaagcagaactgaagaaggaatataatgcattacatcaaagacacactgagatgatccataattatatggaacatttagaaagaacaaaacttcatcagctctcagggagtgatcaactagaatccacagctcatagtagaattagaaaagaacgccctatatcattaggaattttcccattacctgctggagatggattgcttacacctgatgctcagaaaggaggagagacccctggatctgagcaatggaaatttcaggaattaagtcaaccacgttctcataccagcctgaaggatgagctttctgatgttagccaaggcggatctaaagctaccactccagcatcaacagctaattcagatgtggcaacaattcctactgatactcccttaaaggaagaaaacgaaggatttgtgaaggttacagatgcgccaaataaatcagagataagcaaacacattgaagtacaggtagcccaggaaactagaaatgtatctactggctctgctgaaaatgaagaaaagtcagaagttcaagcaatcatcgaatctactcctgagctggatatggacaaagatctcagtggatataaaggttcaagcactcccaccaaaggcatagagaacaaagcttttgatcgcaatacagaatctctctttgaagaactgtcttcagctggctcaggcctaataggagatgtggatgaaggagcagatttactaggaatgggtcgggaagttgagaatcttatattagaaaatacacaactgttggaaaccaaaaatgctttgaacatagtgaagaatgatttgatagcaaaagtggatgaactgacctgtgagaaagatgtgctgcaaggggaattggaggctgtgaagcaagccaaactgaaactagaggaaaagaacagagaattggaggaagagcttaggaaagctcgggcagaagctgaagatgcaaggcaaaaagcaaaagatgacgatgatagtgatattcccacagcccagaggaaacggtttactagagtagaaatggcccgtgttctcatggagcgaaaccagtataaagagagattgatggagcttcaggaagctgttcgatggacagagatgattcgggcatcacgagaaaatccagccatgcaggaaaaaaaaaggtcaagcatttggcagtttttcagccgacttttcagctcctcaagtaacacgactaagaagcctgaaccacctgttaatctgaagtacaatgcacccacgtctcatgttactccgtccgtcaagaaaagaagcagcaccttatctcagctccctggggataagtccaaagcctttgatttccttagtgaagaaactgaagctagtttagcctcacgcagagaacaaaagagagagcagtatcgtcaggtaaaagcacatgttcagaaggaagacggtagagtgcaggcttttggctggagtctgcctcagaagtacaaacaggtaaccaatggtcaaggtgaaaataagatgaaaaatttacctgtgcctgtctatctcagacctctggatgaaaaagatacatcaatgaagctgtggtgtgctgttggagtcaatttatctggtgggaagaccagagatggtggttctgttgttggagcaagtgtattttacaaggatgttgctggtttggatacagaaggcagtaaacagcgaagtgcctctcagagtagtttagataagttagatcaggaacttaaggaacagcagaaggagttaaaaaatcaagaagaattatccagtctagtttggatctgtaccagcactcattcggctacaaaagttcttattattgatgctgttcaacctggcaacatcctagacagtttcactgtttgcaactctcatgttctgtgcattgcaagtgtgccaggtgcacgagaaacagactaccctgcaggagaagatctttcagaatctggtcaggtagacaaagcatctttatgtggaagtatgacaagcaacagctcagcagagacagacagcctgttaggaggcatcacagtggttggttgttctgcagaaggtgtgacgggagctgccacttcccctagtacaaatggtgcttctccagtgatggataaaccaccagaaatggaagcagaaaatagtgaggttgatgaaaatgttccaacagcagaagaagcaactgaagctacagaagggaatgcggggtcagctgaagacacagtggacatctcccaaactggcgtctacacagagcatgtctttacagatcctttgggagttcagatcccagaagacctctccccagtgtatcagtcgagcaatgactcagatgcatataaagatcaaatatcagtactgccaaatgaacaagacttggtgagagaagaagcccagaaaatgagtagtcttttaccaactatgtggcttggagctcaaaatggctgtttgtatgtccattcatctgtagcccagtggaggaaatgtctccattccattaaacttaaagattcgattctcagtattgtacacgtgaagggaatcgtgttagtagccctggctgacggcacccttgcaatctttcacagaggagtggatgggcagtgggatttgtcaaactatcacctcttagaccttggacggcctcatcattccatccgttgcatgactgtggtacatgacaaagtctggtgtggctataggaacaaaatctatgtggtgcagccaaaggccatgaaaatagagaaatcttttgatgcacatcccaggaaggagagccaagtgcgacagcttgcgtgggtgggggatggcgtgtgggtctccattcgcttggattctacgctccgtctctatcatgcacacacttatcaacatctacaggatgtggacattgagccttatgtaagcaaaatgttaggtactggaaaactgggcttctcttttgtgagaattacagctcttatggtgtcttgtaatcgtttgtgggtggggacaggaaatggtgtcattatctccatcccattgacagaaaccgtaatcctccaccagggacgtttactggggctgagggcaaataaaacctcaggtgtaccaggaaatcgtcctggaagtgtaatccgtgtatatggtgatgaaaacagtgataaagtgactccagggacatttataccctattgttcaatggcacatgcacagctttgcttccatgggcaccgggatgctgtgaaattctttgtggcagtcccaggtcaagtcatcagcccacaaagtagcagtagtggcacggatctgacgggtgacaaagcagggccatctgcacaggagcctggtagtcagacgcccttgaagtctatgcttgtcatcagtggaggagagggctacatcgacttccgaatgggtgatgaaggtggagaatcagaacttcttggagaggatcttccacttgaaccttctgtcaccaaagcagaaaggagtcacttgatagtgtggcaagtgatgtatggcaatgagtgagcccatgggaaacaggtggagatggggaagccgtctcttctgcatggtttattttccctctatccttttatttaatgctcttttgtgagataagtttcaccacataatgtgtgagcattttttcctgttaactttatattacaaaatccgttctaccataacaatacagaggaactagctgtgttactgcaccagtgttataggtaacttcagtatattatgaacaaatcaaagaatgtttacttcctgcaaactggtgaattatagaaagcaatccagatgtggtttactctgccacagtctaatgtcattcacttcatttgatggggtcacttgttagctgtcactaataatggaattaatgggaaacacttgataaatgaaactgtaccgttaaatacaatagctgagttttccccagtgtattgtaaaattgacacacactaatacaagatggattatcaggatgtatctaaatgtcccgagagggttaaaagctaactgtaaattactttaactttcactttcaaatctgacaaatcttgtttatatggtatataaaactttgttttcatcagatttgggggggttttatattaaagaaattaagactacactatttaaataaacgtttcctgtttctgacttattagagctctaaagtttatgaggcctacttctctgaatattctgatgggttttttttgagaccagtctcattttcatactgacatgtctgaaagatttattatttataaagcttaggacatactctgggaagcttagaagatacttcagcactgggaggattttttaaaggaaatgtgttttgtatttcttgtaccagagaatggtgatgttgattgagttttttccatgtaaaaaatgtacttgtttgccaaatgttcctagattgctcttaacctgttaatacaagtaaaactgtagtggggatggagtctggcctaagtacagaatgagggatttaattagaaaagttattttcttttgttctgtatcaaactgcagaacagctatatacttggtattttgtacgtgaataacgttttagcttttgtgcccttttgagcttgaagggttatcctcaaaggggaaaactatgaaggggaagaagacaaacctaagataccataaagtaaaggttgacattacatattttcattcacaatgcccattaaaaaaaaaaaataggttgggcatggtggctcacgcctgtaatcccagcactttaggaggctgaggcggatggattgcttgagcccaggagttcaagaccagcctgggcaacatggcgaaaccctgtctctaccaaaaaaaaaaaacaaaataaattaaccgggtgtggtggcacatgcctgtagtcccagctacttgggaggctgaggtgggaggatgacctgggcccaggaggtggaggttgcagtgagccttgatagcaccactgcactccagcctgggtgacggagcaagaccctgtctcaaaacagacaaacaagcaaaaaatagattaaagtctggatttcactgattttcttgcttaataagttttttaaaaccacgatgctgcaattttttccctctcaagcttcttgaaaatgtgtgatttacccttttttatctattactctagcaaagctaaatgtaattttatgtactgttttaacagtataaacctatgggataaaggcccccaatcatcagaaggactactgaaaagaaaagaaagcaaacgtagatgtcaaattgtctaaacattcttaagtaccactgattttttttttctggactattatacaaagatgtctgtaaaaagtataccagtggcttttatgcatatacacgattaggctagattgtgaagtacatgggatttcatgagccagaggaggcatttggatccattgggccacatgtgactataagcacattgtgtacacaataaaattgtagccactcatgtattaaaactgttttggtaaaagctgtattaaaagaataattttttgcttgagctacttagtcacttttttgcagggcaccaaaatgtaggctacttttccatagcttgtttgctatgtttttatttcatcttaaatctgagccatttttggcaatatcttttaaaaaatcattattaaacatttattggaaatgttgtatagattcacaagaaagagacaccaaagtgtttgggaattttaatcccaagaagtaaacatcccagagtcagatcccatttgctgttgttcagccatgtttgtatgactgaatgtaatttaggaaatcaggagttagagatgaaaaatacaaacatgtcaaatggttgtaattgctttttttgaacttactggctttaacttaagtaatataggtgtgtagttgttttatctaaagatgtcagattatctgtggccctgttaattaactgcagggaccagagagaggacaaaaatgcctgtataatttgctttaaaggcttgtccttatgtttgtaatttcagttaaatattttctacagattgcttcacttcccctttcccccaataacaagttcatattcttgtaatgtttactttggtcaacgtggtaatttttggaagaaaatgccaaaatgtaagcttctcacaagcagcaaaggaatgtaactgcctgtagctaccacatcaagggagagaagaggcttgcgtactttgggttgatctcactgtacaaaaaaagtgtacccctattggaagaaataaggaatacttgaaggtttctcctttttttacacttgagtcatgtgcaaggttgaaccatatgaaattgccagtgttcaaccattgctgatctgcaaaagcgacaatatcatatgcctcaacctaacacttactcttaaatgcaggttaaaatctctgtgaggcaaagggataatattctctaggaactcacttttgagagtatttttctctaacccatgtggatctaaattttaaaaataggaatgaatctcttaattgcagcttgtggagagtataaaacattttgagcacaatatgcagcacataacttttcagattgtgtttgcatagaaaaggttaaaatcaattctttcagttactgtattgttcatttcttgtaaaggtcttcctacatttgagacgagaccctttaacataggctgccttagtaacaaaataaaacagatgtgtcataatattaactgtcctaaagaacatgtgtcttgcaaatgccatggaactgaatatttatttccttgtgagtattatgaccgttaccaaaggactcaaccagatttagggctcttcttaattgatcatgttcagaaagggactcatttggtcccactttgtaacatgggaagagtagaagagaaaattaaatgtggaaatcataaatgcttttctaacagggttatgctattctgtaacactaaatgtctgtcttttctcttaaaagattaagttttattaattttgtcatacatttctctatttgaatatatcttaaccattttatgttccaaattcgttttttgtccaagacattctatcagaattttacttgcctctataatctgaaaaatgggttctagaatgtcccacttgctgtctcttagaggctgagcttcatttctatgagcaaagagctcatttagcaatgtagttatttcagtatttatttctattatggaatccctggggttcagaatgtaactttgtacatgagatatatataaatatgtatatgaacatgta

SEQ ID NO: 302004 - DNA, 7882 bp, Homo sapiens
agttaataggctggctgtcgcttggggttgctgcataaatgctaggagcagcagctctatggttatgaggtggggagaacggaatgacgtcatcgcttgggagctgctgcaggatggagtggaaagctgctgctgatggcattgtttttgtggcagcaagctgaatgacagatcctcactacaaagatacccctttggcccccgtgtaggcctccttggttcgggtgtttcaccatgccagcacagcgccatgagtcctggatgcatgctgctgtttgtgtttggctttgttggcggggcggtggtcattaattctgctatcttagtatctctctctgttttgctgcttgtgcacttttctatttctaccggtgtgccagctctgacgcagaacctaccaaggatactcagaaaagaacgccctatatcattaggaattttcccattacctgctggagatggattgcttacacctgatgctcagaaaggaggagagacccctggatctgagcaatggaaatttcaggaattaagtcaaccacgttctcataccagcctgaaggatgagctttctgatgttagccaaggcggatctaaagctaccactccagcatcaacagctaattcagatgtggcaacaattcctactgatactcccttaaaggaagaaaacgaaggatttgtgaaggttacagatgcgccaaataaatcagagataagcaaacacattgaagtacaggtagcccaggaaactagaaatgtatctactggctctgctgaaaatgaagaaaagtcagaagttcaagcaatcatcgaatctactcctgagctggatatggacaaagatctcagtggatataaaggttcaagcactcccaccaaaggcatagagaacaaagcttttgatcgcaatacagaatctctctttgaagaactgtcttcagctggctcaggcctaataggagatgtggatgaaggagcagatttactaggaatgggtcgggaagttgagaatcttatattagaaaatacacaactgttggaaaccaaaaatgctttgaacatagtgaagaatgatttgatagcaaaagtggatgaactgacctgtgagaaagatgtgctgcaaggggaattggaggctgtgaagcaagccaaactgaaactagaggaaaagaacagagaattggaggaagagcttaggaaagctcgggcagaagctgaagatgcaaggcaaaaagcaaaagatgacgatgatagtgatattcccacagcccagaggaaacggtttactagagtagaaatggcccgtgttctcatggagcgaaaccagtataaagagagattgatggagcttcaggaagctgttcgatggacagagatgattcgggcatcacgagaaaatccagccatgcaggaaaaaaaaaggtcaagcatttggcagtttttcagccgacttttcagctcctcaagtaacacgactaagaagcctgaaccacctgttaatctgaagtacaatgcacccacgtctcatgttactccgtccgtcaagaaaagaagcagcaccttatctcagctccctggggataagtccaaagcctttgatttccttagtgaagaaactgaagctagtttagcctcacgcagagaacaaaagagagagcagtatcgtcaggtaaaagcacatgttcagaaggaagacggtagagtgcaggcttttggctggagtctgcctcagaagtacaaacaggtaaccaatggtcaaggtgaaaataagatgaaaaatttacctgtgcctgtctatctcagacctctggatgaaaaagatacatcaatgaagctgtggtgtgctgttggagtcaatttatctggtgggaagaccagagatggtggttctgttgttggagcaagtgtattttacaaggatgttgctggtttggatacagaaggcagtaaacagcgaagtgcctctcagagtagtttagataagttagatcaggaacttaaggaacagcagaaggagttaaaaaatcaagaagaattatccagtctagtttggatctgtaccagcactcattcggctacaaaagttcttattattgatgctgttcaacctggcaacatcctagacagtttcactgtttgcaactctcatgttctgtgcattgcaagtgtgccaggtgcacgagaaacagactaccctgcaggagaagatctttcagaatctggtcaggtagacaaagcatctttatgtggaagtatgacaagcaacagctcagcagagacagacagcctgttaggaggcatcacagtggttggttgttctgcagaaggtgtgacgggagctgccacttcccctagtacaaatggtgcttctccagtgatggataaaccaccagaaatggaagcagaaaatagtgaggttgatgaaaatgttccaacagcagaagaagcaactgaagctacagaagggaatgcggggtcagctgaagacacagtggacatctcccaaactggcgtctacacagagcatgtctttacagatcctttgggagttcagatcccagaagacctctccccagtgtatcagtcgagcaatgactcagatgcatataaagatcaaatatcagtactgccaaatgaacaagacttggtgagagaagaagcccagaaaatgagtagtcttttaccaactatgtggcttggagctcaaaatggctgtttgtatgtccattcatctgtagcccagtggaggaaatgtctccattccattaaacttaaagattcgattctcagtattgtacacgtgaagggaatcgtgttagtagccctggctgacggcacccttgcaatctttcacagaggagtggatgggcagtgggatttgtcaaactatcacctcttagaccttggacggcctcatcattccatccgttgcatgactgtggtacatgacaaagtctggtgtggctataggaacaaaatctatgtggtgcagccaaaggccatgaaaatagagaaatcttttgatgcacatcccaggaaggagagccaagtgcgacagcttgcgtgggtgggggatggcgtgtgggtctccattcgcttggattctacgctccgtctctatcatgcacacacttatcaacatctacaggatgtggacattgagccttatgtaagcaaaatgttaggtactggaaaactgggcttctcttttgtgagaattacagctcttatggtgtcttgtaatcgtttgtgggtggggacaggaaatggtgtcattatctccatcccattgacagaaaccgtaatcctccaccagggacgtttactggggctgagggcaaataaaacctcaggtgtaccaggaaatcgtcctggaagtgtaatccgtgtatatggtgatgaaaacagtgataaagtgactccagggacatttataccctattgttcaatggcacatgcacagctttgcttccatgggcaccgggatgctgtgaaattctttgtggcagtcccaggtcaagtcatcagcccacaaagtagcagtagtggcacggatctgacgggtgacaaagcagggccatctgcacaggagcctggtagtcagacgcccttgaagtctatgcttgtcatcagtggaggagagggctacatcgacttccgaatgggtgatgaaggtggagaatcagaacttcttggagaggatcttccacttgaaccttctgtcaccaaagcagaaaggagtcacttgatagtgtggcaagtgatgtatggcaatgagtgagcccatgggaaacaggtggagatggggaagccgtctcttctgcatggtttattttccctctatccttttatttaatgctcttttgtgagataagtttcaccacataatgtgtgagcattttttcctgttaactttatattacaaaatccgttctaccataacaatacagaggaactagctgtgttactgcaccagtgttataggtaacttcagtatattatgaacaaatcaaagaatgtttacttcctgcaaactggtgaattatagaaagcaatccagatgtggtttactctgccacagtctaatgtcattcacttcatttgatggggtcacttgttagctgtcactaataatggaattaatgggaaacacttgataaatgaaactgtaccgttaaatacaatagctgagttttccccagtgtattgtaaaattgacacacactaatacaagatggattatcaggatgtatctaaatgtcccgagagggttaaaagctaactgtaaattactttaactttcactttcaaatctgacaaatcttgtttatatggtatataaaactttgttttcatcagatttgggggggttttatattaaagaaattaagactacactatttaaataaacgtttcctgtttctgacttattagagctctaaagtttatgaggcctacttctctgaatattctgatgggttttttttgagaccagtctcattttcatactgacatgtctgaaagatttattatttataaagcttaggacatactctgggaagcttagaagatacttcagcactgggaggattttttaaaggaaatgtgttttgtatttcttgtaccagagaatggtgatgttgattgagttttttccatgtaaaaaatgtacttgtttgccaaatgttcctagattgctcttaacctgttaatacaagtaaaactgtagtggggatggagtctggcctaagtacagaatgagggatttaattagaaaagttattttcttttgttctgtatcaaactgcagaacagctatatacttggtattttgtacgtgaataacgttttagcttttgtgcccttttgagcttgaagggttatcctcaaaggggaaaactatgaaggggaagaagacaaacctaagataccataaagtaaaggttgacattacatattttcattcacaatgcccattaaaaaaaaaaaataggttgggcatggtggctcacgcctgtaatcccagcactttaggaggctgaggcggatggattgcttgagcccaggagttcaagaccagcctgggcaacatggcgaaaccctgtctctaccaaaaaaaaaaaacaaaataaattaaccgggtgtggtggcacatgcctgtagtcccagctacttgggaggctgaggtgggaggatgacctgggcccaggaggtggaggttgcagtgagccttgatagcaccactgcactccagcctgggtgacggagcaagaccctgtctcaaaacagacaaacaagcaaaaaatagattaaagtctggatttcactgattttcttgcttaataagttttttaaaaccacgatgctgcaattttttccctctcaagcttcttgaaaatgtgtgatttacccttttttatctattactctaggcaaagctaaatatgatttttttttttttttttgagacggagtctggctctgttgcccaggctggaatgcagtggtgcgatctcagctcactgcaacctccacctctcaggttcaagtagttctcctgcctcagcctcccaagtagctgggattacaggtgtgtgccaccctgcccagctaatttttgtatttttagtagagacagggtttcgccacgttggccaggctggtctcaaactcctgacctcagatgatctacccgccttggcctcccgaagtgcttgaattacaggcgtgagcccccgcgccggtccgaagcaaagctaaatgtaattttatgtactgttttaacagtataaacctatgggataaaggcccccaatcatcagaaggactactgaaaagaaaagaaagcaaacgtagatgtcaaattgtctaaacattcttaagtaccactgattttttttttctggactattatacaaagatgtctgtaaaaagtataccagtggcttttatgcatatacacgattaggctagattgtgaagtacatgggatttcatgagccagaggaggcatttggatccattgggccacatgtgactataagcacattgtgtacacaataaaattgtagccactcatgtattaaaactgttttggtaaaagctgtattaaaagaataattttttgcttgagctacttagtcacttttttgcagggcaccaaaatgtaggctacttttccatagcttgtttgctatgtttttatttcatcttaaatctgagccatttttggcaatatcttttaaaaaatcattattaaacatttattggaaatgttgtatagattcacaagaaagagacaccaaagtgtttgggaattttaatcccaagaagtaaacatcccagagtcagatcccatttgctgttgttcagccatgtttgtatgactgaatgtaatttaggaaatcaggagttagagatgaaaaatacaaacatgtcaaatggttgtaattgctttttttgaacttactggctttaacttaagtaatataggtgtgtagttgttttatctaaagatgtcagattatctgtggccctgttaattaactgcagggaccagagagaggacaaaaatgcctgtataatttgctttaaaggcttgtccttatgtttgtaatttcagttaaatattttctacagattgcttcacttcccctttcccccaataacaagttcatattcttgtaatgtttactttggtcaacgtggtaatttttggaagaaaatgccaaaatgtaagcttctcacaagcagcaaaggaatgtaactgcctgtagctaccacatcaagggagagaagaggcttgcgtactttgggttgatctcactgtacaaaaaaagtgtacccctattggaagaaataaggaatacttgaaggtttctcctttttttacacttgagtcatgtgcaaggttgaaccatatgaaattgccagtgttcaaccattgctgatctgcaaaagcgacaatatcatatgcctcaacctaacacttactcttaaatgcaggttaaaatctctgtgaggcaaagggataatattctctaggaactcacttttgagagtatttttctctaacccatgtggatctaaattttaaaaataggaatgaatctcttaattgcagcttgtggagagtataaaacattttgagcacaatatgcagcacataacttttcagattgtgtttgcatagaaaaggttaaaatcaattctttcagttactgtattgttcatttcttgtaaaggtcttcctacatttgagacgagaccctttaacataggctgccttagtaacaaaataaaacagatgtgtcataatattaactgtcctaaagaacatgtgtcttgcaaatgccatggaactgaatatttatttccttgtgagtattatgaccgttaccaaaggactcaaccagatttagggctcttcttaattgatcatgttcagaaagggactcatttggtcccactttgtaacatgggaagagtagaagagaaaattaaatgtggaaatcataaatgcttttctaacagggttatgctattctgtaacactaaatgtctgtcttttctcttaaaagattaagttttattaattttgtcatacatttctctatttgaatatatcttaaccattttatgttccaaattcgttttttgtccaagacattctatcagaattttacttgcctctataatctgaaaaatgggttctagaatgtcccacttgctgtctcttagaggctgagcttcatttctatgagcaaagagctcatttagcaatgtagttatttcagtatttatttctattatggaatccctggggttcagaatgtaactttgtacatgagatatatataaatatgtatatgaacatgta

SEQ ID NO: 302005 - DNA, 7158 bp, Homo sapiens
ttcctacctctgaacgacatccaggaaactagaaatgtatctactggctctgctgaaaatgaagaaaagtcagaagttcaagcaatcatcgaatctactcctgagctggatatggacaaagatctcagtggatataaaggttcaagcactcccaccaaaggcatagagaacaaagcttttgatcgcaatacagaatctctctttgaagaactgtcttcagctggctcaggcctaataggagatgtggatgaaggagcagatttactaggaatgggtcgggaagttgagaatcttatattagaaaatacacaactgttggaaaccaaaaatgctttgaacatagtgaagaatgatttgatagcaaaagtggatgaactgacctgtgagaaagatgtgctgcaaggggaattggaggctgtgaagcaagccaaactgaaactagaggaaaagaacagagaattggaggaagagcttaggaaagctcgggcagaagctgaagatgcaaggcaaaaagcaaaagatgacgatgatagtgatattcccacagcccagaggaaacggtttactagagtagaaatggcccgtgttctcatggagcgaaaccagtataaagagagattgatggagcttcaggaagctgttcgatggacagagatgattcgggcatcacgagaaaatccagccatgcaggaaaaaaaaaggtcaagcatttggcagtttttcagccgacttttcagctcctcaagtaacacgactaagaagcctgaaccacctgttaatctgaagtacaatgcacccacgtctcatgttactccgtccgtcaagaaaagaagcagcaccttatctcagctccctggggataagtccaaagcctttgatttccttagtgaagaaactgaagctagtttagcctcacgcagagaacaaaagagagagcagtatcgtcaggtaaaagcacatgttcagaaggaagacggtagagtgcaggcttttggctggagtctgcctcagaagtacaaacaggtaaccaatggtcaaggtgaaaataagatgaaaaatttacctgtgcctgtctatctcagacctctggatgaaaaagatacatcaatgaagctgtggtgtgctgttggagtcaatttatctggtgggaagaccagagatggtggttctgttgttggagcaagtgtattttacaaggatgttgctggtttggatacagaaggcagtaaacagcgaagtgcctctcagagtagtttagataagttagatcaggaacttaaggaacagcagaaggagttaaaaaatcaagaagaattatccagtctagtttggatctgtaccagcactcattcggctacaaaagttcttattattgatgctgttcaacctggcaacatcctagacagtttcactgtttgcaactctcatgttctgtgcattgcaagtgtgccaggtgcacgagaaacagactaccctgcaggagaagatctttcagaatctggtcaggtagacaaagcatctttatgtggaagtatgacaagcaacagctcagcagagacagacagcctgttaggaggcatcacagtggttggttgttctgcagaaggtgtgacgggagctgccacttcccctagtacaaatggtgcttctccagtgatggataaaccaccagaaatggaagcagaaaatagtgaggttgatgaaaatgttccaacagcagaagaagcaactgaagctacagaagggaatgcggggtcagctgaagacacagtggacatctcccaaactggcgtctacacagagcatgtctttacagatcctttgggagttcagatcccagaagacctctccccagtgtatcagtcgagcaatgactcagatgcatataaagatcaaatatcagtactgccaaatgaacaagacttggtgagagaagaagcccagaaaatgagtagtcttttaccaactatgtggcttggagctcaaaatggctgtttgtatgtccattcatctgtagcccagtggaggaaatgtctccattccattaaacttaaagattcgattctcagtattgtacacgtgaagggaatcgtgttagtagccctggctgacggcacccttgcaatctttcacagaggagtggatgggcagtgggatttgtcaaactatcacctcttagaccttggacggcctcatcattccatccgttgcatgactgtggtacatgacaaagtctggtgtggctataggaacaaaatctatgtggtgcagccaaaggccatgaaaatagagaaatcttttgatgcacatcccaggaaggagagccaagtgcgacagcttgcgtgggtgggggatggcgtgtgggtctccattcgcttggattctacgctccgtctctatcatgcacacacttatcaacatctacaggatgtggacattgagccttatgtaagcaaaatgttaggtactggaaaactgggcttctcttttgtgagaattacagctcttatggtgtcttgtaatcgtttgtgggtggggacaggaaatggtgtcattatctccatcccattgacagaaaccgtaatcctccaccagggacgtttactggggctgagggcaaataaaacctcaggtgtaccaggaaatcgtcctggaagtgtaatccgtgtatatggtgatgaaaacagtgataaagtgactccagggacatttataccctattgttcaatggcacatgcacagctttgcttccatgggcaccgggatgctgtgaaattctttgtggcagtcccaggtcaagtcatcagcccacaaagtagcagtagtggcacggatctgacgggtgacaaagcagggccatctgcacaggagcctggtagtcagacgcccttgaagtctatgcttgtcatcagtggaggagagggctacatcgacttccgaatgggtgatgaaggtggagaatcagaacttcttggagaggatcttccacttgaaccttctgtcaccaaagcagaaaggagtcacttgatagtgtggcaagtgatgtatggcaatgagtgagcccatgggaaacaggtggagatggggaagccgtctcttctgcatggtttattttccctctatccttttatttaatgctcttttgtgagataagtttcaccacataatgtgtgagcattttttcctgttaactttatattacaaaatccgttctaccataacaatacagaggaactagctgtgttactgcaccagtgttataggtaacttcagtatattatgaacaaatcaaagaatgtttacttcctgcaaactggtgaattatagaaagcaatccagatgtggtttactctgccacagtctaatgtcattcacttcatttgatggggtcacttgttagctgtcactaataatggaattaatgggaaacacttgataaatgaaactgtaccgttaaatacaatagctgagttttccccagtgtattgtaaaattgacacacactaatacaagatggattatcaggatgtatctaaatgtcccgagagggttaaaagctaactgtaaattactttaactttcactttcaaatctgacaaatcttgtttatatggtatataaaactttgttttcatcagatttgggggggttttatattaaagaaattaagactacactatttaaataaacgtttcctgtttctgacttattagagctctaaagtttatgaggcctacttctctgaatattctgatgggttttttttgagaccagtctcattttcatactgacatgtctgaaagatttattatttataaagcttaggacatactctgggaagcttagaagatacttcagcactgggaggattttttaaaggaaatgtgttttgtatttcttgtaccagagaatggtgatgttgattgagttttttccatgtaaaaaatgtacttgtttgccaaatgttcctagattgctcttaacctgttaatacaagtaaaactgtagtggggatggagtctggcctaagtacagaatgagggatttaattagaaaagttattttcttttgttctgtatcaaactgcagaacagctatatacttggtattttgtacgtgaataacgttttagcttttgtgcccttttgagcttgaagggttatcctcaaaggggaaaactatgaaggggaagaagacaaacctaagataccataaagtaaaggttgacattacatattttcattcacaatgcccattaaaaaaaaaaaataggttgggcatggtggctcacgcctgtaatcccagcactttaggaggctgaggcggatggattgcttgagcccaggagttcaagaccagcctgggcaacatggcgaaaccctgtctctaccaaaaaaaaaaaacaaaataaattaaccgggtgtggtggcacatgcctgtagtcccagctacttgggaggctgaggtgggaggatgacctgggcccaggaggtggaggttgcagtgagccttgatagcaccactgcactccagcctgggtgacggagcaagaccctgtctcaaaacagacaaacaagcaaaaaatagattaaagtctggatttcactgattttcttgcttaataagttttttaaaaccacgatgctgcaattttttccctctcaagcttcttgaaaatgtgtgatttacccttttttatctattactctaggcaaagctaaatatgatttttttttttttttttgagacggagtctggctctgttgcccaggctggaatgcagtggtgcgatctcagctcactgcaacctccacctctcaggttcaagtagttctcctgcctcagcctcccaagtagctgggattacaggtgtgtgccaccctgcccagctaatttttgtatttttagtagagacagggtttcgccacgttggccaggctggtctcaaactcctgacctcagatgatctacccgccttggcctcccgaagtgcttgaattacaggcgtgagcccccgcgccggtccgaagcaaagctaaatgtaattttatgtactgttttaacagtataaacctatgggataaaggcccccaatcatcagaaggactactgaaaagaaaagaaagcaaacgtagatgtcaaattgtctaaacattcttaagtaccactgattttttttttctggactattatacaaagatgtctgtaaaaagtataccagtggcttttatgcatatacacgattaggctagattgtgaagtacatgggatttcatgagccagaggaggcatttggatccattgggccacatgtgactataagcacattgtgtacacaataaaattgtagccactcatgtattaaaactgttttggtaaaagctgtattaaaagaataattttttgcttgagctacttagtcacttttttgcagggcaccaaaatgtaggctacttttccatagcttgtttgctatgtttttatttcatcttaaatctgagccatttttggcaatatcttttaaaaaatcattattaaacatttattggaaatgttgtatagattcacaagaaagagacaccaaagtgtttgggaattttaatcccaagaagtaaacatcccagagtcagatcccatttgctgttgttcagccatgtttgtatgactgaatgtaatttaggaaatcaggagttagagatgaaaaatacaaacatgtcaaatggttgtaattgctttttttgaacttactggctttaacttaagtaatataggtgtgtagttgttttatctaaagatgtcagattatctgtggccctgttaattaactgcagggaccagagagaggacaaaaatgcctgtataatttgctttaaaggcttgtccttatgtttgtaatttcagttaaatattttctacagattgcttcacttcccctttcccccaataacaagttcatattcttgtaatgtttactttggtcaacgtggtaatttttggaagaaaatgccaaaatgtaagcttctcacaagcagcaaaggaatgtaactgcctgtagctaccacatcaagggagagaagaggcttgcgtactttgggttgatctcactgtacaaaaaaagtgtacccctattggaagaaataaggaatacttgaaggtttctcctttttttacacttgagtcatgtgcaaggttgaaccatatgaaattgccagtgttcaaccattgctgatctgcaaaagcgacaatatcatatgcctcaacctaacacttactcttaaatgcaggttaaaatctctgtgaggcaaagggataatattctctaggaactcacttttgagagtatttttctctaacccatgtggatctaaattttaaaaataggaatgaatctcttaattgcagcttgtggagagtataaaacattttgagcacaatatgcagcacataacttttcagattgtgtttgcatagaaaaggttaaaatcaattctttcagttactgtattgttcatttcttgtaaaggtcttcctacatttgagacgagaccctttaacataggctgccttagtaacaaaataaaacagatgtgtcataatattaactgtcctaaagaacatgtgtcttgcaaatgccatggaactgaatatttatttccttgtgagtattatgaccgttaccaaaggactcaaccagatttagggctcttcttaattgatcatgttcagaaagggactcatttggtcccactttgtaacatgggaagagtagaagagaaaattaaatgtggaaatcataaatgcttttctaacagggttatgctattctgtaacactaaatgtctgtcttttctcttaaaagattaagttttattaattttgtcatacatttctctatttgaatatatcttaaccattttatgttccaaattcgttttttgtccaagacattctatcagaattttacttgcctctataatctgaaaaatgggttctagaatgtcccacttgctgtctcttagaggctgagcttcatttctatgagcaaagagctcatttagcaatgtagttatttcagtatttatttctattatggaatccctggggttcagaatgtaactttgtacatgagatatatataaatatgtatatgaacatgta

SEQ ID NO: 302006 - DNA, 7597 bp, Homo sapiens
tccggccccggcccccaccccgccgggcccagccccagccccggcccgggctccagccctagtacccgtcccagcccgagtcgggtccgtcccgtgcgggcaggtgccgcccctctgccggcgacgccccgggccgcccgcccgtccgcttgccaccatggagctggaggacggtgtggtgtatcaggaggagcccggcggctccggggccgtgatgtcggagcgggtgtccggcctggccggctccatctaccgcgagttcgagcggcttatcgggcgctatgacgaggaggtggtcaaagagctgatgccgctggtggtggctgtgctggagaacctggactcggtgttcgcgcaggaccaggagcaccaggtggagctggagctgctgcgggacgacaacgagcagctcatcacccagtacgagcgggagaaggcgctgcgcaagcacgctgaggagaaattcattgaatttgaagactctcaagaacaggaaaaaaaggacttacagacccgagtggaatctttagaatctcaaacaagacaacttgagctgaaagcgaaaaactatgctgaccagattagcagacttgaagaaagagaagcagaactgaagaaggaatataatgcattacatcaaagacacactgagatgatccataattatatggaacatttagaaagaacaaaacttcatcagctctcagggagtgatcaactagaatccacagctcatagtagaattagaaaagaacgccctatatcattaggaattttcccattacctgctggagatggattgcttacacctgatgctcagaaaggaggagagacccctggatctgagcaatggaaatttcaggaattaagtcaaccacgttctcataccagcctgaaggatgagctttctgatgttagccaaggcggatctaaagctaccactccagcatcaacagctaattcagatgtggcaacaattcctactgatactcccttaaaggaagaaaacgaaggatttgtgaaggttacagatgcgccaaataaatcagagataagcaaacacattgaagtacaggtagcccaggaaactagaaatgtatctactggctctgctgaaaatgaagaaaagtcagaagttcaagcaatcatcgaatctactcctgagctggatatggacaaagatctcagtggatataaaggttcaagcactcccaccaaaggcatagagaacaaagcttttgatcgcaatacagaatctctctttgaagaactgtcttcagctggctcaggcctaataggagatgtggatgaaggagcagatttactaggaatgggtcgggaagttgagaatcttatattagaaaatacacaactgttggaaaccaaaaatgctttgaacatagtgaagaatgatttgatagcaaaagtggatgaactgacctgtgagaaagatgtgctgcaaggggaattggaggctgtgaagcaagccaaactgaaactagaggaaaagaacagagaattggaggaagagcttaggaaagctcgggcagaagctgaagatgcaaggcaaaaagcaaaagatgacgatgatagtgatattcccacagcccagaggaaacggtttactagagtagaaatggcccgtgttctcatggagcgaaaccagtataaagagagattgatggagcttcaggaagctgttcgatggacagagatgattcgggcatcacgagaaaatccagccatgcaggaaaaaaaaaggtcaagcatttggcagtttttcagccgacttttcagctcctcaagtaacacgactaagaagcctgaaccacctgttaatctgaagtacaatgcacccacgtctcatgttactccgtccgtcaagaaaagaagcagcaccttatctcagctccctggggataagtccaaagcctttgatttccttagtgaagaaactgaagctagtttagcctcacgcagagaacaaaagagagagcagtatcgtcaggtaaaagcacatgttcagaaggaagacggtagagtgcaggcttttggctggagtctgcctcagaagtacaaacaggtaaccaatggtcaaggtgaaaataagatgaaaaatttacctgtgcctgtctatctcagacctctggatgaaaaagatacatcaatgaagctgtggtgtgctgttggagtcaatttatctggtgggaagaccagagatggtggttctgttgttggagcaagtgtattttacaaggatgttgctggtttggatacagaaggcagtaaacagcgaagtgcctctcagagtagtttagataagttagatcaggaacttaaggaacagcagaaggagttaaaaaatcaagaagaattatccagtctagtttggatctgtaccagcactcattcggctacaaaagttcttattattgatgctgttcaacctggcaacatcctagacagtttcactgtttgcaactctcatgttctgtgcattgcaagtgtgccaggtgcacgagaaacagactaccctgcaggagaagatctttcagaatctggtcaggtagacaaagcatctttatgtggaagtatgacaagcaacagctcagcagagacagacagcctgttaggaggcatcacagtggttggttgttctgcagaaggtgtgacgggagctgccacttcccctagtacaaatggtgcttctccagtgatggataaaccaccagaaatggaagcagaaaatagtgaggttgatgaaaatgttccaacagcagaagaagcaactgaagctacagaagggaatgcggggtcagctgaagacacagtggacatctcccaaactggcgtctacacagagcatgtctttacagatcctttgggagttcagatcccagaagacctctccccagtgtatcagtcgagcaatgactcagatgcatataaagatcaaatatcagtactgccaaatgaacaagacttggtgagagaagaagcccagaaaatgagtagtcttttaccaactatgtggcttggagctcaaaatggctgtttgtatgtccattcatctgtagcccagtggaggaaatgtctccattccattaaacttaaagattcgattctcagtattgtacacgtgaagggaatcgtgttagtagccctggctgacggcacccttgcaatctttcacagaggagtggatgggcagtgggatttgtcaaactatcacctcttagaccttggacggcctcatcattccatccgttgcatgactgtggtacatgacaaagtctggtgtggctataggaacaaaatctatgtggtgcagccaaaggccatgaaaatagagaaatcttttgatgcacatcccaggaaggagagccaagtgcgacagcttgcgtgggtgggggatggcgtgtgggtctccattcgcttggattctacgctccgtctctatcatgcacacacttatcaacatctacaggatgtggacattgagccttatgtaagcaaaatgttaggtactggaaaactgggcttctcttttgtgagaattacagctcttatggtgtcttgtaatcgtttgtgggtggggacaggaaatggtgtcattatctccatcccattgacagaaaccgtaatcctccaccagggacgtttactggggctgagggcaaataaaacctcaggtgtaccaggaaatcgtcctggaagtgtaatccgtgtatatggtgatgaaaacagtgataaagtgactccagggacatttataccctattgttcaatggcacatgcacagctttgcttccatgggcaccgggatgctgtgaaattctttgtggcagtcccaggtcaagtcatcagcccacaaagtagcagtagtggcacggatctgacgggtgacaaagcagggccatctgcacaggagcctggtagtcagacgcccttgaagtctatgcttgtcatcagtggaggagagggctacatcgacttccgaatgggtgatgaaggtggagaatcagaacttcttggagaggatcttccacttgaaccttctgtcaccaaagcagaaaggagtcacttgatagtgtggcaagtgatgtatggcaatgagtgagcccatgggaaacaggtggagatggggaagccgtctcttctgcatggtttattttccctctatccttttatttaatgctcttttgtgagataagtttcaccacataatgtgtgagcattttttcctgttaactttatattacaaaatccgttctaccataacaatacagaggaactagctgtgttactgcaccagtgttataggtaacttcagtatattatgaacaaatcaaagaatgtttacttcctgcaaactggtgaattatagaaagcaatccagatgtggtttactctgccacagtctaatgtcattcacttcatttgatggggtcacttgttagctgtcactaataatggaattaatgggaaacacttgataaatgaaactgtaccgttaaatacaatagctgagttttccccagtgtattgtaaaattgacacacactaatacaagatggattatcaggatgtatctaaatgtcccgagagggttaaaagctaactgtaaattactttaactttcactttcaaatctgacaaatcttgtttatatggtatataaaactttgttttcatcagatttgggggggttttatattaaagaaattaagactacactatttaaataaacgtttcctgtttctgacttattagagctctaaagtttatgaggcctacttctctgaatattctgatgggttttttttgagaccagtctcattttcatactgacatgtctgaaagatttattatttataaagcttaggacatactctgggaagcttagaagatacttcagcactgggaggattttttaaaggaaatgtgttttgtatttcttgtaccagagaatggtgatgttgattgagttttttccatgtaaaaaatgtacttgtttgccaaatgttcctagattgctcttaacctgttaatacaagtaaaactgtagtggggatggagtctggcctaagtacagaatgagggatttaattagaaaagttattttcttttgttctgtatcaaactgcagaacagctatatacttggtattttgtacgtgaataacgttttagcttttgtgcccttttgagcttgaagggttatcctcaaaggggaaaactatgaaggggaagaagacaaacctaagataccataaagtaaaggttgacattacatattttcattcacaatgcccattaaaaaaaaaaaataggttgggcatggtggctcacgcctgtaatcccagcactttaggaggctggtctcaaactcctgacctcagatgatctacccgccttggcctcccgaagtgcttgaattacaggcgtgagcccccgcgccggtccgaagcaaagctaaatgtaattttatgtactgttttaacagtataaacctatgggataaaggcccccaatcatcagaaggactactgaaaagaaaagaaagcaaacgtagatgtcaaattgtctaaacattcttaagtaccactgattttttttttctggactattatacaaagatgtctgtaaaaagtataccagtggcttttatgcatatacacgattaggctagattgtgaagtacatgggatttcatgagccagaggaggcatttggatccattgggccacatgtgactataagcacattgtgtacacaataaaattgtagccactcatgtattaaaactgttttggtaaaagctgtattaaaagaataattttttgcttgagctacttagtcacttttttgcagggcaccaaaatgtaggctacttttccatagcttgtttgctatgtttttatttcatcttaaatctgagccatttttggcaatatcttttaaaaaatcattattaaacatttattggaaatgttgtatagattcacaagaaagagacaccaaagtgtttgggaattttaatcccaagaagtaaacatcccagagtcagatcccatttgctgttgttcagccatgtttgtatgactgaatgtaatttaggaaatcaggagttagagatgaaaaatacaaacatgtcaaatggttgtaattgctttttttgaacttactggctttaacttaagtaatataggtgtgtagttgttttatctaaagatgtcagattatctgtggccctgttaattaactgcagggaccagagagaggacaaaaatgcctgtataatttgctttaaaggcttgtccttatgtttgtaatttcagttaaatattttctacagattgcttcacttcccctttcccccaataacaagttcatattcttgtaatgtttactttggtcaacgtggtaatttttggaagaaaatgccaaaatgtaagcttctcacaagcagcaaaggaatgtaactgcctgtagctaccacatcaagggagagaagaggcttgcgtactttgggttgatctcactgtacaaaaaaagtgtacccctattggaagaaataaggaatacttgaaggtttctcctttttttacacttgagtcatgtgcaaggttgaaccatatgaaattgccagtgttcaaccattgctgatctgcaaaagcgacaatatcatatgcctcaacctaacacttactcttaaatgcaggttaaaatctctgtgaggcaaagggataatattctctaggaactcacttttgagagtatttttctctaacccatgtggatctaaattttaaaaataggaatgaatctcttaattgcagcttgtggagagtataaaacattttgagcacaatatgcagcacataacttttcagattgtgtttgcatagaaaaggttaaaatcaattctttcagttactgtattgttcatttcttgtaaaggtcttcctacatttgagacgagaccctttaacataggctgccttagtaacaaaataaaacagatgtgtcataatattaactgtcctaaagaacatgtgtcttgcaaatgccatggaactgaatatttatttccttgtgagtattatgaccgttaccaaaggactcaaccagatttagggctcttcttaattgatcatgttcagaaagggactcatttggtcccactttgtaacatgggaagagtagaagagaaaattaaatgtggaaatcataaatgcttttctaacagggttatgctattctgtaacactaaatgtctgtcttttctcttaaaagattaagttttattaattttgtcatacatttctctatttgaatatatcttaaccattttatgttccaaattcgttttttgtccaagacattctatcagaattttacttgcctctataatctgaaaaatgggttctagaatgtcccacttgctgtctcttagaggctgagcttcatttctatgagcaaagagctcatttagcaatgtagttatttcagtatttatttctattatggaatccctggggttcagaatgtaactttgtacatgagatatatataaatatgtatatgaacatgta

SEQ ID NO: 302007 - DNA, 7628 bp, Homo sapiens
tccggccccggcccccaccccgccgggcccagccccagccccggcccgggctccagccctagtacccgtcccagcccgagtcgggtccgtcccgtgcgggcaggtgccgcccctctgccggcgacgccccgggccgcccgcccgtccgcttgccaccatggagctggaggacggtgtggtgtatcaggaggagcccggcggctccggggccgtgatgtcggagcgggtgtccggcctggccggctccatctaccgcgagttcgagcggcttatcgggcgctatgacgaggaggtggtcaaagagctgatgccgctggtggtggctgtgctggagaacctggactcggtgttcgcgcaggaccaggagcaccaggtggagctggagctgctgcgggacgacaacgagcagctcatcacccagtacgagcgggagaaggcgctgcgcaagcacgctgaggagaaattcattgaatttgaagactctcaagaacaggaaaaaaaggacttacagacccgagtggaatctttagaatctcaaacaagacaacttgagctgaaagcgaaaaactatgctgaccagattagcagacttgaagaaagagaagcagaactgaagaaggaatataatgcattacatcaaagacacactgagatgatccataattatatggaacatttagaaagaacaaaacttcatcagctctcagggagtgatcaactagaatccacagctcatagtagaattagaaaagaacgccctatatcattaggaattttcccattacctgctggagatggattgcttacacctgatgctcagaaaggaggagagacccctggatctgagcaatggaaatttcaggaattaagtcaaccacgttctcataccagcctgaaggatgagctttctgatgttagccaaggcggatctaaagctaccactccagcatcaacagctaattcagatgtggcaacaattcctactgatactcccttaaaggaagaaaacgaaggatttgtgaaggttacagatgcgccaaataaatcagagataagcaaacacattgaagtacaggtagcccaggaaactagaaatgtatctactggctctgctgaaaatgaagaaaagtcagaagttcaagcaatcatcgaatctactcctgagctggatatggacaaagatctcagtggatataaaggttcaagcactcccaccaaaggcatagagaacaaagcttttgatcgcaatacagaatctctctttgaagaactgtcttcagctggctcaggcctaataggagatgtggatgaaggagcagatttactaggaatgggtcgggaagttgagaatcttatattagaaaatacacaactgttggaaaccaaaaatgctttgaacatagtgaagaatgatttgatagcaaaagtggatgaactgacctgtgagaaagatgtgctgcaaggggaattggaggctgtgaagcaagccaaactgaaactagaggaaaagaacagagaattggaggaagagcttaggaaagctcgggcagaagctgaagatgcaaggcaaaaagcaaaagatgacgatgatagtgatattcccacagcccagaggaaacggtttactagagtagaaatggcccgtgttctcatggagcgaaaccagtataaagagagattgatggagcttcaggaagctgttcgatggacagagatgattcgggcatcacgagaaaatccagccatgcaggaaaaaaaaaggtcaagcatttggcagtttttcagccgacttttcagctcctcaagtaacacgactaagaagcctgaaccacctgttaatctgaagtacaatgcacccacgtctcatgttactccgtccgtcaagaaaagaagcagcaccttatctcagctccctggggataagtccaaagcctttgatttccttagtgaagaaactgaagctagtttagcctcacgcagagaacaaaagagagagcagtatcgtcaggtaaaagcacatgttcagaaggaagacggtagagtgcaggcttttggctggagtctgcctcagaagtacaaacaggtaaccaatggtcaaggtgaaaataagatgaaaaatttacctgtgcctgtctatctcagacctctggatgaaaaagatacatcaatgaagctgtggtgtgctgttggagtcaatttatctggtgggaagaccagagatggtggttctgttgttggagcaagtgtattttacaaggatgttgctggtttggatacagaaggcagtaaacagcgaagtgcctctcagagtagtttagataagttagatcaggaacttaaggaacagcagaaggagttaaaaaatcaagaagaattatccagtctagtttggatctgtaccagcactcattcggctacaaaagttcttattattgatgctgttcaacctggcaacatcctagacagtttcactgtttgcaactctcatgttctgtgcattgcaagtgtgccaggtgcacgagaaacagactaccctgcaggagaagatctttcagaatctggtcaggtagacaaagcatctttatgtggaagtatgacaagcaacagctcagcagagacagacagcctgttaggaggcatcacagtggttggttgttctgcagaaggtgtgacgggagctgccacttcccctagtacaaatggtgcttctccagtgatggataaaccaccagaaatggaagcagaaaatagtgaggttgatgaaaatgttccaacagcagaagaagcaactgaagctacagaagggaatgcggggtcagctgaagacacagtggacatctcccaaactggcgtctacacagagcatgtctttacagatcctttgggagttcagatcccagaagacctctccccagtgtatcagtcgagcaatgactcagatgcatataaagatcaaatatcagtactgccaaatgaacaagacttggtgagagaagaagcccagaaaatgagtagtcttttaccaactatgtggcttggagctcaaaatggctgtttgtatgtccattcatctgtagcccagtggaggaaatgtctccattccattaaacttaaagattcgattctcagtattgtacacgtgaagggaatcgtgttagtagccctggctgacggcacccttgcaatctttcacagaggagtggatgggcagtgggatttgtcaaactatcacctcttagaccttggacggcctcatcattccatccgttgcatgactgtggtacatgacaaagtctggtgtggctataggaacaaaatctatgtggtgcagccaaaggccatgaaaatagagaaatcttttgatgcacatcccaggaaggagagccaagtgcgacagcttgcgtgggtgggggatggcgtgtgggtctccattcgcttggattctacgctccgtctctatcatgcacacacttatcaacatctacaggatgtggacattgagccttatgtaagcaaaatgttaggtactggaaaactgggcttctcttttgtgagaattacagctcttatggtgtcttgtaatcgtttgtgggtggggacaggaaatggtgtcattatctccatcccattgacagaaaccgtaatcctccaccagggacgtttactggggctgagggcaaataaaacctcaggtgtaccaggaaatcgtcctggaagtgtaatccgtgtatatggtgatgaaaacagtgataaagtgactccagggacatttataccctattgttcaatggcacatgcacagctttgcttccatgggcaccgggatgctgtgaaattctttgtggcagtcccaggtcaagtcatcagcccacaaagtagcagtagtggcacggatctgacgggtgacaaagcagggccatctgcacaggagcctggtagtcagacgcccttgaagtctatgcttgtcatcagtggaggagagggctacatcgacttccgaatgggtgatgaaggtggagaatcagaacttcttggagaggatcttccacttgaaccttctgtcaccaaagcagaaaggagtcacttgatagtgtggcaagtgatgtatggcaatgagtgagcccatgggaaacaggtggagatggggaagccgtctcttctgcatggtttattttccctctatccttttatttaatgctcttttgtgagataagtttcaccacataatgtgtgagcattttttcctgttaactttatattacaaaatccgttctaccataacaatacagaggaactagctgtgttactgcaccagtgttataggtaacttcagtatattatgaacaaatcaaagaatgtttacttcctgcaaactggtgaattatagaaagcaatccagatgtggtttactctgccacagtctaatgtcattcacttcatttgatggggtcacttgttagctgtcactaataatggaattaatgggaaacacttgataaatgaaactgtaccgttaaatacaatagctgagttttccccagtgtattgtaaaattgacacacactaatacaagatggattatcaggatgtatctaaatgtcccgagagggttaaaagctaactgtaaattactttaactttcactttcaaatctgacaaatcttgtttatatggtatataaaactttgttttcatcagatttgggggggttttatattaaagaaattaagactacactatttaaataaacgtttcctgtttctgacttattagagctctaaagtttatgaggcctacttctctgaatattctgatgggttttttttgagaccagtctcattttcatactgacatgtctgaaagatttattatttataaagcttaggacatactctgggaagcttagaagatacttcagcactgggaggattttttaaaggaaatgtgttttgtatttcttgtaccagagaatggtgatgttgattgagttttttccatgtaaaaaatgtacttgtttgccaaatgttcctagattgctcttaacctgttaatacaagtaaaactgtagtggggatggagtctggcctaagtacagaatgagggatttaattagaaaagttattttcttttgttctgtatcaaactgcagaacagctatatacttggtattttgtacgtgaataacgttttagcttttgtgcccttttgagcttgaagggttatcctcaaaggggaaaactatgaaggggaagaagacaaacctaagataccataaagtaaaggttgacattacatattttcattcacaatgcccattaaaaaaaaaaaataggttgggcatggtggctcacgcctgtaatcccagcactttaggaggctgaggcggatggattgcttgagcccaggagctggtctcaaactcctgacctcagatgatctacccgccttggcctcccgaagtgcttgaattacaggcgtgagcccccgcgccggtccgaagcaaagctaaatgtaattttatgtactgttttaacagtataaacctatgggataaaggcccccaatcatcagaaggactactgaaaagaaaagaaagcaaacgtagatgtcaaattgtctaaacattcttaagtaccactgattttttttttctggactattatacaaagatgtctgtaaaaagtataccagtggcttttatgcatatacacgattaggctagattgtgaagtacatgggatttcatgagccagaggaggcatttggatccattgggccacatgtgactataagcacattgtgtacacaataaaattgtagccactcatgtattaaaactgttttggtaaaagctgtattaaaagaataattttttgcttgagctacttagtcacttttttgcagggcaccaaaatgtaggctacttttccatagcttgtttgctatgtttttatttcatcttaaatctgagccatttttggcaatatcttttaaaaaatcattattaaacatttattggaaatgttgtatagattcacaagaaagagacaccaaagtgtttgggaattttaatcccaagaagtaaacatcccagagtcagatcccatttgctgttgttcagccatgtttgtatgactgaatgtaatttaggaaatcaggagttagagatgaaaaatacaaacatgtcaaatggttgtaattgctttttttgaacttactggctttaacttaagtaatataggtgtgtagttgttttatctaaagatgtcagattatctgtggccctgttaattaactgcagggaccagagagaggacaaaaatgcctgtataatttgctttaaaggcttgtccttatgtttgtaatttcagttaaatattttctacagattgcttcacttcccctttcccccaataacaagttcatattcttgtaatgtttactttggtcaacgtggtaatttttggaagaaaatgccaaaatgtaagcttctcacaagcagcaaaggaatgtaactgcctgtagctaccacatcaagggagagaagaggcttgcgtactttgggttgatctcactgtacaaaaaaagtgtacccctattggaagaaataaggaatacttgaaggtttctcctttttttacacttgagtcatgtgcaaggttgaaccatatgaaattgccagtgttcaaccattgctgatctgcaaaagcgacaatatcatatgcctcaacctaacacttactcttaaatgcaggttaaaatctctgtgaggcaaagggataatattctctaggaactcacttttgagagtatttttctctaacccatgtggatctaaattttaaaaataggaatgaatctcttaattgcagcttgtggagagtataaaacattttgagcacaatatgcagcacataacttttcagattgtgtttgcatagaaaaggttaaaatcaattctttcagttactgtattgttcatttcttgtaaaggtcttcctacatttgagacgagaccctttaacataggctgccttagtaacaaaataaaacagatgtgtcataatattaactgtcctaaagaacatgtgtcttgcaaatgccatggaactgaatatttatttccttgtgagtattatgaccgttaccaaaggactcaaccagatttagggctcttcttaattgatcatgttcagaaagggactcatttggtcccactttgtaacatgggaagagtagaagagaaaattaaatgtggaaatcataaatgcttttctaacagggttatgctattctgtaacactaaatgtctgtcttttctcttaaaagattaagttttattaattttgtcatacatttctctatttgaatatatcttaaccattttatgttccaaattcgttttttgtccaagacattctatcagaattttacttgcctctataatctgaaaaatgggttctagaatgtcccacttgctgtctcttagaggctgagcttcatttctatgagcaaagagctcatttagcaatgtagttatttcagtatttatttctattatggaatccctggggttcagaatgtaactttgtacatgagatatatataaatatgtatatgaacatgta

SEQ ID NO: 302008 - DNA, 8241 bp, Homo sapiens
tccggccccggcccccaccccgccgggcccagccccagccccggcccgggctccagccctagtacccgtcccagcccgagtcgggtccgtcccgtgcgggcaggtgccgcccctctgccggcgacgccccgggccgcccgcccgtccgcttgccaccatggagctggaggacggtgtggtgtatcaggaggagcccggcggctccggggccgtgatgtcggagcgggtgtccggcctggccggctccatctaccgcgagttcgagcggcttatcgggcgctatgacgaggaggtggtcaaagagctgatgccgctggtggtggctgtgctggagaacctggactcggtgttcgcgcaggaccaggagcaccaggtggagctggagctgctgcgggacgacaacgagcagctcatcacccagtacgagcgggagaaggcgctgcgcaagcacgctgaggagaaattcattgaatttgaagactctcaagaacaggaaaaaaaggacttacagacccgagtggaatctttagaatctcaaacaagacaacttgagctgaaagcgaaaaactatgctgaccagattagcagacttgaagaaagagaagcagaactgaagaaggaatataatgcattacatcaaagacacactgagatgatccataattatatggaacatttagaaagaacaaaacttcatcagctctcagggagtgatcaactagaatccacagctcatagtagaattagaaaagaacgccctatatcattaggaattttcccattacctgctggagatggattgcttacacctgatgctcagaaaggaggagagacccctggatctgagcaatggaaatttcaggaattaagtcaaccacgttctcataccagcctgaaggatgagctttctgatgttagccaaggcggatctaaagctaccactccagcatcaacagctaattcagatgtggcaacaattcctactgatactcccttaaaggaagaaaacgaaggatttgtgaaggttacagatgcgccaaataaatcagagataagcaaacacattgaagtacaggtagcccaggaaactagaaatgtatctactggctctgctgaaaatgaagaaaagtcagaagttcaagcaatcatcgaatctactcctgagctggatatggacaaagatctcagtggatataaaggttcaagcactcccaccaaaggcatagagaacaaagcttttgatcgcaatacagaatctctctttgaagaactgtcttcagctggctcaggcctaataggagatgtggatgaaggagcagatttactaggaatgggtcgggaagttgagaatcttatattagaaaatacacaactgttggaaaccaaaaatgctttgaacatagtgaagaatgatttgatagcaaaagtggatgaactgacctgtgagaaagatgtgctgcaaggggaattggaggctgtgaagcaagccaaactgaaactagaggaaaagaacagagaattggaggaagagcttaggaaagctcgggcagaagctgaagatgcaaggcaaaaagcaaaagatgacgatgatagtgatattcccacagcccagaggaaacggtttactagagtagaaatggcccgtgttctcatggagcgaaaccagtataaagagagattgatggagcttcaggaagctgttcgatggacagagatgattcgggcatcacgagaaaatccagccatgcaggaaaaaaaaaggtcaagcatttggcagtttttcagccgacttttcagctcctcaagtaacacgactaagaagcctgaaccacctgttaatctgaagtacaatgcacccacgtctcatgttactccgtccgtcaagaaaagaagcagcaccttatctcagctccctggggataagtccaaagcctttgatttccttagtgaagaaactgaagctagtttagcctcacgcagagaacaaaagagagagcagtatcgtcaggtaaaagcacatgttcagaaggaagacggtagagtgcaggcttttggctggagtctgcctcagaagtacaaacaggtaaccaatggtcaaggtgaaaataagatgaaaaatttacctgtgcctgtctatctcagacctctggatgaaaaagatacatcaatgaagctgtggtgtgctgttggagtcaatttatctggtgggaagaccagagatggtggttctgttgttggagcaagtgtattttacaaggatgttgctggtttggatacagaaggcagtaaacagcgaagtgcctctcagagtagtttagataagttagatcaggaacttaaggaacagcagaaggagttaaaaaatcaagaagaattatccagtctagtttggatctgtaccagcactcattcggctacaaaagttcttattattgatgctgttcaacctggcaacatcctagacagtttcactgtttgcaactctcatgttctgtgcattgcaagtgtgccaggtgcacgagaaacagactaccctgcaggagaagatctttcagaatctggtcaggtagacaaagcatctttatgtggaagtatgacaagcaacagctcagcagagacagacagcctgttaggaggcatcacagtggttggttgttctgcagaaggtgtgacgggagctgccacttcccctagtacaaatggtgcttctccagtgatggataaaccaccagaaatggaagcagaaaatagtgaggttgatgaaaatgttccaacagcagaagaagcaactgaagctacagaagggaatgcggggtcagctgaagacacagtggacatctcccaaactggcgtctacacagagcatgtctttacagatcctttgggagttcagatcccagaagacctctccccagtgtatcagtcgagcaatgactcagatgcatataaagatcaaatatcagtactgccaaatgaacaagacttggtgagagaagaagcccagaaaatgagtagtcttttaccaactatgtggcttggagctcaaaatggctgtttgtatgtccattcatctgtagcccagtggaggaaatgtctccattccattaaacttaaagattcgattctcagtattgtacacgtgaagggaatcgtgttagtagccctggctgacggcacccttgcaatctttcacagaggagtggatgggcagtgggatttgtcaaactatcacctcttagaccttggacggcctcatcattccatccgttgcatgactgtggtacatgacaaagtctggtgtggctataggaacaaaatctatgtggtgcagccaaaggccatgaaaatagagaaatcttttgatgcacatcccaggaaggagagccaagtgcgacagcttgcgtgggtgggggatggcgtgtgggtctccattcgcttggattctacgctccgtctctatcatgcacacacttatcaacatctacaggatgtggacattgagccttatgtaagcaaaatgttaggtactggaaaactgggcttctcttttgtgagaattacagctcttatggtgtcttgtaatcgtttgtgggtggggacaggaaatggtgtcattatctccatcccattgacagaaaccgtaatcctccaccagggacgtttactggggctgagggcaaataaaacctcaggtgtaccaggaaatcgtcctggaagtgtaatccgtgtatatggtgatgaaaacagtgataaagtgactccagggacatttataccctattgttcaatggcacatgcacagctttgcttccatgggcaccgggatgctgtgaaattctttgtggcagtcccaggtcaagtcatcagcccacaaagtagcagtagtggcacggatctgacgggtgacaaagcagggccatctgcacaggagcctggtagtcagacgcccttgaagtctatgcttgtcatcagtggaggagagggctacatcgacttccgaatgggtgatgaaggtggagaatcagaacttcttggagaggatcttccacttgaaccttctgtcaccaaagcagaaaggagtcacttgatagtgtggcaagtgatgtatggcaatgagtgagcccatgggaaacaggtggagatggggaagccgtctcttctgcatggtttattttccctctatccttttatttaatgctcttttgtgagataagtttcaccacataatgtgtgagcattttttcctgttaactttatattacaaaatccgttctaccataacaatacagaggaactagctgtgttactgcaccagtgttataggtaacttcagtatattatgaacaaatcaaagaatgtttacttcctgcaaactggtgaattatagaaagcaatccagatgtggtttactctgccacagtctaatgtcattcacttcatttgatggggtcacttgttagctgtcactaataatggaattaatgggaaacacttgataaatgaaactgtaccgttaaatacaatagctgagttttccccagtgtattgtaaaattgacacacactaatacaagatggattatcaggatgtatctaaatgtcccgagagggttaaaagctaactgtaaattactttaactttcactttcaaatctgacaaatcttgtttatatggtatataaaactttgttttcatcagatttgggggggttttatattaaagaaattaagactacactatttaaataaacgtttcctgtttctgacttattagagctctaaagtttatgaggcctacttctctgaatattctgatgggttttttttgagaccagtctcattttcatactgacatgtctgaaagatttattatttataaagcttaggacatactctgggaagcttagaagatacttcagcactgggaggattttttaaaggaaatgtgttttgtatttcttgtaccagagaatggtgatgttgattgagttttttccatgtaaaaaatgtacttgtttgccaaatgttcctagattgctcttaacctgttaatacaagtaaaactgtagtggggatggagtctggcctaagtacagaatgagggatttaattagaaaagttattttcttttgttctgtatcaaactgcagaacagctatatacttggtattttgtacgtgaataacgttttagcttttgtgcccttttgagcttgaagggttatcctcaaaggggaaaactatgaaggggaagaagacaaacctaagataccataaagtaaaggttgacattacatattttcattcacaatgcccattaaaaaaaaaaaataggttgggcatggtggctcacgcctgtaatcccagcactttaggaggctgaggcggatggattgcttgagcccaggagttcaagaccagcctgggcaacatggcgaaaccctgtctctaccaaaaaaaaaaaacaaaataaattaaccgggtgtggtggcacatgcctgtagtcccagctacttgggaggctgaggtgggaggatgacctgggcccaggaggtggaggttgcagtgagccttgatagcaccactgcactccagcctgggtgacggagcaagaccctgtctcaaaacagacaaacaagcaaaaaatagattaaagtctggatttcactgattttcttgcttaataagttttttaaaaccacgatgctgcaattttttccctctcaagcttcttgaaaatgtgtgatttacccttttttatctattactctaggcaaagctaaatatgatttttttttttttttttgagacggagtctggctctgttgcccaggctggaatgcagtggtgcgatctcagctcactgcaacctccacctctcaggttcaagtagttctcctgcctcagcctcccaagtagctgggattacaggtgtgtgccaccctgcccagctaatttttgtatttttagtagagacagggtttcgccacgttggccaggctggtctcaaactcctgacctcagatgatctacccgccttggcctcccgaagtgcttgaattacaggcgtgagcccccgcgccggtccgaagcaaagctaaatgtaattttatgtactgttttaacagtataaacctatgggataaaggcccccaatcatcagaaggactactgaaaagaaaagaaagcaaacgtagatgtcaaattgtctaaacattcttaagtaccactgattttttttttctggactattatacaaagatgtctgtaaaaagtataccagtggcttttatgcatatacacgattaggctagattgtgaagtacatgggatttcatgagccagaggaggcatttggatccattgggccacatgtgactataagcacattgtgtacacaataaaattgtagccactcatgtattaaaactgttttggtaaaagctgtattaaaagaataattttttgcttgagctacttagtcacttttttgcagggcaccaaaatgtaggctacttttccatagcttgtttgctatgtttttatttcatcttaaatctgagccatttttggcaatatcttttaaaaaatcattattaaacatttattggaaatgttgtatagattcacaagaaagagacaccaaagtgtttgggaattttaatcccaagaagtaaacatcccagagtcagatcccatttgctgttgttcagccatgtttgtatgactgaatgtaatttaggaaatcaggagttagagatgaaaaatacaaacatgtcaaatggttgtaattgctttttttgaacttactggctttaacttaagtaatataggtgtgtagttgttttatctaaagatgtcagattatctgtggccctgttaattaactgcagggaccagagagaggacaaaaatgcctgtataatttgctttaaaggcttgtccttatgtttgtaatttcagttaaatattttctacagattgcttcacttcccctttcccccaataacaagttcatattcttgtaatgtttactttggtcaacgtggtaatttttggaagaaaatgccaaaatgtaagcttctcacaagcagcaaaggaatgtaactgcctgtagctaccacatcaagggagagaagaggcttgcgtactttgggttgatctcactgtacaaaaaaagtgtacccctattggaagaaataaggaatacttgaaggtttctcctttttttacacttgagtcatgtgcaaggttgaaccatatgaaattgccagtgttcaaccattgctgatctgcaaaagcgacaatatcatatgcctcaacctaacacttactcttaaatgcaggttaaaatctctgtgaggcaaagggataatattctctaggaactcacttttgagagtatttttctctaacccatgtggatctaaattttaaaaataggaatgaatctcttaattgcagcttgtggagagtataaaacattttgagcacaatatgcagcacataacttttcagattgtgtttgcatagaaaaggttaaaatcaattctttcagttactgtattgttcatttcttgtaaaggtcttcctacatttgagacgagaccctttaacataggctgccttagtaacaaaataaaacagatgtgtcataatattaactgtcctaaagaacatgtgtcttgcaaatgccatggaactgaatatttatttccttgtgagtattatgaccgttaccaaaggactcaaccagatttagggctcttcttaattgatcatgttcagaaagggactcatttggtcccactttgtaacatgggaagagtagaagagaaaattaaatgtggaaatcataaatgcttttctaacagggttatgctattctgtaacactaaatgtctgtcttttctcttaaaagattaagttttattaattttgtcatacatttctctatttgaatatatcttaaccattttatgttccaaattcgttttttgtccaagacattctatcagaattttacttgcctctataatctgaaaaatgggttctagaatgtcccacttgctgtctcttagaggctgagcttcatttctatgagcaaagagctcatttagcaatgtagttatttcagtatttatttctattatggaatccctggggttcagaatgtaactttgtacatgagatatatataaatatgtatatgaacatgtaaaaaaaaaaaacaaaaaaaaaaa

SEQ ID NO: 302009 - DNA, 8063 bp, Homo sapiens
tccggccccggcccccaccccgccgggcccagccccagccccggcccgggctccagccctagtacccgtcccagcccgagtcgggtccgtcccgtgcgggcaggtgccgcccctctgccggcgacgccccgggccgcccgcccgtccgcttgccaccatggagctggaggacggtgtggtgtatcaggaggagcccggcggctccggggccgtgatgtcggagcgggtgtccggcctggccggctccatctaccgcgagttcgagcggcttatcgggcgctatgacgaggaggtggtcaaagagctgatgccgctggtggtggctgtgctggagaacctggactcggtgttcgcgcaggaccaggagcaccaggtggagctggagctgctgcgggacgacaacgagcagctcatcacccagtacgagcgggagaaggcgctgcgcaagcacgctgaggagaaattcattgaatttgaagactctcaagaacaggaaaaaaaggacttacagacccgagtggaatctttagaatctcaaacaagacaacttgagctgaaagcgaaaaactatgctgaccagattagcagacttgaagaaagagaagcagaactgaagaaggaatataatgcattacatcaaagacacactgagatgatccataattatatggaacatttagaaagaacaaaacttcatcagctctcagggagtgatcaactagaatccacagctcatagtagaattagaaaagaacgccctatatcattaggaattttcccattacctgctggagatggattgcttacacctgatgctcagaaaggaggagagacccctggatctgagcaatggaaatttcaggaattaagtcaaccacgttctcataccagcctgaaggatgagctttctgatgttagccaaggcggatctaaagctaccactccagcatcaacagctaattcagatgtggcaacaattcctactgatactcccttaaaggaagaaaacgaaggatttgtgaaggttacagatgcgccaaataaatcagagataagcaaacacattgaagtacaggtagcccaggaaactagaaatgtatctactggctctgctgaaaatgaagaaaagtcagaagttcaagcaatcatcgaatctactcctgagctggatatggacaaagatctcagtggatataaaggttcaagcactcccaccaaaggcatagagaacaaagcttttgatcgcaatacagaatctctctttgaagaactgtcttcagctggctcaggcctaataggagatgtggatgaaggagcagatttactaggaatgggtcgggaagttgagaatcttatattagaaaatacacaactgttggaaaccaaaaatgctttgaacatagtgaagaatgatttgatagcaaaagtggatgaactgacctgtgagaaagatgtgctgcaaggggaattggaggctgtgaagcaagccaaactgaaactagaggaaaagaacagagaattggaggaagagcttaggaaagctcgggcagaagctgaagatgcaaggcaaaaagcaaaagatgacgatgatagtgatattcccacagcccagaggaaacggtttactagagtagaaatggcccgtgttctcatggagcgaaaccagtataaagagagattgatggagcttcaggaagctgttcgatggacagagatgattcgggcatcacgagaaaatccagccatgcaggaaaaaaaaaggtcaagcatttggcagtttttcagccgacttttcagctcctcaagtaacacgactaagaagcctgaaccacctgttaatctgaagtacaatgcacccacgtctcatgttactccgtccgtcaagaaaagaagcagcaccttatctcagctccctggggataagtccaaagcctttgatttccttagtgaagaaactgaagctagtttagcctcacgcagagaacaaaagagagagcagtatcgtcaggtaaaagcacatgttcagaaggaagacggtagagtgcaggcttttggctggagtctgcctcagaagtacaaacaggtaaccaatggtcaaggtgaaaataagatgaaaaatttacctgtgcctgtctatctcagacctctggatgaaaaagatacatcaatgaagctgtggtgtgctgttggagtcaatttatctggtgggaagaccagagatggtggttctgttgttggagcaagtgtattttacaaggatgttgctggtttggatacagaaggcagtaaacagcgaagtgcctctcagagtagtttagataagttagatcaggaacttaaggaacagcagaaggagttaaaaaatcaagaagaattatccagtctagtttggatctgtaccagcactcattcggctacaaaagttcttattattgatgctgttcaacctggcaacatcctagacagtttcactgtttgcaactctcatgttctgtgcattgcaagtgtgccaggtgcacgagaaacagactaccctgcaggagaagatctttcagaatctggtcaggtagacaaagcatctttatgtggaagtatgacaagcaacagctcagcagagacagacagcctgttaggaggcatcacagtggttggttgttctgcagaaggtgtgacgggagctgccacttcccctagtacaaatggtgcttctccagtgatggataaaccaccagaaatggaagcagaaaatagtgaggttgatgaaaatgttccaacagcagaagaagcaactgaagctacagaagggaatgcggggtcagctgaagacacagtggacatctcccaaactggcgtctacacagagcatgtctttacagatcctttgggagttcagatcccagaagacctctccccagtgtatcagtcgagcaatgactcagatgcatataaagatcaaatatcagtactgccaaatgaacaagacttggtgagagaagaagcccagaaaatgagtagtcttttaccaactatgtggcttggagctcaaaatggctgtttgtatgtccattcatctgtagcccagtggaggaaatgtctccattccattaaacttaaagattcgattctcagtattgtacacgtgaagggaatcgtgttagtagccctggctgacggcacccttgcaatctttcacagaggagtggatgggcagtgggatttgtcaaactatcacctcttagaccttggacggcctcatcattccatccgttgcatgactgtggtacatgacaaagtctggtgtggctataggaacaaaatctatgtggtgcagccaaaggccatgaaaatagagaaatcttttgatgcacatcccaggaaggagagccaagtgcgacagcttgcgtgggtgggggatggcgtgtgggtctccattcgcttggattctacgctccgtctctatcatgcacacacttatcaacatctacaggatgtggacattgagccttatgtaagcaaaatgttaggtactggaaaactgggcttctcttttgtgagaattacagctcttatggtgtcttgtaatcgtttgtgggtggggacaggaaatggtgtcattatctccatcccattgacagaaaccgtaatcctccaccagggacgtttactggggctgagggcaaataaaacctcaggtgtaccaggaaatcgtcctggaagtgtaatccgtgtatatggtgatgaaaacagtgataaagtgactccagggacatttataccctattgttcaatggcacatgcacagctttgcttccatgggcaccgggatgctgtgaaattctttgtggcagtcccaggtcaagtcatcagcccacaaagtagcagtagtggcacggatctgacgggtgacaaagcagggccatctgcacaggagcctggtagtcagacgcccttgaagtctatgcttgtcatcagtggaggagagggctacatcgacttccgaatgggtgatgaaggtggagaatcagaacttcttggagaggatcttccacttgaaccttctgtcaccaaagcagaaaggagtcacttgatagtgtggcaagtgatgtatggcaatgagtgagcccatgggaaacaggtggagatggggaagccgtctcttctgcatggtttattttccctctatccttttatttaatgctcttttgtgagataagtttcaccacataatgtgtgagcattttttcctgttaactttatattacaaaatccgttctaccataacaatacagaggaactagctgtgttactgcaccagtgttataggtaacttcagtatattatgaacaaatcaaagaatgtttacttcctgcaaactggtgaattatagaaagcaatccagatgtggtttactctgccacagtctaatgtcattcacttcatttgatggggtcacttgttagctgtcactaataatggaattaatgggaaacacttgataaatgaaactgtaccgttaaatacaatagctgagttttccccagtgtattgtaaaattgacacacactaatacaagatggattatcaggatgtatctaaatgtcccgagagggttaaaagctaactgtaaattactttaactttcactttcaaatctgacaaatcttgtttatatggtatataaaactttgttttcatcagatttgggggggttttatattaaagaaattaagactacactatttaaataaacgtttcctgtttctgacttattagagctctaaagtttatgaggcctacttctctgaatattctgatgggttttttttgagaccagtctcattttcatactgacatgtctgaaagatttattatttataaagcttaggacatactctgggaagcttagaagatacttcagcactgggaggattttttaaaggaaatgtgttttgtatttcttgtaccagagaatggtgatgttgattgagttttttccatgtaaaaaatgtacttgtttgccaaatgttcctagattgctcttaacctgttaatacaagtaaaactgtagtggggatggagtctggcctaagtacagaatgagggatttaattagaaaagttattttcttttgttctgtatcaaactgcagaacagctatatacttggtattttgtacgtgaataacgttttagcttttgtgcccttttgagcttgaagggttatcctcaaaggggaaaactatgaaggggaagaagacaaacctaagataccataaagtaaaggttgacattacatattttcattcacaatgcccattaaaaaaaaaaaataggttgggcatggtggctcacgcctgtaatcccagcactttaggaggctgaggcggatggattgcttgagcccaggagttcaagaccagcctgggcaacatggcgaaaccctgtctctaccaaaaaaaaaaaacaaaataaattaaccgggtgtggtggcacatgcctgtagtcccagctacttgggaggctgaggtgggaggatgacctgggcccaggaggtggaggttgcagtgagccttgatagcaccactgcactccagcctgggtgacggagcaagaccctgtctcaaaacagacaaacaagcaaaaaatagattaaagtctggatttcactgattttcttgcttaataagttttttaaaaccacgatgctgcaattttttccctctcaagcttcttgaaaatgtgtgatttacccttttttatctattactctaggcaaagctaaatatgatttttttttttttttttgagacggagtctggctctgttgcccaggctggaatgcagtggtgcgatctcagctcactgcaacctccacctctcaggttcaagtagttctcctgcctcagcctcccaagtagctgggattacaggtgtgtgccaccctgcccagctaatttttgtatttttagtagagacagggtttcgccacgttggccaggctggtctcaaactcctgacctcagatgatctacccgccttggcctcccgaagtgcttgaattacaggcgtgagcccccgcgccggtccgaagcaaagctaaatgtaattttatgtactgttttaacagtataaacctatgggataaaggcccccaatcatcagaaggactactgaaaagaaaagaaagcaaacgtagatgtcaaattgtctaaacattcttaagtaccactgattttttttttctggactattatacaaagatgtctgtaaaaagtataccagtggcttttatgcatatacacgattaggctagattgtgaagtacatgggatttcatgagccagaggaggcatttggatccattgggccacatgtgactataagcacattgtgtacacaataaaattgtagccactcatgtattaaaactgttttggtaaaagctgtattaaaagaataattttttgcttgagctacttagtcacttttttgcagggcaccaaaatgtaggctacttttccatagcttgtttgctatgtttttatttcatcttaaatctgagccatttttggcaatatcttttaaaaaatcattattaaacatttattggaaatgttgtatagattcacaagaaagagacaccaaagtgtttgggaattttaatcccaagaagtaaacatcccagagtcagatcccatttgctgttgttcagccatgtttgtatgactgaatgtaatttaggaaatcaggagttagagatgaaaaatacaaacatgtcaaatggttgtaattgctttttttgaacttactggctttaacttaagtaatataggtgtgtagttgttttatctaaagatgtcagattatctgtggccctgttaattaactgcagggaccagagagaggacaaaaatgcctgtataatttgctttaaaggcttgtccttatgtttgtaatttcagttaaatattttctacagattgcttcacttcccctttcccccaataacaagttcatattcttgtaatgtttactttggtcaacgtggtaatttttggaagaaaatgccaaaatgtaagcttctcacaagcagcaaaggaatgtaactgcctgtagctaccacatcaagggagagaagaggcttgcgtactttgggttgatctcactgtacaaaaaaagtgtacccctattggaagaaataaggaatacttgaaggtttctcctttttttacacttgagtcatgtgcaaggttgaaccatatgaaattgccagtgttcaaccattgctgatctgcaaaagcgacaatatcatatgcctcaacctaacacttactcttaaatgcaggttaaaatctctgtgaggcaaagggataatattctctaggaactcacttttgagagtatttttctctaacccatgtggatctaaattttaaaaataggaatgaatctcttaattgcagcttgtggagagtataaaacattttgagcacaatatgcagcacataacttttcagattgtgtttgcatagaaaaggttaaaatcaattctttcagttactgtattgttcatttcttgtaaaggtcttcctacatttgagacgagaccctttaacataggctgccttagtaacaaaataaaacagatgtgtcataatattaactgtcctaaagaacatgtgtcttgcaaatgccatggaactgaatatttatttccttgtgagtattatgaccgttaccaaaggactcaaccagatttagggctcttcttaattgatcatgttcagaaagggactcatttggtcccactttgtaacatgggaagagtagaagagaaaattaaatgtggaaatcataaatgcttttctaacagggttatgctattctgtaacactaaatgtctgtcttttctcttaaaagattaagttttattaattttgtcatacatttctctatttgaatatatcttaaccattttatgttccaaattcgttttttgtccaagacattctatcagaattttacttgcctctataatctgactatgagcaaagagctcattta

SEQ ID NO: 302010 - DNA, 8102 bp, Homo sapiens
tccggccccggcccccaccccgccgggcccagccccagccccggcccgggctccagccctagtacccgtcccagcccgagtcgggtccgtcccgtgcgggcaggtgccgcccctctgccggcgacgccccgggccgcccgcccgtccgcttgccaccatggagctggaggacggtgtggtgtatcaggaggagcccggcggctccggggccgtgatgtcggagcgggtgtccggcctggccggctccatctaccgcgagttcgagcggcttatcgggcgctatgacgaggaggtggtcaaagagctgatgccgctggtggtggctgtgctggagaacctggactcggtgttcgcgcaggaccaggagcaccaggtggagctggagctgctgcgggacgacaacgagcagctcatcacccagtacgagcgggagaaggcgctgcgcaagcacgctgaggagaaattcattgaatttgaagactctcaagaacaggaaaaaaaggacttacagacccgagtggaatctttagaatctcaaacaagacaacttgagctgaaagcgaaaaactatgctgaccagattagcagacttgaagaaagagaagcagaactgaagaaggaatataatgcattacatcaaagacacactgagatgatccataattatatggaacatttagaaagaacaaaacttcatcagctctcagggagtgatcaactagaatccacagctcatagtagaattagaaaagaacgccctatatcattaggaattttcccattacctgctggagatggattgcttacacctgatgctcagaaaggaggagagacccctggatctgagcaatggaaatttcaggaattaagtcaaccacgttctcataccagcctgaaggatgagctttctgatgttagccaaggcggatctaaagctaccactccagcatcaacagctaattcagatgtggcaacaattcctactgatactcccttaaaggaagaaaacgaaggatttgtgaaggttacagatgcgccaaataaatcagagataagcaaacacattgaagtacaggtagcccaggaaactagaaatgtatctactggctctgctgaaaatgaagaaaagtcagaagttcaagcaatcatcgaatctactcctgagctggatatggacaaagatctcagtggatataaaggttcaagcactcccaccaaaggcatagagaacaaagcttttgatcgcaatacagaatctctctttgaagaactgtcttcagctggctcaggcctaataggagatgtggatgaaggagcagatttactaggaatgggtcgggaagttgagaatcttatattagaaaatacacaactgttggaaaccaaaaatgctttgaacatagtgaagaatgatttgatagcaaaagtggatgaactgacctgtgagaaagatgtgctgcaaggggaattggaggctgtgaagcaagccaaactgaaactagaggaaaagaacagagaattggaggaagagcttaggaaagctcgggcagaagctgaagatgcaaggcaaaaagcaaaagatgacgatgatagtgatattcccacagcccagaggaaacggtttactagagtagaaatggcccgtgttctcatggagcgaaaccagtataaagagagattgatggagcttcaggaagctgttcgatggacagagatgattcgggcatcacgagaaaatccagccatgcaggaaaaaaaaaggtcaagcatttggcagtttttcagccgacttttcagctcctcaagtaacacgactaagaagcctgaaccacctgttaatctgaagtacaatgcacccacgtctcatgttactccgtccgtcaagaaaagaagcagcaccttatctcagctccctggggataagtccaaagcctttgatttccttagtgaagaaactgaagctagtttagcctcacgcagagaacaaaagagagagcagtatcgtcaggtaaaagcacatgttcagaaggaagacggtagagtgcaggcttttggctggagtctgcctcagaagtacaaacaggtaaccaatggtcaaggtgaaaataagatgaaaaatttacctgtgcctgtctatctcagacctctggatgaaaaagatacatcaatgaagctgtggtgtgctgttggagtcaatttatctggtgggaagaccagagatggtggttctgttgttggagcaagtgtattttacaaggatgttgctggtttggatacagaaggcagtaaacagcgaagtgcctctcagagtagtttagataagttagatcaggaacttaaggaacagcagaaggagttaaaaaatcaagaagaattatccagtctagtttggatctgtaccagcactcattcggctacaaaagttcttattattgatgctgttcaacctggcaacatcctagacagtttcactgtttgcaactctcatgttctgtgcattgcaagtgtgccaggtgcacgagaaacagactaccctgcaggagaagatctttcagaatctggtcaggtagacaaagcatctttatgtggaagtatgacaagcaacagctcagcagagacagacagcctgttaggaggcatcacagtggttggttgttctgcagaaggtgtgacgggagctgccacttcccctagtacaaatggtgcttctccagtgatggataaaccaccagaaatggaagcagaaaatagtgaggttgatgaaaatgttccaacagcagaagaagcaactgaagctacagaagggaatgcggggtcagctgaagacacagtggacatctcccaaactggcgtctacacagagcatgtctttacagatcctttgggagttcagatcccagaagacctctccccagtgtatcagtcgagcaatgactcagatgcatataaagatcaaatatcagtactgccaaatgaacaagacttggtgagagaagaagcccagaaaatgagtagtcttttaccaactatgtggcttggagctcaaaatggctgtttgtatgtccattcatctgtagcccagtggaggaaatgtctccattccattaaacttaaagattcgattctcagtattgtacacgtgaagggaatcgtgttagtagccctggctgacggcacccttgcaatctttcacagaggagtggatgggcagtgggatttgtcaaactatcacctcttagaccttggacggcctcatcattccatccgttgcatgactgtggtacatgacaaagtctggtgtggctataggaacaaaatctatgtggtgcagccaaaggccatgaaaatagagaaatcttttgatgcacatcccaggaaggagagccaagtgcgacagcttgcgtgggtgggggatggcgtgtgggtctccattcgcttggattctacgctccgtctctatcatgcacacacttatcaacatctacaggatgtggacattgagccttatgtaagcaaaatgttaggtactggaaaactgggcttctcttttgtgagaattacagctcttatggtgtcttgtaatcgtttgtgggtggggacaggaaatggtgtcattatctccatcccattgacagaaaccgtaatcctccaccagggacgtttactggggctgagggcaaataaaacctcaggtgtaccaggaaatcgtcctggaagtgtaatccgtgtatatggtgatgaaaacagtgataaagtgactccagggacatttataccctattgttcaatggcacatgcacagctttgcttccatgggcaccgggatgctgtgaaattctttgtggcagtcccaggtcaagtcatcagcccacaaagtagcagtagtggcacggatctgacgggtgacaaagcagggccatctgcacaggagcctggtagtcagacgcccttgaagtctatgcttgtcatcagtggaggagagggctacatcgacttccgaatgggtgatgaaggtggagaatcagaacttcttggagaggatcttccacttgaaccttctgtcaccaaagcagaaaggagtcacttgatagtgtggcaagtgatgtatggcaatgagtgagcccatgggaaacaggtggagatggggaagccgtctcttctgcatggtttattttccctctatccttttatttaatgctcttttgtgagataagtttcaccacataatgtgtgagcattttttcctgttaactttatattacaaaatccgttctaccataacaatacagaggaactagctgtgttactgcaccagtgttataggtaacttcagtatattatgaacaaatcaaagaatgtttacttcctgcaaactggtgaattatagaaagcaatccagatgtggtttactctgccacagtctaatgtcattcacttcatttgatggggtcacttgttagctgtcactaataatggaattaatgggaaacacttgataaatgaaactgtaccgttaaatacaatagctgagttttccccagtgtattgtaaaattgacacacactaatacaagatggattatcaggatgtatctaaatgtcccgagagggttaaaagctaactgtaaattactttaactttcactttcaaatctgacaaatcttgtttatatggtatataaaactttgttttcatcagatttgggggggttttatattaaagaaattaagactacactatttaaataaacgtttcctgtttctgacttattagagctctaaagtttatgaggcctacttctctgaatattctgatgggttttttttgagaccagtctcattttcatactgacatgtctgaaagatttattatttataaagcttaggacatactctgggaagcttagaagatacttcagcactgggaggattttttaaaggaaatgtgttttgtatttcttgtaccagagaatggtgatgttgattgagttttttccatgtaaaaaatgtacttgtttgccaaatgttcctagattgctcttaacctgttaatacaagtaaaactgtagtggggatggagtctggcctaagtacagaatgagggatttaattagaaaagttattttcttttgttctgtatcaaactgcagaacagctatatacttggtattttgtacgtgaataacgttttagcttttgtgcccttttgagcttgaagggttatcctcaaaggggaaaactatgaaggggaagaagacaaacctaagataccataaagtaaaggttgacattacatattttcattcacaatgcccattaaaaaaaaaaaataggttgggcatggtggctcacgcctgtaatcccagcactttaggaggctgaggcggatggattgcttgagcccaggagttcaagaccagcctgggcaacatggcgaaaccctgtctctaccaaaaaaaaaaaacaaaataaattaaccgggtgtggtggcacatgcctgtagtcccagctacttgggaggctgaggtgggaggatgacctgggcccaggaggtggaggttgcagtgagccttgatagcaccactgcactccagcctgggtgacggagcaagaccctgtctcaaaacagacaaacaagcaaaaaatagattaaagtctggatttcactgattttcttgcttaataagttttttaaaaccacgatgctgcaattttttccctctcaagcttcttgaaaatgtgtgatttacccttttttatctattactctaggcaaagctaaatatgatttttttttttttttttgagacggagtctggctctgttgcccaggctggaatgcagtggtgcgatctcagctcactgcaacctccacctctcaggttcaagtagttctcctgcctcagcctcccaagtagctgggattacaggtgtgtgccaccctgcccagctaatttttgtatttttagtagagacagggtttcgccacgttggccaggctggtctcaaactcctgacctcagatgatctacccgccttggcctcccgaagtgcttgaattacaggcgtgagcccccgcgccggtccgaagcaaagctaaatgtaattttatgtactgttttaacagtataaacctatgggataaaggcccccaatcatcagaaggactactgaaaagaaaagaaagcaaacgtagatgtcaaattgtctaaacattcttaagtaccactgattttttttttctggactattatacaaagatgtctgtaaaaagtataccagtggcttttatgcatatacacgattaggctagattgtgaagtacatgggatttcatgagccagaggaggcatttggatccattgggccacatgtgactataagcacattgtgtacacaataaaattgtagccactcatgtattaaaactgttttggtaaaagctgtattaaaagaataattttttgcttgagctacttagtcacttttttgcagggcaccaaaatgtaggctacttttccatagcttgtttgctatgtttttatttcatcttaaatctgagccatttttggcaatatcttttaaaaaatcattattaaacatttattggaaatgttgtatagattcacaagaaagagacaccaaagtgtttgggaattttaatcccaagaagtaaacatcccagagtcagatcccatttgctgttgttcagccatgtttgtatgactgaatgtaatttaggaaatcaggagttagagatgaaaaatacaaacatgtcaaatggttgtaattgctttttttgaacttactggctttaacttaagtaatataggtgtgtagttgttttatctaaagatgtcagattatctgtggccctgttaattaactgcagggaccagagagaggacaaaaatgcctgtataatttgctttaaaggcttgtccttatgtttgtaatttcagttaaatattttctacagattgcttcacttcccctttcccccaataacaagttcatattcttgtaatgtttactttggtcaacgtggtaatttttggaagaaaatgccaaaatgtaagcttctcacaagcagcaaaggaatgtaactgcctgtagctaccacatcaagggagagaagaggcttgcgtactttgggttgatctcactgtacaaaaaaagtgtacccctattggaagaaataaggaatacttgaaggtttctcctttttttacacttgagtcatgtgcaaggttgaaccatatgaaattgccagtgttcaaccattgctgatctgcaaaagcgacaatatcatatgcctcaacctaacacttactcttaaatgcaggttaaaatctctgtgaggcaaagggataatattctctaggaactcacttttgagagtatttttctctaacccatgtggatctaaattttaaaaataggaatgaatctcttaattgcagcttgtggagagtataaaacattttgagcacaatatgcagcacataacttttcagattgtgtttgcatagaaaaggttaaaatcaattctttcagttactgtattgttcatttcttgtaaaggtcttcctacatttgagacgagaccctttaacataggctgccttagtaacaaaataaaacagatgtgtcataatattaactgtcctaaagaacatgtgtcttgcaaatgccatggaactgaatatttatttccttgtgagtattatgaccgttaccaaaggactcaaccagatttagggctcttcttaattgatcatgttcagaaagggactcatttggtcccactttgtaacatgggaagagtagaagagaaaattaaatgtggaaatcataaatgcttttctaacagggttatgctattctgtaacactaaatgtctgtcttttctcttaaaagattaagttttattaattttgtcatacatttctctatttgaatatatcttaaccattttatgttctactcttcccatgttacaaagtgggaccaaatgagtccctttctgaacatgatcaattaagaagagccctacatctggttgagtcctttggtaacggtcataatactcacaaggtcgac

SEQ ID NO: 302011 - DNA, 8086 bp, Homo sapiens
tccggccccggcccccaccccgccgggcccagccccagccccggcccgggctccagccctagtacccgtcccagcccgagtcgggtccgtcccgtgcgggcaggtgccgcccctctgccggcgacgccccgggccgcccgcccgtccgcttgccaccatggagctggaggacggtgtggtgtatcaggaggagcccggcggctccggggccgtgatgtcggagcgggtgtccggcctggccggctccatctaccgcgagttcgagcggcttatcgggcgctatgacgaggaggtggtcaaagagctgatgccgctggtggtggctgtgctggagaacctggactcggtgttcgcgcaggaccaggagcaccaggtggagctggagctgctgcgggacgacaacgagcagctcatcacccagtacgagcgggagaaggcgctgcgcaagcacgctgaggagaaattcattgaatttgaagactctcaagaacaggaaaaaaaggacttacagacccgagtggaatctttagaatctcaaacaagacaacttgagctgaaagcgaaaaactatgctgaccagattagcagacttgaagaaagagaagcagaactgaagaaggaatataatgcattacatcaaagacacactgagatgatccataattatatggaacatttagaaagaacaaaacttcatcagctctcagggagtgatcaactagaatccacagctcatagtagaattagaaaagaacgccctatatcattaggaattttcccattacctgctggagatggattgcttacacctgatgctcagaaaggaggagagacccctggatctgagcaatggaaatttcaggaattaagtcaaccacgttctcataccagcctgaaggatgagctttctgatgttagccaaggcggatctaaagctaccactccagcatcaacagctaattcagatgtggcaacaattcctactgatactcccttaaaggaagaaaacgaaggatttgtgaaggttacagatgcgccaaataaatcagagataagcaaacacattgaagtacaggtagcccaggaaactagaaatgtatctactggctctgctgaaaatgaagaaaagtcagaagttcaagcaatcatcgaatctactcctgagctggatatggacaaagatctcagtggatataaaggttcaagcactcccaccaaaggcatagagaacaaagcttttgatcgcaatacagaatctctctttgaagaactgtcttcagctggctcaggcctaataggagatgtggatgaaggagcagatttactaggaatgggtcgggaagttgagaatcttatattagaaaatacacaactgttggaaaccaaaaatgctttgaacatagtgaagaatgatttgatagcaaaagtggatgaactgacctgtgagaaagatgtgctgcaaggggaattggaggctgtgaagcaagccaaactgaaactagaggaaaagaacagagaattggaggaagagcttaggaaagctcgggcagaagctgaagatgcaaggcaaaaagcaaaagatgacgatgatagtgatattcccacagcccagaggaaacggtttactagagtagaaatggcccgtgttctcatggagcgaaaccagtataaagagagattgatggagcttcaggaagctgttcgatggacagagatgattcgggcatcacgagaaaatccagccatgcaggaaaaaaaaaggtcaagcatttggcagtttttcagccgacttttcagctcctcaagtaacacgactaagaagcctgaaccacctgttaatctgaagtacaatgcacccacgtctcatgttactccgtccgtcaagaaaagaagcagcaccttatctcagctccctggggataagtccaaagcctttgatttccttagtgaagaaactgaagctagtttagcctcacgcagagaacaaaagagagagcagtatcgtcaggtaaaagcacatgttcagaaggaagacggtagagtgcaggcttttggctggagtctgcctcagaagtacaaacaggtaaccaatggtcaaggtgaaaataagatgaaaaatttacctgtgcctgtctatctcagacctctggatgaaaaagatacatcaatgaagctgtggtgtgctgttggagtcaatttatctggtgggaagaccagagatggtggttctgttgttggagcaagtgtattttacaaggatgttgctggtttggatacagaaggcagtaaacagcgaagtgcctctcagagtagtttagataagttagatcaggaacttaaggaacagcagaaggagttaaaaaatcaagaagaattatccagtctagtttggatctgtaccagcactcattcggctacaaaagttcttattattgatgctgttcaacctggcaacatcctagacagtttcactgtttgcaactctcatgttctgtgcattgcaagtgtgccaggtgcacgagaaacagactaccctgcaggagaagatctttcagaatctggtcaggtagacaaagcatctttatgtggaagtatgacaagcaacagctcagcagagacagacagcctgttaggaggcatcacagtggttggttgttctgcagaaggtgtgacgggagctgccacttcccctagtacaaatggtgcttctccagtgatggataaaccaccagaaatggaagcagaaaatagtgaggttgatgaaaatgttccaacagcagaagaagcaactgaagctacagaagggaatgcggggtcagctgaagacacagtggacatctcccaaactggcgtctacacagagcatgtctttacagatcctttgggagttcagatcccagaagacctctccccagtgtatcagtcgagcaatgactcagatgcatataaagatcaaatatcagtactgccaaatgaacaagacttggtgagagaagaagcccagaaaatgagtagtcttttaccaactatgtggcttggagctcaaaatggctgtttgtatgtccattcatctgtagcccagtggaggaaatgtctccattccattaaacttaaagattcgattctcagtattgtacacgtgaagggaatcgtgttaaaagtctggtgtggctataggaacaaaatctatgtggtgcagccaaaggccatgaaaatagagaaatcttttgatgcacatcccaggaaggagagccaagtgcgacagcttgcgtgggtgggggatggcgtgtgggtctccattcgcttggattctacgctccgtctctatcatgcacacacttatcaacatctacaggatgtggacattgagccttatgtaagcaaaatgttaggtactggaaaactgggcttctcttttgtgagaattacagctcttatggtgtcttgtaatcgtttgtgggtggggacaggaaatggtgtcattatctccatcccattgacagaaaccgtaatcctccaccagggacgtttactggggctgagggcaaataaaacctcaggtgtaccaggaaatcgtcctggaagtgtaatccgtgtatatggtgatgaaaacagtgataaagtgactccagggacatttataccctattgttcaatggcacatgcacagctttgcttccatgggcaccgggatgctgtgaaattctttgtggcagtcccaggtcaagtcatcagcccacaaagtagcagtagtggcacggatctgacgggtgacaaagcagggccatctgcacaggagcctggtagtcagacgcccttgaagtctatgcttgtcatcagtggaggagagggctacatcgacttccgaatgggtgatgaaggtggagaatcagaacttcttggagaggatcttccacttgaaccttctgtcaccaaagcagaaaggagtcacttgatagtgtggcaagtgatgtatggcaatgagtgagcccatgggaaacaggtggagatggggaagccgtctcttctgcatggtttattttccctctatccttttatttaatgctcttttgtgagataagtttcaccacataatgtgtgagcattttttcctgttaactttatattacaaaatccgttctaccataacaatacagaggaactagctgtgttactgcaccagtgttataggtaacttcagtatattatgaacaaatcaaagaatgtttacttcctgcaaactggtgaattatagaaagcaatccagatgtggtttactctgccacagtctaatgtcattcacttcatttgatggggtcacttgttagctgtcactaataatggaattaatgggaaacacttgataaatgaaactgtaccgttaaatacaatagctgagttttccccagtgtattgtaaaattgacacacactaatacaagatggattatcaggatgtatctaaatgtcccgagagggttaaaagctaactgtaaattactttaactttcactttcaaatctgacaaatcttgtttatatggtatataaaactttgttttcatcagatttgggggggttttatattaaagaaattaagactacactatttaaataaacgtttcctgtttctgacttattagagctctaaagtttatgaggcctacttctctgaatattctgatgggttttttttgagaccagtctcattttcatactgacatgtctgaaagatttattatttataaagcttaggacatactctgggaagcttagaagatacttcagcactgggaggattttttaaaggaaatgtgttttgtatttcttgtaccagagaatggtgatgttgattgagttttttccatgtaaaaaatgtacttgtttgccaaatgttcctagattgctcttaacctgttaatacaagtaaaactgtagtggggatggagtctggcctaagtacagaatgagggatttaattagaaaagttattttcttttgttctgtatcaaactgcagaacagctatatacttggtattttgtacgtgaataacgttttagcttttgtgcccttttgagcttgaagggttatcctcaaaggggaaaactatgaaggggaagaagacaaacctaagataccataaagtaaaggttgacattacatattttcattcacaatgcccattaaaaaaaaaaaataggttgggcatggtggctcacgcctgtaatcccagcactttaggaggctgaggcggatggattgcttgagcccaggagttcaagaccagcctgggcaacatggcgaaaccctgtctctaccaaaaaaaaaaaacaaaataaattaaccgggtgtggtggcacatgcctgtagtcccagctacttgggaggctgaggtgggaggatgacctgggcccaggaggtggaggttgcagtgagccttgatagcaccactgcactccagcctgggtgacggagcaagaccctgtctcaaaacagacaaacaagcaaaaaatagattaaagtctggatttcactgattttcttgcttaataagttttttaaaaccacgatgctgcaattttttccctctcaagcttcttgaaaatgtgtgatttacccttttttatctattactctaggcaaagctaaatatgatttttttttttttttttgagacggagtctggctctgttgcccaggctggaatgcagtggtgcgatctcagctcactgcaacctccacctctcaggttcaagtagttctcctgcctcagcctcccaagtagctgggattacaggtgtgtgccaccctgcccagctaatttttgtatttttagtagagacagggtttcgccacgttggccaggctggtctcaaactcctgacctcagatgatctacccgccttggcctcccgaagtgcttgaattacaggcgtgagcccccgcgccggtccgaagcaaagctaaatgtaattttatgtactgttttaacagtataaacctatgggataaaggcccccaatcatcagaaggactactgaaaagaaaagaaagcaaacgtagatgtcaaattgtctaaacattcttaagtaccactgattttttttttctggactattatacaaagatgtctgtaaaaagtataccagtggcttttatgcatatacacgattaggctagattgtgaagtacatgggatttcatgagccagaggaggcatttggatccattgggccacatgtgactataagcacattgtgtacacaataaaattgtagccactcatgtattaaaactgttttggtaaaagctgtattaaaagaataattttttgcttgagctacttagtcacttttttgcagggcaccaaaatgtaggctacttttccatagcttgtttgctatgtttttatttcatcttaaatctgagccatttttggcaatatcttttaaaaaatcattattaaacatttattggaaatgttgtatagattcacaagaaagagacaccaaagtgtttgggaattttaatcccaagaagtaaacatcccagagtcagatcccatttgctgttgttcagccatgtttgtatgactgaatgtaatttaggaaatcaggagttagagatgaaaaatacaaacatgtcaaatggttgtaattgctttttttgaacttactggctttaacttaagtaatataggtgtgtagttgttttatctaaagatgtcagattatctgtggccctgttaattaactgcagggaccagagagaggacaaaaatgcctgtataatttgctttaaaggcttgtccttatgtttgtaatttcagttaaatattttctacagattgcttcacttcccctttcccccaataacaagttcatattcttgtaatgtttactttggtcaacgtggtaatttttggaagaaaatgccaaaatgtaagcttctcacaagcagcaaaggaatgtaactgcctgtagctaccacatcaagggagagaagaggcttgcgtactttgggttgatctcactgtacaaaaaaagtgtacccctattggaagaaataaggaatacttgaaggtttctcctttttttacacttgagtcatgtgcaaggttgaaccatatgaaattgccagtgttcaaccattgctgatctgcaaaagcgacaatatcatatgcctcaacctaacacttactcttaaatgcaggttaaaatctctgtgaggcaaagggataatattctctaggaactcacttttgagagtatttttctctaacccatgtggatctaaattttaaaaataggaatgaatctcttaattgcagcttgtggagagtataaaacattttgagcacaatatgcagcacataacttttcagattgtgtttgcatagaaaaggttaaaatcaattctttcagttactgtattgttcatttcttgtaaaggtcttcctacatttgagacgagaccctttaacataggctgccttagtaacaaaataaaacagatgtgtcataatattaactgtcctaaagaacatgtgtcttgcaaatgccatggaactgaatatttatttccttgtgagtattatgaccgttaccaaaggactcaaccagatttagggctcttcttaattgatcatgttcagaaagggactcatttggtcccactttgtaacatgggaagagtagaagagaaaattaaatgtggaaatcataaatgcttttctaacagggttatgctattctgtaacactaaatgtctgtcttttctcttaaaagattaagttttattaattttgtcatacatttctctatttgaatatatcttaaccattttatgttccaaattcgttttttgtccaagacattctatcagaattttacttgcctctataatctgaaaaatgggttctagaatgtcccacttgctgtctcttagaggctgagcttcatttctatgagcaaagagctcatttagcaatgtagttatttcagtatttatttctattatggaatccctggggttcagaatgtaactttgtacatgagatatatataaatatgtatatgaacatgta

SEQ ID NO: 302012 - DNA, 8179 bp, Homo sapiens
tccggccccggcccccaccccgccgggcccagccccagccccggcccgggctccagccctagtacccgtcccagcccgagtcgggtccgtcccgtgcgggcaggtgccgcccctctgccggcgacgccccgggccgcccgcccgtccgcttgccaccatggagctggaggacggtgtggtgtatcaggaggagcccggcggctccggggccgtgatgtcggagcgggtgtccggcctggccggctccatctaccgcgagttcgagcggcttatcgggcgctatgacgaggaggtggtcaaagagctgatgccgctggtggtggctgtgctggagaacctggactcggtgttcgcgcaggaccaggagcaccaggtggagctggagctgctgcgggacgacaacgagcagctcatcacccagtacgagcgggagaaggcgctgcgcaagcacgctgaggagaaattcattgaatttgaagactctcaagaacaggaaaaaaaggacttacagacccgagtggaatctttagaatctcaaacaagacaacttgagctgaaagcgaaaaactatgctgaccagattagcagacttgaagaaagagaagcagaactgaagaaggaatataatgcattacatcaaagacacactgagatgatccataattatatggaacatttagaaagaacaaaacttcatcagctctcagggagtgatcaactagaatccacagctcatagtagaattagaaaagaacgccctatatcattaggaattttcccattacctgctggagatggattgcttacacctgatgctcagaaaggaggagagacccctggatctgagcaatggaaatttcaggaattaagtcaaccacgttctcataccagcctgaaggatgagctttctgatgttagccaaggcggatctaaagctaccactccagcatcaacagctaattcagatgtggcaacaattcctactgatactcccttaaaggaagaaaacgaaggatttgtgaaggttacagatgcgccaaataaatcagagataagcaaacacattgaagtacaggtagcccaggaaactagaaatgtatctactggctctgctgaaaatgaagaaaagtcagaagttcaagcaatcatcgaatctactcctgagctggatatggacaaagatctcagtggatataaaggttcaagcactcccaccaaaggcatagagaacaaagcttttgatcgcaatacagaatctctctttgaagaactgtcttcagctggctcaggcctaataggagatgtggatgaaggagcagatttactaggaatgggtcgggaagttgagaatcttatattagaaaatacacaactgttggaaaccaaaaatgctttgaacatagtgaagaatgatttgatagcaaaagtggatgaactgacctgtgagaaagatgtgctgcaaggggaattggaggctgtgaagcaagccaaactgaaactagaggaaaagaacagagaattggaggaagagcttaggaaagctcgggcagaagctgaagatgcaaggcaaaaagcaaaagatgacgatgatagtgatattcccacagcccagaggaaacggtttactagagtagaaatggcccgtgttctcatggagcgaaaccagtataaagagagattgatggagcttcaggaagctgttcgatggacagagatgattcgggcatcacgagaaaatccagccatgcaggaaaaaaaaaggtcaagcatttggcagtttttcagccgacttttcagctcctcaagtaacacgactaagaagcctgaaccacctgttaatctgaagtacaatgcacccacgtctcatgttactccgtccgtcaagaaaagaagcagcaccttatctcagctccctggggataagtccaaagcctttgatttccttagtgaagaaactgaagctagtttagcctcacgcagagaacaaaagagagagcagtatcgtcaggtaaaagcacatgttcagaaggaagacggtagagtgcaggcttttggctggagtctgcctcagaagtacaaacaggtaaccaatggtcaaggtgaaaataagatgaaaaatttacctgtgcctgtctatctcagacctctggatgaaaaagatacatcaatgaagctgtggtgtgctgttggagtcaatttatctggtgggaagaccagagatggtggttctgttgttggagcaagtgtattttacaaggatgttgctggtttggatacagaaggcagtaaacagcgaagtgcctctcagagtagtttagataagttagatcaggaacttaaggaacagcagaaggagttaaaaaatcaagaagaattatccagtctagtttggatctgtaccagcactcattcggctacaaaagttcttattattgatgctgttcaacctggcaacatcctagacagtttcactgtttgcaactctcatgttctgtgcattgcaagtgtgccaggtgcacgagaaacagactaccctgcaggagaagatctttcagaatctggtcaggtagacaaagcatctttatgtggaagtatgacaagcaacagctcagcagagacagacagcctgttaggaggcatcacagtggttggttgttctgcagaaggtgtgacgggagctgccacttcccctagtacaaatggtgcttctccagtgatggataaaccaccagaaatggaagcagaaaatagtgaggttgatgaaaatgttccaacagcagaagaagcaactgaagctacagaagggaatgcggggtcagctgaagacacagtggacatctcccaaactggcgtctacacagagcatgtctttacagatcctttgggagttcagatcccagaagacctctccccagtgtatcagtcgagcaatgactcagatgcatataaagatcaaatatcagtactgccaaatgaacaagacttggtgagagaagaagcccagaaaatgagtagtcttttaccaactatgtggcttggagctcaaaatggctgtttgtatgtccattcatctgtagcccagtggaggaaatgtctccattccattaaacttaaagattcgattctcagtattgtacacgtgaagggaatcgtgttagtagccctggctgacggcacccttgcaatctttcacagaggagtggatgggcagtgggatttgtcaaactatcacctcttagaccttggacggcctcatcattccatccgttgcatgactgtggtacatgacaaagtctggtgtggctataggaacaaaatctatgtggtgcagccaaaggccatgaaaatagagaaatcttttgatgcacatcccaggaaggagagccaagtgcgacagcttgcgtgggtgggggatggcgtgtgggtctccattcgcttggattctacgctccgtctctatcatgcacacacttatcaacatctacaggatgtggacattgagccttatgtaagcaaaatgttaggtactggaaaactgggcttctcttttgtgagaattacagctcttatggtgtcttgtaatcgtttgtgggtggggacaggaaatggtgtcattatctccatcccattgacagaaacaaataaaacctcaggtgtaccaggaaatcgtcctggaagtgtaatccgtgtatatggtgatgaaaacagtgataaagtgactccagggacatttataccctattgttcaatggcacatgcacagctttgcttccatgggcaccgggatgctgtgaaattctttgtggcagtcccaggtcaagtcatcagcccacaaagtagcagtagtggcacggatctgacgggtgacaaagcagggccatctgcacaggagcctggtagtcagacgcccttgaagtctatgcttgtcatcagtggaggagagggctacatcgacttccgaatgggtgatgaaggtggagaatcagaacttcttggagaggatcttccacttgaaccttctgtcaccaaagcagaaaggagtcacttgatagtgtggcaagtgatgtatggcaatgagtgagcccatgggaaacaggtggagatggggaagccgtctcttctgcatggtttattttccctctatccttttatttaatgctcttttgtgagataagtttcaccacataatgtgtgagcattttttcctgttaactttatattacaaaatccgttctaccataacaatacagaggaactagctgtgttactgcaccagtgttataggtaacttcagtatattatgaacaaatcaaagaatgtttacttcctgcaaactggtgaattatagaaagcaatccagatgtggtttactctgccacagtctaatgtcattcacttcatttgatggggtcacttgttagctgtcactaataatggaattaatgggaaacacttgataaatgaaactgtaccgttaaatacaatagctgagttttccccagtgtattgtaaaattgacacacactaatacaagatggattatcaggatgtatctaaatgtcccgagagggttaaaagctaactgtaaattactttaactttcactttcaaatctgacaaatcttgtttatatggtatataaaactttgttttcatcagatttgggggggttttatattaaagaaattaagactacactatttaaataaacgtttcctgtttctgacttattagagctctaaagtttatgaggcctacttctctgaatattctgatgggttttttttgagaccagtctcattttcatactgacatgtctgaaagatttattatttataaagcttaggacatactctgggaagcttagaagatacttcagcactgggaggattttttaaaggaaatgtgttttgtatttcttgtaccagagaatggtgatgttgattgagttttttccatgtaaaaaatgtacttgtttgccaaatgttcctagattgctcttaacctgttaatacaagtaaaactgtagtggggatggagtctggcctaagtacagaatgagggatttaattagaaaagttattttcttttgttctgtatcaaactgcagaacagctatatacttggtattttgtacgtgaataacgttttagcttttgtgcccttttgagcttgaagggttatcctcaaaggggaaaactatgaaggggaagaagacaaacctaagataccataaagtaaaggttgacattacatattttcattcacaatgcccattaaaaaaaaaaaataggttgggcatggtggctcacgcctgtaatcccagcactttaggaggctgaggcggatggattgcttgagcccaggagttcaagaccagcctgggcaacatggcgaaaccctgtctctaccaaaaaaaaaaaacaaaataaattaaccgggtgtggtggcacatgcctgtagtcccagctacttgggaggctgaggtgggaggatgacctgggcccaggaggtggaggttgcagtgagccttgatagcaccactgcactccagcctgggtgacggagcaagaccctgtctcaaaacagacaaacaagcaaaaaatagattaaagtctggatttcactgattttcttgcttaataagttttttaaaaccacgatgctgcaattttttccctctcaagcttcttgaaaatgtgtgatttacccttttttatctattactctaggcaaagctaaatatgatttttttttttttttttgagacggagtctggctctgttgcccaggctggaatgcagtggtgcgatctcagctcactgcaacctccacctctcaggttcaagtagttctcctgcctcagcctcccaagtagctgggattacaggtgtgtgccaccctgcccagctaatttttgtatttttagtagagacagggtttcgccacgttggccaggctggtctcaaactcctgacctcagatgatctacccgccttggcctcccgaagtgcttgaattacaggcgtgagcccccgcgccggtccgaagcaaagctaaatgtaattttatgtactgttttaacagtataaacctatgggataaaggcccccaatcatcagaaggactactgaaaagaaaagaaagcaaacgtagatgtcaaattgtctaaacattcttaagtaccactgattttttttttctggactattatacaaagatgtctgtaaaaagtataccagtggcttttatgcatatacacgattaggctagattgtgaagtacatgggatttcatgagccagaggaggcatttggatccattgggccacatgtgactataagcacattgtgtacacaataaaattgtagccactcatgtattaaaactgttttggtaaaagctgtattaaaagaataattttttgcttgagctacttagtcacttttttgcagggcaccaaaatgtaggctacttttccatagcttgtttgctatgtttttatttcatcttaaatctgagccatttttggcaatatcttttaaaaaatcattattaaacatttattggaaatgttgtatagattcacaagaaagagacaccaaagtgtttgggaattttaatcccaagaagtaaacatcccagagtcagatcccatttgctgttgttcagccatgtttgtatgactgaatgtaatttaggaaatcaggagttagagatgaaaaatacaaacatgtcaaatggttgtaattgctttttttgaacttactggctttaacttaagtaatataggtgtgtagttgttttatctaaagatgtcagattatctgtggccctgttaattaactgcagggaccagagagaggacaaaaatgcctgtataatttgctttaaaggcttgtccttatgtttgtaatttcagttaaatattttctacagattgcttcacttcccctttcccccaataacaagttcatattcttgtaatgtttactttggtcaacgtggtaatttttggaagaaaatgccaaaatgtaagcttctcacaagcagcaaaggaatgtaactgcctgtagctaccacatcaagggagagaagaggcttgcgtactttgggttgatctcactgtacaaaaaaagtgtacccctattggaagaaataaggaatacttgaaggtttctcctttttttacacttgagtcatgtgcaaggttgaaccatatgaaattgccagtgttcaaccattgctgatctgcaaaagcgacaatatcatatgcctcaacctaacacttactcttaaatgcaggttaaaatctctgtgaggcaaagggataatattctctaggaactcacttttgagagtatttttctctaacccatgtggatctaaattttaaaaataggaatgaatctcttaattgcagcttgtggagagtataaaacattttgagcacaatatgcagcacataacttttcagattgtgtttgcatagaaaaggttaaaatcaattctttcagttactgtattgttcatttcttgtaaaggtcttcctacatttgagacgagaccctttaacataggctgccttagtaacaaaataaaacagatgtgtcataatattaactgtcctaaagaacatgtgtcttgcaaatgccatggaactgaatatttatttccttgtgagtattatgaccgttaccaaaggactcaaccagatttagggctcttcttaattgatcatgttcagaaagggactcatttggtcccactttgtaacatgggaagagtagaagagaaaattaaatgtggaaatcataaatgcttttctaacagggttatgctattctgtaacactaaatgtctgtcttttctcttaaaagattaagttttattaattttgtcatacatttctctatttgaatatatcttaaccattttatgttccaaattcgttttttgtccaagacattctatcagaattttacttgcctctataatctgaaaaatgggttctagaatgtcccacttgctgtctcttagaggctgagcttcatttctatgagcaaagagctcatttagcaatgtagttatttcagtatttatttctattatggaatccctggggttcagaatgtaactttgtacatgagatatatataaatatgtatatgaacatgta

SEQ ID NO: 302013 - DNA, 5104 bp, Homo sapiens
tgccaaagcgtagtacccaatacacgtgaagggaatcgtgttagtagccctggctgacggcacccttgcaatctttcacagaggagtggatgggcagtgggatttgtcaaactatcacctcttagaccttggacggcctcatcattccatccgttgcatgactgtggtacatgacaaagtctggtgtggctataggaacaaaatctatgtggtgcagccaaaggccatgaaaatagagaaatcttttgatgcacatcccaggaaggagagccaagtgcgacagcttgcgtgggtgggggatggcgtgtgggtctccattcgcttggattctacgctccgtctctatcatgcacacacttatcaacatctacaggatgtggacattgagccttatgtaagcaaaatgttaggtactggaaaactgggcttctcttttgtgagaattacagctcttatggtgtcttgtaatcgtttgtgggtggggacaggaaatggtgtcattatctccatcccattgacagaaaccgtaatcctccaccagggacgtttactggggctgagggcaaataaaacctcaggtgtaccaggaaatcgtcctggaagtgtaatccgtgtatatggtgatgaaaacagtgataaagtgactccagggacatttataccctattgttcaatggcacatgcacagctttgcttccatgggcaccgggatgctgtgaaattctttgtggcagtcccaggtcaagtcatcagcccacaaagtagcagtagtggcacggatctgacgggtgacaaagcagggccatctgcacaggagcctggtagtcagacgcccttgaagtctatgcttgtcatcagtggaggagagggctacatcgacttccgaatgggtgatgaaggtggagaatcagaacttcttggagaggatcttccacttgaaccttctgtcaccaaagcagaaaggagtcacttgatagtgtggcaagtgatgtatggcaatgagtgagcccatgggaaacaggtggagatggggaagccgtctcttctgcatggtttattttccctctatccttttatttaatgctcttttgtgagataagtttcaccacataatgtgtgagcattttttcctgttaactttatattacaaaatccgttctaccataacaatacagaggaactagctgtgttactgcaccagtgttataggtaacttcagtatattatgaacaaatcaaagaatgtttacttcctgcaaactggtgaattatagaaagcaatccagatgtggtttactctgccacagtctaatgtcattcacttcatttgatggggtcacttgttagctgtcactaataatggaattaatgggaaacacttgataaatgaaactgtaccgttaaatacaatagctgagttttccccagtgtattgtaaaattgacacacactaatacaagatggattatcaggatgtatctaaatgtcccgagagggttaaaagctaactgtaaattactttaactttcactttcaaatctgacaaatcttgtttatatggtatataaaactttgttttcatcagatttgggggggttttatattaaagaaattaagactacactatttaaataaacgtttcctgtttctgacttattagagctctaaagtttatgaggcctacttctctgaatattctgatgggttttttttgagaccagtctcattttcatactgacatgtctgaaagatttattatttataaagcttaggacatactctgggaagcttagaagatacttcagcactgggaggattttttaaaggaaatgtgttttgtatttcttgtaccagagaatggtgatgttgattgagttttttccatgtaaaaaatgtacttgtttgccaaatgttcctagattgctcttaacctgttaatacaagtaaaactgtagtggggatggagtctggcctaagtacagaatgagggatttaattagaaaagttattttcttttgttctgtatcaaactgcagaacagctatatacttggtattttgtacgtgaataacgttttagcttttgtgcccttttgagcttgaagggttatcctcaaaggggaaaactatgaaggggaagaagacaaacctaagataccataaagtaaaggttgacattacatattttcattcacaatgcccattaaaaaaaaaaaataggttgggcatggtggctcacgcctgtaatcccagcactttaggaggctgaggcggatggattgcttgagcccaggagttcaagaccagcctgggcaacatggcgaaaccctgtctctaccaaaaaaaaaaaacaaaataaattaaccgggtgtggtggcacatgcctgtagtcccagctacttgggaggctgaggtgggaggatgacctgggcccaggaggtggaggttgcagtgagccttgatagcaccactgcactccagcctgggtgacggagcaagaccctgtctcaaaacagacaaacaagcaaaaaatagattaaagtctggatttcactgattttcttgcttaataagttttttaaaaccacgatgctgcaattttttccctctcaagcttcttgaaaatgtgtgatttacccttttttatctattactctaggcaaagctaaatatgatttttttttttttttttgagacggagtctggctctgttgcccaggctggaatgcagtggtgcgatctcagctcactgcaacctccacctctcaggttcaagtagttctcctgcctcagcctcccaagtagctgggattacaggtgtgtgccaccctgcccagctaatttttgtatttttagtagagacagggtttcgccacgttggccaggctggtctcaaactcctgacctcagatgatctacccgccttggcctcccgaagtgcttgaattacaggcgtgagcccccgcgccggtccgaagcaaagctaaatgtaattttatgtactgttttaacagtataaacctatgggataaaggcccccaatcatcagaaggactactgaaaagaaaagaaagcaaacgtagatgtcaaattgtctaaacattcttaagtaccactgattttttttttctggactattatacaaagatgtctgtaaaaagtataccagtggcttttatgcatatacacgattaggctagattgtgaagtacatgggatttcatgagccagaggaggcatttggatccattgggccacatgtgactataagcacattgtgtacacaataaaattgtagccactcatgtattaaaactgttttggtaaaagctgtattaaaagaataattttttgcttgagctacttagtcacttttttgcagggcaccaaaatgtaggctacttttccatagcttgtttgctatgtttttatttcatcttaaatctgagccatttttggcaatatcttttaaaaaatcattattaaacatttattggaaatgttgtatagattcacaagaaagagacaccaaagtgtttgggaattttaatcccaagaagtaaacatcccagagtcagatcccatttgctgttgttcagccatgtttgtatgactgaatgtaatttaggaaatcaggagttagagatgaaaaatacaaacatgtcaaatggttgtaattgctttttttgaacttactggctttaacttaagtaatataggtgtgtagttgttttatctaaagatgtcagattatctgtggccctgttaattaactgcagggaccagagagaggacaaaaatgcctgtataatttgctttaaaggcttgtccttatgtttgtaatttcagttaaatattttctacagattgcttcacttcccctttcccccaataacaagttcatattcttgtaatgtttactttggtcaacgtggtaatttttggaagaaaatgccaaaatgtaagcttctcacaagcagcaaaggaatgtaactgcctgtagctaccacatcaagggagagaagaggcttgcgtactttgggttgatctcactgtacaaaaaaagtgtacccctattggaagaaataaggaatacttgaaggtttctcctttttttacacttgagtcatgtgcaaggttgaaccatatgaaattgccagtgttcaaccattgctgatctgcaaaagcgacaatatcatatgcctcaacctaacacttactcttaaatgcaggttaaaatctctgtgaggcaaagggataatattctctaggaactcacttttgagagtatttttctctaacccatgtggatctaaattttaaaaataggaatgaatctcttaattgcagcttgtggagagtataaaacattttgagcacaatatgcagcacataacttttcagattgtgtttgcatagaaaaggttaaaatcaattctttcagttactgtattgttcatttcttgtaaaggtcttcctacatttgagacgagaccctttaacataggctgccttagtaacaaaataaaacagatgtgtcataatattaactgtcctaaagaacatgtgtcttgcaaatgccatggaactgaatatttatttccttgtgagtattatgaccgttaccaaaggactcaaccagatttagggctcttcttaattgatcatgttcagaaagggactcatttggtcccactttgtaacatgggaagagtagaagagaaaattaaatgtggaaatcataaatgcttttctaacagggttatgctattctgtaacactaaatgtctgtcttttctcttaaaagattaagttttattaattttgtcatacatttctctatttgaatatatcttaaccattttatgttccaaattcgttttttgtccaagacattctatcagaattttacttgcctctataatctgaaaaatgggttctagaatgtcccacttgctgtctcttagaggctgagcttcatttctatgagcaaagagctcatttagcaatgtagttatttcagtatttatttctattatggaatccctggggttcagaatgtaactttgtacatgagatatatataaatatgtatatgaacatgta

SEQ ID NO: 302014 - DNA, 7881 bp, Homo sapiens
tccggccccggcccccaccccgccgggcccagccccagccccggcccgggctccagccctagtacccgtcccagcccgagtcgggtccgtcccgtgcgggcaggtgccgcccctctgccggcgacgccccgggccgcccgcccgtccgcttgccaccatggagctggaggacggtgtggtgtatcaggaggagcccggcggctccggggccgtgatgtcggagcgggtgtccggcctggccggctccatctaccgcgagttcgagcggcttatcgggcgctatgacgaggaggtggtcaaagagctgatgccgctggtggtggctgtgctggagaacctggactcggtgttcgcgcaggaccaggagcaccaggtggagctggagctgctgcgggacgacaacgagcagctcatcacccagtacgagcgggagaaggcgctgcgcaagcacgctgaggagaaattcattgaatttgaagactctcaagaacaggaaaaaaaggacttacagacccgagtggaatctttagaatctcaaacaagacaacttgagctgaaagcgaaaaactatgctgaccagattagcagacttgaagaaagagaagcagaactgaagaaggaatataatgcattacatcaaagacacactgagatgatccataattatatggaacatttagaaagaacaaaacttcatcagctctcagggagtgatcaactagaatccacagctcatagtagaattagaaaagaacgccctatatcattaggaattttcccattacctgctggagatggattgcttacacctgatgctcagaaaggaggagagacccctggatctgagcaatggaaatttcaggaattaagtcaaccacgttctcataccagcctgaaggatgagctttctgatgttagccaaggcggatctaaagctaccactccagcatcaacagctaattcagatgtggcaacaattcctactgatactcccttaaaggaagaaaacgaaggatttgtgaaggttacagatgcgccaaataaatcagagataagcaaacacattgaagtacaggtagcccaggaaactagaaatgtatctactggctctgctgaaaatgaagaaaagtcagaagttcaagcaatcatcgaatctactcctgagctggatatggacaaagatctcagtggatataaaggttcaagcactcccaccaaaggcatagagaacaaagcttttgatcgcaatacagaatctctctttgaagaactgtcttcagctggctcaggcctaataggagatgtggatgaaggagcagatttactaggaatgggtcgggaagttgagaatcttatattagaaaatacacaactgttggaaaccaaaaatgctttgaacatagtgaagaatgatttgatagcaaaagtggatgaactgacctgtgagaaagatgtgctgcaaggggaattggaggctgtgaagcaagccaaactgaaactagaggaaaagaacagagaattggaggaagagcttaggaaagctcgggcagaagctgaagatgcaaggcaaaaagcaaaagatgacgatgatagtgatattcccacagcccagaggaaacggtttactagagtagaaatggcccgtgttctcatggagcgaaaccagtataaagagagattgatggagcttcaggaagctgttcgatggacagagatgattcgggcatcacgagaaaatccagccatgcaggaaaaaaaaaggtcaagcatttggcagtttttcagccgacttttcagctcctcaagtaacacgactaagaagcctgaaccacctgttaatctgaagtacaatgcacccacgtctcatgttactccgtccgtcaagaaaagaagcagcaccttatctcagctccctggggataagtccaaagcctttgatttccttagtgaagaaactgaagctagtttagcctcacgcagagaacaaaagagagagcagtatcgtcaggtaaaagcacatgttcagaaggaagacggtagagtgcaggcttttggctggagtctgcctcagaagtacaaacaggtaaccaatggtcaaggtgaaaataagatgaaaaatttacctgtgcctgtctatctcagacctctggatgaaaaagatacatcaatgaagctgtggtgtgctgttggagtcaatttatctggtgggaagaccagagatggtggttctgttgttggagcaagtgtattttacaaggatgttgctggtttggatacagaaggcagtaaacagcgaagtgcctctcagagtagtttagataagttagatcaggaacttaaggaacagcagaaggagttaaaaaatcaagaagaattatccagtctagtttggatctgtaccagcactcattcggctacaaaagttcttattattgatgctgttcaacctggcaacatcctagacagtttcactgtttgcaactctcatgttctgtgcattgcaagtgtgccaggtgcacgagaaacagactaccctgcaggagaagatctttcagaatctggtcaggtagacaaagcatctttatgtggaagtatgacaagcaacagctcagcagagacagacagcctgttaggaggcatcacagtggttggttgttctgcagaaggtgtgacgggagctgccacttcccctagtacaaatggtgcttctccagtgatggataaaccaccagaaatggaagcagaaaatagtgaggttgatgaaaatgttccaacagcagaagaagcaactgaagctacagaagggaatgcggggtcagctgaagacacagtggacatctcccaaactggcgtctacacagagcatgtctttacagatcctttgggagttcagatcccagaagacctctccccagtgtatcagtcgagcaatgactcagatgcatataaagatcaaatatcagtactgccaaatgaacaagacttggtgagagaagaagcccagaaaatgagtagtcttttaccaactatgtggcttggagctcaaaatggctgaaatcttttgatgcacatcccaggaaggagagccaagtgcgacagcttgcgtgggtgggggatggcgtgtgggtctccattcgcttggattctacgctccgtctctatcatgcacacacttatcaacatctacaggatgtggacattgagccttatgtaagcaaaatgttaggtactggaaaactgggcttctcttttgtgagaattacagctcttatggtgtcttgtaatcgtttgtgggtggggacaggaaatggtgtcattatctccatcccattgacagaaacaaataaaacctcaggtgtaccaggaaatcgtcctggaagtgtaatccgtgtatatggtgatgaaaacagtgataaagtgactccagggacatttataccctattgttcaatggcacatgcacagctttgcttccatgggcaccgggatgctgtgaaattctttgtggcagtcccaggtcaagtcatcagcccacaaagtagcagtagtggcacggatctgacgggtgacaaagcagggccatctgcacaggagcctggtagtcagacgcccttgaagtctatgcttgtcatcagtggaggagagggctacatcgacttccgaatgggtgatgaaggtggagaatcagaacttcttggagaggatcttccacttgaaccttctgtcaccaaagcagaaaggagtcacttgatagtgtggcaagtgatgtatggcaatgagtgagcccatgggaaacaggtggagatggggaagccgtctcttctgcatggtttattttccctctatccttttatttaatgctcttttgtgagataagtttcaccacataatgtgtgagcattttttcctgttaactttatattacaaaatccgttctaccataacaatacagaggaactagctgtgttactgcaccagtgttataggtaacttcagtatattatgaacaaatcaaagaatgtttacttcctgcaaactggtgaattatagaaagcaatccagatgtggtttactctgccacagtctaatgtcattcacttcatttgatggggtcacttgttagctgtcactaataatggaattaatgggaaacacttgataaatgaaactgtaccgttaaatacaatagctgagttttccccagtgtattgtaaaattgacacacactaatacaagatggattatcaggatgtatctaaatgtcccgagagggttaaaagctaactgtaaattactttaactttcactttcaaatctgacaaatcttgtttatatggtatataaaactttgttttcatcagatttgggggggttttatattaaagaaattaagactacactatttaaataaacgtttcctgtttctgacttattagagctctaaagtttatgaggcctacttctctgaatattctgatgggttttttttgagaccagtctcattttcatactgacatgtctgaaagatttattatttataaagcttaggacatactctgggaagcttagaagatacttcagcactgggaggattttttaaaggaaatgtgttttgtatttcttgtaccagagaatggtgatgttgattgagttttttccatgtaaaaaatgtacttgtttgccaaatgttcctagattgctcttaacctgttaatacaagtaaaactgtagtggggatggagtctggcctaagtacagaatgagggatttaattagaaaagttattttcttttgttctgtatcaaactgcagaacagctatatacttggtattttgtacgtgaataacgttttagcttttgtgcccttttgagcttgaagggttatcctcaaaggggaaaactatgaaggggaagaagacaaacctaagataccataaagtaaaggttgacattacatattttcattcacaatgcccattaaaaaaaaaaaataggttgggcatggtggctcacgcctgtaatcccagcactttaggaggctgaggcggatggattgcttgagcccaggagttcaagaccagcctgggcaacatggcgaaaccctgtctctaccaaaaaaaaaaaacaaaataaattaaccgggtgtggtggcacatgcctgtagtcccagctacttgggaggctgaggtgggaggatgacctgggcccaggaggtggaggttgcagtgagccttgatagcaccactgcactccagcctgggtgacggagcaagaccctgtctcaaaacagacaaacaagcaaaaaatagattaaagtctggatttcactgattttcttgcttaataagttttttaaaaccacgatgctgcaattttttccctctcaagcttcttgaaaatgtgtgatttacccttttttatctattactctaggcaaagctaaatatgatttttttttttttttttgagacggagtctggctctgttgcccaggctggaatgcagtggtgcgatctcagctcactgcaacctccacctctcaggttcaagtagttctcctgcctcagcctcccaagtagctgggattacaggtgtgtgccaccctgcccagctaatttttgtatttttagtagagacagggtttcgccacgttggccaggctggtctcaaactcctgacctcagatgatctacccgccttggcctcccgaagtgcttgaattacaggcgtgagcccccgcgccggtccgaagcaaagctaaatgtaattttatgtactgttttaacagtataaacctatgggataaaggcccccaatcatcagaaggactactgaaaagaaaagaaagcaaacgtagatgtcaaattgtctaaacattcttaagtaccactgattttttttttctggactattatacaaagatgtctgtaaaaagtataccagtggcttttatgcatatacacgattaggctagattgtgaagtacatgggatttcatgagccagaggaggcatttggatccattgggccacatgtgactataagcacattgtgtacacaataaaattgtagccactcatgtattaaaactgttttggtaaaagctgtattaaaagaataattttttgcttgagctacttagtcacttttttgcagggcaccaaaatgtaggctacttttccatagcttgtttgctatgtttttatttcatcttaaatctgagccatttttggcaatatcttttaaaaaatcattattaaacatttattggaaatgttgtatagattcacaagaaagagacaccaaagtgtttgggaattttaatcccaagaagtaaacatcccagagtcagatcccatttgctgttgttcagccatgtttgtatgactgaatgtaatttaggaaatcaggagttagagatgaaaaatacaaacatgtcaaatggttgtaattgctttttttgaacttactggctttaacttaagtaatataggtgtgtagttgttttatctaaagatgtcagattatctgtggccctgttaattaactgcagggaccagagagaggacaaaaatgcctgtataatttgctttaaaggcttgtccttatgtttgtaatttcagttaaatattttctacagattgcttcacttcccctttcccccaataacaagttcatattcttgtaatgtttactttggtcaacgtggtaatttttggaagaaaatgccaaaatgtaagcttctcacaagcagcaaaggaatgtaactgcctgtagctaccacatcaagggagagaagaggcttgcgtactttgggttgatctcactgtacaaaaaaagtgtacccctattggaagaaataaggaatacttgaaggtttctcctttttttacacttgagtcatgtgcaaggttgaaccatatgaaattgccagtgttcaaccattgctgatctgcaaaagcgacaatatcatatgcctcaacctaacacttactcttaaatgcaggttaaaatctctgtgaggcaaagggataatattctctaggaactcacttttgagagtatttttctctaacccatgtggatctaaattttaaaaataggaatgaatctcttaattgcagcttgtggagagtataaaacattttgagcacaatatgcagcacataacttttcagattgtgtttgcatagaaaaggttaaaatcaattctttcagttactgtattgttcatttcttgtaaaggtcttcctacatttgagacgagaccctttaacataggctgccttagtaacaaaataaaacagatgtgtcataatattaactgtcctaaagaacatgtgtcttgcaaatgccatggaactgaatatttatttccttgtgagtattatgaccgttaccaaaggactcaaccagatttagggctcttcttaattgatcatgttcagaaagggactcatttggtcccactttgtaacatgggaagagtagaagagaaaattaaatgtggaaatcataaatgcttttctaacagggttatgctattctgtaacactaaatgtctgtcttttctcttaaaagattaagttttattaattttgtcatacatttctctatttgaatatatcttaaccattttatgttccaaattcgttttttgtccaagacattctatcagaattttacttgcctctataatctgaaaaatgggttctagaatgtcccacttgctgtctcttagaggctgagcttcatttctatgagcaaagagctcatttagcaatgtagttatttcagtatttatttctattatggaatccctggggttcagaatgtaactttgtacatgagatatatataaatatgtatatgaacatgta

SEQ ID NO: 302015 - DNA, 5953 bp, Homo sapiens
tccggccccggcccccaccccgccgggcccagccccagccccggcccgggctccagccctagtacccgtcccagcccgagtcgggtccgtcccgtgcgggcaggtgccgcccctctgccggcgacgccccgggccgcccgcccgtccgcttgccaccatggagctggaggacggtgtggtgtatcaggaggagcccggcggctccggggccgtgatgtcggagcgggtgtccggcctggccggctccatctaccgcgagttcgagcggcttatcgggcgctatgacgaggaggtggtcaaagagctgatgccgctggtggtggctgtgctggagaacctggactcggtgttcgcgcaggaccaggagcaccaggtggagctggagctgctgcgggacgacaacgagcagctcatcacccagtacgagcgggagaaggcgctgcgcaagcacgctgaggagaaattcattgaatttgaagactctcaagaacaggaaaaaaaggacttacagacccgagtggaatctttagaatctcaaacaagacaacttgagctgaaagcgaaaaactatgctgaccagattagcagacttgaagaaagagaagcagaactgaagaaggaatataatgcattacatcaaagacacactgagatgatccataattatatggaacatttagaaagaacaaaacttcatcagctctcagggagtgatcaactagaatccacagctcatagtagaattagaaaagaacgccctatatcattaggaattttcccattacctgctggagatggattgcttacacctgatgctcagaaaggaggagagacccctggatctgagcaatggaaatttcaggaattaagtcaaccacgttctcataccagcctgaaggatgagctttctgatgttagccaaggcggatctaaagctaccactccagcatcaacagctaattcagatgtggcaacaattcctactgatactcccttaaaggaagaaaacgaaggatttgtgaaggttacagatgcgccaaataaatcagagataagcaaacacattgaagtacaggtagcccaggaaactagaaatgtatctactggctctgctgaaaatgaagaaaagtcagaagttcaagcaatcatcgaatctactcctgagctggatatggacaaagatctcagtggatataaaggttcaagcactcccaccaaaggcatagagaacaaagcttttgatcgcaatacagaatctctctttgaagaactgtcttcagctggctcaggcctaataggagatgtggatgaaggagcagatttactaggaatgggtcgggaagttgagaatcttatattagaaaatacacaactgttggaaaccaaaaatgctttgaacatagtgaagaatgatttgatagcaaaagtggatgaactgacctgtgagaaagatgtgctgcaaggggaattggaggctgtgaagcaagccaaactgaaactagaggaaaagaacagagaattggaggaagagcttaggaaagctcgggcagaagctgaagatgcaaggcaaaaagcaaaagatgacgatgatagtgatattcccacagcccagaggaaacggtttactagagtagaaatggcccgtgttctcatggagcgaaaccagtataaagagagattgatggagcttcaggaagctgttcgatggacagagatgattcgggcatcacgagaaaatccagccatgcaggaaaaaaaaaggtcaagcatttggcagtttttcagccgacttttcagctcctcaagtaacacgactaagaagcctgaaccacctgttaatctgaagtacaatgcacccacgtctcatgttactccgtccgtcaagaaaagaagcagcaccttatctcagctccctggggataagtccaaagcctttgatttccttagtgaagaaactgaagctagtttagcctcacgcagagaacaaaagagagagcagtatcgtcaggtaaaagcacatgttcagaaggaagacggtagagtgcaggcttttggctggagtctgcctcagaagtacaaacaggtaaccaatggtcaaggtgaaaataagatgaaaaatttacctgtgcctgtctatctcagacctctggatgaaaaagatacatcaatgaagctgtggtgtgctgttggagtcaatttatctggtgggaagaccagagatggtggttctgttgttggagcaagtgtattttacaaggatgttgctggtttggatacagaaggcagtaaacagcgaagtgcctctcagagtagtttagataagttagatcaggaacttaaggaacagcagaaggagttaaaaaatcaagaagaattatccagtctagtttggatctgtaccagcactcattcggctacaaaagttcttattattgatgctgttcaacctggcaacatcctagacagtttcactgtttgcaactctcatgttctgtgcattgcaagtgtgccaggtgcacgagaaacagactaccctgcaggagaagatctttcagaatctggtcaggtagacaaagcatctttatgtggaagtatgacaagcaacagctcagcagagacagacagcctgttaggaggcatcacagtggttggttgttctgcagaaggtgtgacgggagctgccacttcccctagtacaaatggtgcttctccagtgatggataaaccaccagaaatggaagcagaaaatagtgaggttgatgaaaatgttccaacagcagaagaagcaactgaagctacagaagggaatgcggggtcagctgaagacacagtggacatctcccaaactggcgtctacacagagcatgtctttacagatcctttgggagttcagatcccagaagacctctccccagtgtatcagtcgagcaatgactcagatgcatataaagatcaaatatcagtactgccaaatgaacaagacttggtgagagaagaagcccagaaaatgagtagtcttttaccaactatgtggcttggagctcaaaatggctgtttgtatgtccattcatctgtagcccagtggaggaaatgtctccattccattaaacttaaagattcgattctcagtattgtacacgtgaagggaatcgtgttagtagccctggctgacggcacccttgcaatctttcacagaggagtggatgggcagtgggatttgtcaaactatcacctcttagaccttggacggcctcatcattccatccgttgcatgactgtggtacatgacaaagtctggtgtggctataggaacaaaatctatgtggtgcagccaaaggccatgaaaatagagaaatcttttgatgcacatcccaggaaggagagccaagtgcgacagcttgcgtgggtgggggatggcgtgtgggtctccattcgcttggattctacgctccgtctctatcatgcacacacttatcaacatctacaggatgtggacattgagccttatgtaagcaaaatgttaggtactggaaaactgggcttctcttttgtgagaattacagctcttatggtgtcttgtaatcgtttgtgggtggggacaggaaatggtgtcattatctccatcccattgacagaaaccgtaatcctccaccagggacgtttactggggctgagggcaaataaaacctcaggtgtaccaggaaatcgtcctggaagtgtaatccgtgtatatggtgatgaaaacagtgataaagtgactccagggacatttataccctattgttcaatggcacatgcacagctttgcttccatgggcaccgggatgctgtgaaattctttgtggcagtcccaggtcaagtcatcagcccacaaagtagcagtagtggcacggatctgacgggtgacaaagcagggccatctgcacaggagcctggtagtcagacgcccttgaagtctatgcttgtcatcagtggaggagagggctacatcgacttccgaatgggtgatgaaggtggagaatcagaacttcttggagaggatcttccacttgaaccttctgtcaccaaagcagaaaggagtcacttgatagtgtggcaagtgatgtatggcaatgagtgagcccatgggaaacaggtggagatggggaagccgtctcttctgcatggtttattttccctctatccttttatttaatgctcttttgtgagataagtttcaccacataatgtgtgagcattttttcctgttaactttatattacaaaatccgttctaccataacaatacagaggaactagctgtgttactgcaccagtgttataggtaacttcagtatattatgaacaaatcaaagaatgtttacttcctgcaaactggtgaattatagaaagcaatccagatgtggtttactctgccacagtctaatgtcattcacttcatttgatggggtcacttgttagctgtcactaataatggaattaatgggaaacacttgataaatgaaactgtaccgttaaatacaatagctgagttttccccagtgtattgtaaaattgacacacactaatacaagatggattatcaggatgtatctaaatgtcccgagagggttaaaagctaactgtaaattactttaactttcactttcaaatctgacaaatcttgtttatatggtatataaaactttgttttcatcagatttgggggggttttatattaaagaaattaagactacactatttaaataaacgtttcctgtttctgacttattagagctctaaagtttatgaggcctacttctctgaatattctgatgggttttttttgagaccagtctcattttcatactgacatgtctgaaagatttattatttataaagcttaggacatactctgggaagcttagaagatacttcagcactgggaggattttttaaaggaaatgtgttttgtatttcttgtaccagagaatggtgatgttgattgagttttttccatgtaaaaaatgtacttgtttgccaaatgttcctagattgctcttaacctgttaatacaagtaaaactgtagtggggatggagtctggcctaagtacagaatgagggatttaattagaaaagttattttcttttgttctgtatcaaactgcagaacagctatatacttggtattttgtacgtgaataacgttttagcttttgtgcccttttgagcttgaagggttatcctcaaaggggaaaactatgaaggggaagaagacaaacctaagataccataaagtaaaggttgacattacatattttcattcacaatgcccattaaaaaaaaaaaataggttgggcatggtggctcacgcctgtaatcccagcactttaggaggctgaggcggatggattgcttgagcccaggagttcaagaccagcctgggcaacatggcgaaaccctgtctctaccaaaaaaaaaaaacaaaataaattaaccgggtgtggtggcacatgcctgtagtcccagctacttgggaggctgaggtgggaggatgacctgggcccaggaggtggaggttgcagtgagccttgatagcaccactgcactccagcctgggtgacggagcaagaccctgtctcaaaacagacaaacaagcaaaaaatagattaaagtctggatttcactgattttcttgcttaataagttttttaaaaccacgatgctgcaattttttccctctcaagcttcttgaaaatgtgtgatttacccttttttatctattactctaggcaaagctaaatatgatttttttttttttttttgagacggagtctggctctgttgcccaggctggaatgcagtggtgcgatctcagctcactgcaacctccacctctcaggcggatggattgcttgagcccaggagttcaagaccagcctgggcaacgtggcgaaaccctgtctctaccaaa

SEQ ID NO: 302016 - DNA, 5824 bp, Homo sapiens
agttaataggctggctgtcgcttggggttgctgcataaatgctaggagcagcagctctatggttatgaggtggggagaacggaatgacgtcatcgcttgggagctgctgcaggatggagtggaaagctgctgctgatggcattgtttttgtggcagcaagctgaatgacagatcctcactacaaagatacccctttggcccccgtgtaggcctccttggttcgggtgtttcaccatgccagcacagcgccatgagtcctggatgcatgctgctgtttgtgtttggctttgttggcggggcggtggtcattaattctgctatcttagtatctctctctgttttgctgcttgtgcacttttctatttctaccggtgtgccagctctgacgcagaacctaccaaggatactcagaaaagaacgccctatatcattaggaattttcccattacctgctggagatggattgcttacacctgatgctcagaaaggaggagagacccctggatctgagcaatggaaatttcaggaattaagtcaaccacgttctcataccagcctgaaggtcagcaatagtcctgaacctcagaaggctgtagaacaggaggtgagaatggtgcttcttaacattttgcaaaaagtatactaaagtgattaactattgattacttcctcaactgctattctcaagacatcagatgctcagcttggaagactattgttgtaattcactgaaatataaaagaaaattatttccactgtagtggttgtcagggctttactgcaatctgtaatttattccttccccaaagtaagcatttttaaataaaggaaagaaaatataagtaaattctgtgaaattcagcctgtttgcatttatccagctctatgtaatggtatactttccagaaataccttcttcagggcataatgtatgtaacttgtatttgtcctgaatgtggcctagtgtgtcatcttacagtggactgcttccttagtttaatagagttcttcatctccagtcagggcaccatccagctttattcatcaaacatctgttaagagcctactacaggccaggtgtggtggctcatgcctgaaatcccagcactctgcccaggcaggcggatcacttggtcaggagtaggagttcaagaccagcatggccagtatggtgaaatcttgtctctactaaaaatacaaaaatcagccaggcatggtggcagacacctgtaatcccaggtacttaggagtctgaggcaggagaattgcttgaacccgggaggtggaggttgcagtgagctaagatggtgccactgccttccagcctgggcaacacagcgagactccatctcaaaacagacaaacaagcaaaaaatagattaaagtctggatttcactgattttcttgcttaataagttttttaaaaccacgatgctgtgaaattctttgtggcagtcccgtcaagtcatcagcccacaaagtagcagtagtggcacggatctgacgggtgacaaagcagggccatctgcacaggagcctggtagtcagacgcccttgaagtctatgcttgtcatcagtggaggagagggctacatcgacttccgaatgggtgatgaaggtggagaatcagaacttcttggagaggatcttccacttgaaccttctgtcaccaaagcagaaaggagtcacttgatagtgtggcaagtgatgtatggcaatgagtgagcccatgggaaacaggtggagatggggaagccgtctcttctgcatggtttattttccctctatccttttatttaatgctcttttgtgagataagtttcaccacataatgtgtgagcattttttcctgttaactttatattacaaaatccgttctaccataacaatacagaggaactagctgtgttactgcaccagtgttataggtaacttcagtatattatgaacaaatcaaagaatgtttacttcctgcaaactggtgaattatagaaagcaatccagatgtggtttactctgccacagtctaatgtcattcacttcatttgatggggtcacttgttagctgtcactaataatggaattaatgggaaacacttgataaatgaaactgtaccgttaaatacaatagctgagttttccccagtgtattgtaaaattgacacacactaatacaagatggattatcaggatgtatctaaatgtcccgagagggttaaaagctaactgtaaattactttaactttcactttcaaatctgacaaatcttgtttatatggtatataaaactttgttttcatcagatttgggggggttttatattaaagaaattaagactacactatttaaataaacgtttcctgtttctgacttattagagctctaaagtttatgaggcctacttctctgaatattctgatgggttttttttgagaccagtctcattttcatactgacatgtctgaaagatttattatttataaagcttaggacatactctgggaagcttagaagatacttcagcactgggaggattttttaaaggaaatgtgttttgtatttcttgtaccagagaatggtgatgttgattgagttttttccatgtaaaaaatgtacttgtttgccaaatgttcctagattgctcttaacctgttaatacaagtaaaactgtagtggggatggagtctggcctaagtacagaatgagggatttaattagaaaagttattttcttttgttctgtatcaaactgcagaacagctatatacttggtattttgtacgtgaataacgttttagcttttgtgcccttttgagcttgaagggttatcctcaaaggggaaaactatgaaggggaagaagacaaacctaagataccataaagtaaaggttgacattacatattttcattcacaatgcccattaaaaaaaaaaaataggttgggcatggtggctcacgcctgtaatcccagcactttaggaggctgaggcggatggattgcttgagcccaggagttcaagaccagcctgggcaacatggcgaaaccctgtctctaccaaaaaaaaaaaacaaaataaattaaccgggtgtggtggcacatgcctgtagtcccagctacttgggaggctgaggtgggaggatgacctgggcccaggaggtggaggttgcagtgagccttgatagcaccactgcactccagcctgggtgacggagcaagaccctgtctcaaaacagacaaacaagcaaaaaatagattaaagtctggatttcactgattttcttgcttaataagttttttaaaaccacgatgctgcaattttttccctctcaagcttcttgaaaatgtgtgatttacccttttttatctattactctaggcaaagctaaatatgatttttttttttttttttgagacggagtctggctctgttgcccaggctggaatgcagtggtgcgatctcagctcactgcaacctccacctctcaggttcaagtagttctcctgcctcagcctcccaagtagctgggattacaggtgtgtgccaccctgcccagctaatttttgtatttttagtagagacagggtttcgccacgttggccaggctggtctcaaactcctgacctcagatgatctacccgccttggcctcccgaagtgcttgaattacaggcgtgagcccccgcgccggtccgaagcaaagctaaatgtaattttatgtactgttttaacagtataaacctatgggataaaggcccccaatcatcagaaggactactgaaaagaaaagaaagcaaacgtagatgtcaaattgtctaaacattcttaagtaccactgattttttttttctggactattatacaaagatgtctgtaaaaagtataccagtggcttttatgcatatacacgattaggctagattgtgaagtacatgggatttcatgagccagaggaggcatttggatccattgggccacatgtgactataagcacattgtgtacacaataaaattgtagccactcatgtattaaaactgttttggtaaaagctgtattaaaagaataattttttgcttgagctacttagtcacttttttgcagggcaccaaaatgtaggctacttttccatagcttgtttgctatgtttttatttcatcttaaatctgagccatttttggcaatatcttttaaaaaatcattattaaacatttattggaaatgttgtatagattcacaagaaagagacaccaaagtgtttgggaattttaatcccaagaagtaaacatcccagagtcagatcccatttgctgttgttcagccatgtttgtatgactgaatgtaatttaggaaatcaggagttagagatgaaaaatacaaacatgtcaaatggttgtaattgctttttttgaacttactggctttaacttaagtaatataggtgtgtagttgttttatctaaagatgtcagattatctgtggccctgttaattaactgcagggaccagagagaggacaaaaatgcctgtataatttgctttaaaggcttgtccttatgtttgtaatttcagttaaatattttctacagattgcttcacttcccctttcccccaataacaagttcatattcttgtaatgtttactttggtcaacgtggtaatttttggaagaaaatgccaaaatgtaagcttctcacaagcagcaaaggaatgtaactgcctgtagctaccacatcaagggagagaagaggcttgcgtactttgggttgatctcactgtacaaaaaaagtgtacccctattggaagaaataaggaatacttgaaggtttctcctttttttacacttgagtcatgtgcaaggttgaaccatatgaaattgccagtgttcaaccattgctgatctgcaaaagcgacaatatcatatgcctcaacctaacacttactcttaaatgcaggttaaaatctctgtgaggcaaagggataatattctctaggaactcacttttgagagtatttttctctaacccatgtggatctaaattttaaaaataggaatgaatctcttaattgcagcttgtggagagtataaaacattttgagcacaatatgcagcacataacttttcagattgtgtttgcatagaaaaggttaaaatcaattctttcagttactgtattgttcatttcttgtaaaggtcttcctacatttgagacgagaccctttaacataggctgccttagtaacaaaataaaacagatgtgtcataatattaactgtcctaaagaacatgtgtcttgcaaatgccatggaactgaatatttatttccttgtgagtattatgaccgttaccaaaggactcaaccagatttagggctcttcttaattgatcatgttcagaaagggactcatttggtcccactttgtaacatgggaagagtagaagagaaaattaaatgtggaaatcataaatgcttttctaacagggttatgctattctgtaacactaaatgtctgtcttttctcttaaaagattaagttttattaattttgtcatacatttctctatttgaatatatcttaaccattttatgttccaaattcgttttttgtccaagacattctatcagaattttacttgcctctataatctgaaaaatgggttctagaatgtcccacttgctgtctcttagaggctgagcttcatttctatgagcaaagagctcatttagcaatgtagttatttcagtatttatttctattatggaatccctggggttcagaatgtaactttgtacatgagatatatataaatatgtatatgaacatgta

SEQ ID NO: 302017 - DNA, 5067 bp, Homo sapiens
catcagtctggtatcaataaaagctgctctattgtagtggctggattcttgtaagcacaactttttaccaaccccctcaagggaaatattcttactgtgagggagaaaaatcagaagataaactataaagaaagactttatttgcaaatatacccatttactttaaactgtataatggttagttttctaacatgtgcattaaaaacaaaacaagaaacaactaagattcaaatttgttttttttttaactaaaattattttttaaatgaatagatgtgtttaaaaaataagcttacttattgctagactggcaaaatcccctactccatttactgaggtacttaaaaataactagcatgctgtatctctttttttcccagctttgtcttgaattggcattgccatccttgttttatctcaactggctgtagcttttagataatatcataaggattaaccagtaacctcttacattcattactgttttctaggggaaaatatttggtatttggtttttctgttgcagcaaataaaacctcaggtgtaccaggaaatcgtcctggaagtgtaatccgtgtatatggtgatgaaaacagtgataaagtgactccagggacatttataccctattgttcaatggcacatgcacagctttgcttccatgggcaccgggatgctgtgaaattctttgtggcagtcccaggtcaagtcatcagcccacaaagtagcagtagtggcacggatctgacgggtgacaaagcagggccatctgcacaggagcctggtagtcagacgcccttgaagtctatgcttgtcatcagtggaggagagggctacatcgacttccgaatgggtgatgaaggtggagaatcagaacttcttggagaggatcttccacttgaaccttctgtcaccaaagcagaaaggagtcacttgatagtgtggcaagtgatgtatggcaatgagtgagcccatgggaaacaggtggagatggggaagccgtctcttctgcatggtttattttccctctatccttttatttaatgctcttttgtgagataagtttcaccacataatgtgtgagcattttttcctgttaactttatattacaaaatccgttctaccataacaatacagaggaactagctgtgttactgcaccagtgttataggtaacttcagtatattatgaacaaatcaaagaatgtttacttcctgcaaactggtgaattatagaaagcaatccagatgtggtttactctgccacagtctaatgtcattcacttcatttgatggggtcacttgttagctgtcactaataatggaattaatgggaaacacttgataaatgaaactgtaccgttaaatacaatagctgagttttccccagtgtattgtaaaattgacacacactaatacaagatggattatcaggatgtatctaaatgtcccgagagggttaaaagctaactgtaaattactttaactttcactttcaaatctgacaaatcttgtttatatggtatataaaactttgttttcatcagatttgggggggttttatattaaagaaattaagactacactatttaaataaacgtttcctgtttctgacttattagagctctaaagtttatgaggcctacttctctgaatattctgatgggttttttttgagaccagtctcattttcatactgacatgtctgaaagatttattatttataaagcttaggacatactctgggaagcttagaagatacttcagcactgggaggattttttaaaggaaatgtgttttgtatttcttgtaccagagaatggtgatgttgattgagttttttccatgtaaaaaatgtacttgtttgccaaatgttcctagattgctcttaacctgttaatacaagtaaaactgtagtggggatggagtctggcctaagtacagaatgagggatttaattagaaaagttattttcttttgttctgtatcaaactgcagaacagctatatacttggtattttgtacgtgaataacgttttagcttttgtgcccttttgagcttgaagggttatcctcaaaggggaaaactatgaaggggaagaagacaaacctaagataccataaagtaaaggttgacattacatattttcattcacaatgcccattaaaaaaaaaaaataggttgggcatggtggctcacgcctgtaatcccagcactttaggaggctgaggcggatggattgcttgagcccaggagttcaagaccagcctgggcaacatggcgaaaccctgtctctaccaaaaaaaaaaaacaaaataaattaaccgggtgtggtggcacatgcctgtagtcccagctacttgggaggctgaggtgggaggatgacctgggcccaggaggtggaggttgcagtgagccttgatagcaccactgcactccagcctgggtgacggagcaagaccctgtctcaaaacagacaaacaagcaaaaaatagattaaagtctggatttcactgattttcttgcttaataagttttttaaaaccacgatgctgcaattttttccctctcaagcttcttgaaaatgtgtgatttacccttttttatctattactctaggcaaagctaaatatgatttttttttttttttttgagacggagtctggctctgttgcccaggctggaatgcagtggtgcgatctcagctcactgcaacctccacctctcaggttcaagtagttctcctgcctcagcctcccaagtagctgggattacaggtgtgtgccaccctgcccagctaatttttgtatttttagtagagacagggtttcgccacgttggccaggctggtctcaaactcctgacctcagatgatctacccgccttggcctcccgaagtgcttgaattacaggcgtgagcccccgcgccggtccgaagcaaagctaaatgtaattttatgtactgttttaacagtataaacctatgggataaaggcccccaatcatcagaaggactactgaaaagaaaagaaagcaaacgtagatgtcaaattgtctaaacattcttaagtaccactgattttttttttctggactattatacaaagatgtctgtaaaaagtataccagtggcttttatgcatatacacgattaggctagattgtgaagtacatgggatttcatgagccagaggaggcatttggatccattgggccacatgtgactataagcacattgtgtacacaataaaattgtagccactcatgtattaaaactgttttggtaaaagctgtattaaaagaataattttttgcttgagctacttagtcacttttttgcagggcaccaaaatgtaggctacttttccatagcttgtttgctatgtttttatttcatcttaaatctgagccatttttggcaatatcttttaaaaaatcattattaaacatttattggaaatgttgtatagattcacaagaaagagacaccaaagtgtttgggaattttaatcccaagaagtaaacatcccagagtcagatcccatttgctgttgttcagccatgtttgtatgactgaatgtaatttaggaaatcaggagttagagatgaaaaatacaaacatgtcaaatggttgtaattgctttttttgaacttactggctttaacttaagtaatataggtgtgtagttgttttatctaaagatgtcagattatctgtggccctgttaattaactgcagggaccagagagaggacaaaaatgcctgtataatttgctttaaaggcttgtccttatgtttgtaatttcagttaaatattttctacagattgcttcacttcccctttcccccaataacaagttcatattcttgtaatgtttactttggtcaacgtggtaatttttggaagaaaatgccaaaatgtaagcttctcacaagcagcaaaggaatgtaactgcctgtagctaccacatcaagggagagaagaggcttgcgtactttgggttgatctcactgtacaaaaaaagtgtacccctattggaagaaataaggaatacttgaaggtttctcctttttttacacttgagtcatgtgcaaggttgaaccatatgaaattgccagtgttcaaccattgctgatctgcaaaagcgacaatatcatatgcctcaacctaacacttactcttaaatgcaggttaaaatctctgtgaggcaaagggataatattctctaggaactcacttttgagagtatttttctctaacccatgtggatctaaattttaaaaataggaatgaatctcttaattgcagcttgtggagagtataaaacattttgagcacaatatgcagcacataacttttcagattgtgtttgcatagaaaaggttaaaatcaattctttcagttactgtattgttcatttcttgtaaaggtcttcctacatttgagacgagaccctttaacataggctgccttagtaacaaaataaaacagatgtgtcataatattaactgtcctaaagaacatgtgtcttgcaaatgccatggaactgaatatttatttccttgtgagtattatgaccgttaccaaaggactcaaccagatttagggctcttcttaattgatcatgttcagaaagggactcatttggtcccactttgtaacatgggaagagtagaagagaaaattaaatgtggaaatcataaatgcttttctaacagggttatgctattctgtaacactaaatgtctgtcttttctcttaaaagattaagttttattaattttgtcatacatttctctatttgaatatatcttaaccattttatgttccaaattcgttttttgtccaagacattctatcagaattttacttgcctctataatctgaaaaatgggttctagaatgtcccacttgctgtctcttagaggctgagcttcatttctatgagcaaagagctcatttagcaatgtagttatttcagtatttatttctattatggaatccctggggttcagaatgtaactttgtacatgagatatatataaatatgtatatgaacatgta

SEQ ID NO: 302018 - DNA, 6160 bp, Homo sapiens
tccggccccggcccccaccccgccgggcccagccccagccccggcccgggctccagccctagtacccgtcccagcccgagtcgggtccgtcccgtgcgggcaggtgccgcccctctgccggcgacgccccgggccgcccgcccgtccgcttgccaccatggagctggaggacggtgtggtgtatcaggaggagcccggcggctccggggccgtgatgtcggagcgggtgtccggcctggccggctccatctaccgcgagttcgagcggcttatcgggcgctatgacgaggaggtggtcaaagagctgatgccgctggtggtggctgtgctggagaacctggactcggtgttcgcgcaggaccaggagcaccaggtggagctggagctgctgcgggacgacaacgagcagctcatcacccagtacgagcgggagaaggcgctgcgcaagcacgctgaggagaaattcattgaatttgaagactctcaagaacaggaaaaaaaggacttacagacccgagtggaatctttagaatctcaaacaagacaacttgagctgaaagcgaaaaactatgctgaccagattagcagacttgaagaaagagaagcagaactgaagaaggaatataatgcattacatcaaagacacactgagatgatccataattatatggaacatttagaaagaacaaaacttcatcagctctcagggagtgatcaactagaatccacagctcatagtagaattagaaaagaacgccctatatcattaggaattttcccattacctgctggagatggattgcttacacctgatgctcagaaaggaggagagacccctggatctgagcaatggaaatttcaggaattaagtcaaccacgttctcataccagcctgaaggtcagcaatagtcctgaacctcagaaggctgtagaacaggaggtgagaatggtgcttcttaacattttgcaaaaagtatactaaagtgattaactattgattacttcctcaactgctattctcaagacatcagatgctcagcttggaagactattgttgtaattcactgaaatataaaagaaaattatttccactgtagtggttgtcagggctttactgcaatctgtaatttattccttccccaaagtaagcatttttaaataaaggaaagaaaatataagtaaattctgtgaaattcagcctgtttgcatttatccagctctatgtaatggtatactttccagaaataccttcttcagggcataatgtatgtaacttgtatttgtcctgaatgtggcctagtgtgtcatcttacagtggactgcttccttagtttaatagagttcttcatctccagtcagggcaccatccagctttattcatcaaacatctgttaagagcctactacaggccaggtgtggtggctcatgcctgaaatcccagcactctgcccaggcaggcggatcacttggtcaggagtaggagttcaagaccagcatggccagtatggtgaaatcttgtctctactaaaaatacaaaaatcagccaggcatggtggcagacacctgtaatcccaggtacttaggagtctgaggcaggagaattgcttgaacccgggaggtggaggttgcagtgagctaagatggtgccactgccttccagcctgggcaacacagcgagactccatctcaaaacagacaaacaagcaaaaaatagattaaagtctggatttcactgattttcttgcttaataagttttttaaaaccacgatgctgtgaaattctttgtggcagtcccgtcaagtcatcagcccacaaagtagcagtagtggcacggatctgacgggtgacaaagcagggccatctgcacaggagcctggtagtcagacgcccttgaagtctatgcttgtcatcagtggaggagagggctacatcgacttccgaatgggtgatgaaggtggagaatcagaacttcttggagaggatcttccacttgaaccttctgtcaccaaagcagaaaggagtcacttgatagtgtggcaagtgatgtatggcaatgagtgagcccatgggaaacaggtggagatggggaagccgtctcttctgcatggtttattttccctctatccttttatttaatgctcttttgtgagataagtttcaccacataatgtgtgagcattttttcctgttaactttatattacaaaatccgttctaccataacaatacagaggaactagctgtgttactgcaccagtgttataggtaacttcagtatattatgaacaaatcaaagaatgtttacttcctgcaaactggtgaattatagaaagcaatccagatgtggtttactctgccacagtctaatgtcattcacttcatttgatggggtcacttgttagctgtcactaataatggaattaatgggaaacacttgataaatgaaactgtaccgttaaatacaatagctgagttttccccagtgtattgtaaaattgacacacactaatacaagatggattatcaggatgtatctaaatgtcccgagagggttaaaagctaactgtaaattactttaactttcactttcaaatctgacaaatcttgtttatatggtatataaaactttgttttcatcagatttgggggggttttatattaaagaaattaagactacactatttaaataaacgtttcctgtttctgacttattagagctctaaagtttatgaggcctacttctctgaatattctgatgggttttttttgagaccagtctcattttcatactgacatgtctgaaagatttattatttataaagcttaggacatactctgggaagcttagaagatacttcagcactgggaggattttttaaaggaaatgtgttttgtatttcttgtaccagagaatggtgatgttgattgagttttttccatgtaaaaaatgtacttgtttgccaaatgttcctagattgctcttaacctgttaatacaagtaaaactgtagtggggatggagtctggcctaagtacagaatgagggatttaattagaaaagttattttcttttgttctgtatcaaactgcagaacagctatatacttggtattttgtacgtgaataacgttttagcttttgtgcccttttgagcttgaagggttatcctcaaaggggaaaactatgaaggggaagaagacaaacctaagataccataaagtaaaggttgacattacatattttcattcacaatgcccattaaaaaaaaaaaataggttgggcatggtggctcacgcctgtaatcccagcactttaggaggctgaggcggatggattgcttgagcccaggagttcaagaccagcctgggcaacatggcgaaaccctgtctctaccaaaaaaaaaaaacaaaataaattaaccgggtgtggtggcacatgcctgtagtcccagctacttgggaggctgaggtgggaggatgacctgggcccaggaggtggaggttgcagtgagccttgatagcaccactgcactccagcctgggtgacggagcaagaccctgtctcaaaacagacaaacaagcaaaaaatagattaaagtctggatttcactgattttcttgcttaataagttttttaaaaccacgatgctgcaattttttccctctcaagcttcttgaaaatgtgtgatttacccttttttatctattactctaggcaaagctaaatatgatttttttttttttttttgagacggagtctggctctgttgcccaggctggaatgcagtggtgcgatctcagctcactgcaacctccacctctcaggttcaagtagttctcctgcctcagcctcccaagtagctgggattacaggtgtgtgccaccctgcccagctaatttttgtatttttagtagagacagggtttcgccacgttggccaggctggtctcaaactcctgacctcagatgatctacccgccttggcctcccgaagtgcttgaattacaggcgtgagcccccgcgccggtccgaagcaaagctaaatgtaattttatgtactgttttaacagtataaacctatgggataaaggcccccaatcatcagaaggactactgaaaagaaaagaaagcaaacgtagatgtcaaattgtctaaacattcttaagtaccactgattttttttttctggactattatacaaagatgtctgtaaaaagtataccagtggcttttatgcatatacacgattaggctagattgtgaagtacatgggatttcatgagccagaggaggcatttggatccattgggccacatgtgactataagcacattgtgtacacaataaaattgtagccactcatgtattaaaactgttttggtaaaagctgtattaaaagaataattttttgcttgagctacttagtcacttttttgcagggcaccaaaatgtaggctacttttccatagcttgtttgctatgtttttatttcatcttaaatctgagccatttttggcaatatcttttaaaaaatcattattaaacatttattggaaatgttgtatagattcacaagaaagagacaccaaagtgtttgggaattttaatcccaagaagtaaacatcccagagtcagatcccatttgctgttgttcagccatgtttgtatgactgaatgtaatttaggaaatcaggagttagagatgaaaaatacaaacatgtcaaatggttgtaattgctttttttgaacttactggctttaacttaagtaatataggtgtgtagttgttttatctaaagatgtcagattatctgtggccctgttaattaactgcagggaccagagagaggacaaaaatgcctgtataatttgctttaaaggcttgtccttatgtttgtaatttcagttaaatattttctacagattgcttcacttcccctttcccccaataacaagttcatattcttgtaatgtttactttggtcaacgtggtaatttttggaagaaaatgccaaaatgtaagcttctcacaagcagcaaaggaatgtaactgcctgtagctaccacatcaagggagagaagaggcttgcgtactttgggttgatctcactgtacaaaaaaagtgtacccctattggaagaaataaggaatacttgaaggtttctcctttttttacacttgagtcatgtgcaaggttgaaccatatgaaattgccagtgttcaaccattgctgatctgcaaaagcgacaatatcatatgcctcaacctaacacttactcttaaatgcaggttaaaatctctgtgaggcaaagggataatattctctaggaactcacttttgagagtatttttctctaacccatgtggatctaaattttaaaaataggaatgaatctcttaattgcagcttgtggagagtataaaacattttgagcacaatatgcagcacataacttttcagattgtgtttgcatagaaaaggttaaaatcaattctttcagttactgtattgttcatttcttgtaaaggtcttcctacatttgagacgagaccctttaacataggctgccttagtaacaaaataaaacagatgtgtcataatattaactgtcctaaagaacatgtgtcttgcaaatgccatggaactgaatatttatttccttgtgagtattatgaccgttaccaaaggactcaaccagatttagggctcttcttaattgatcatgttcagaaagggactcatttggtcccactttgtaacatgggaagagtagaagagaaaattaaatgtggaaatcataaatgcttttctaacagggttatgctattctgtaacactaaatgtctgtcttttctcttaaaagattaagttttattaattttgtcatacatttctctatttgaatatatcttaaccattttatgttccaaattcgttttttgtccaagacattctatcagaattttacttgcctctataatctgaaaaatgggttctagaatgtcccacttgctgtctcttagaggctgagcttcatttctatgagcaaagagctcatttagcaatgtagttatttcagtatttatttctattatggaatccctggggttcagaatgtaactttgtacatgagatatatataaatatgtatatgaacatgta

SEQ ID NO: 302019 - DNA, 6106 bp, Homo sapiens
tccggccccggcccccaccccgccgggcccagccccagccccggcccgggctccagccctagtacccgtcccagcccgagtcgggtccgtcccgtgcgggcaggtgccgcccctctgccggcgacgccccgggccgcccgcccgtccgcttgccaccatggagctggaggacggtgtggtgtatcaggaggagcccggcggctccggggccgtgatgtcggagcgggtgtccggcctggccggctccatctaccgcgagttcgagcggcttatcgggcgctatgacgaggaggtggtcaaagagctgatgccgctggtggtggctgtgctggagaacctggactcggtgttcgcgcaggaccaggagcaccaggtggagctggagctgctgcgggacgacaacgagcagctcatcacccagtacgagcgggagaaggcgctgcgcaagcacgctgaggagaaattcattgaatttgaagactctcaagaacaggaaaaaaaggacttacagacccgagtggaatctttagaatctcaaacaagacaacttgagctgaaagcgaaaaactatgctgaccagattagcagacttgaagaaagagaagcagaactgaagaaggaatataatgcattacatcaaagacacactgagatgatccataattatatggaacatttagaaagaacaaaacttcatcagctctcagggagtgatcaactagaatccacagctcatagtagaattagaaaagaacgccctatatcattaggaattttcccattacctgctggagatggattgcttacacctgatgctcagaaaggaggagagacccctggatctgagcaatggaaatttcaggaattaagtcaaccacgttctcataccagcctgaaggtcagcaatagtcctgaacctcagaaggctgtagaacaggaggtgagaatggtgcttcttaacattttgcaaaaagtatactaaagtgattaactattgattacttcctcaactgctattctcaagacatcagatgctcagcttggaagactattgttgtaattcactgaaatataaaagaaaattatttccactgtagtggttgtcagggctttactgcaatctgtaatttattccttccccaaagtaagcatttttaaataaaggaaaggtaatggtatactttccagaaataccttcttcagggcataatgtatgtaacttgtatttgtcctgaatgtggcctagtgtgtcatcttacagtggactgcttccttagtttaatagagttcttcatctccagtcagggcaccatccagctttattcatcaaacatctgttaagagcctactacaggccaggtgtggtggctcatgcctgaaatcccagcactctgcccaggcaggcggatcacttggtcaggagtaggagttcaagaccagcatggccagtatggtgaaatcttgtctctactaaaaatacaaaaatcagccaggcatggtggcagacacctgtaatcccaggtacttaggagtctgaggcaggagaattgcttgaacccgggaggtggaggttgcagtgagctaagatggtgccactgccttccagcctgggcaacacagcgagactccatctcaaaacagacaaacaagcaaaaaatagattaaagtctggatttcactgattttcttgcttaataagttttttaaaaccacgatgctgtgaaattctttgtggcagtcccgtcaagtcatcagcccacaaagtagcagtagtggcacggatctgacgggtgacaaagcagggccatctgcacaggagcctggtagtcagacgcccttgaagtctatgcttgtcatcagtggaggagagggctacatcgacttccgaatgggtgatgaaggtggagaatcagaacttcttggagaggatcttccacttgaaccttctgtcaccaaagcagaaaggagtcacttgatagtgtggcaagtgatgtatggcaatgagtgagcccatgggaaacaggtggagatggggaagccgtctcttctgcatggtttattttccctctatccttttatttaatgctcttttgtgagataagtttcaccacataatgtgtgagcattttttcctgttaactttatattacaaaatccgttctaccataacaatacagaggaactagctgtgttactgcaccagtgttataggtaacttcagtatattatgaacaaatcaaagaatgtttacttcctgcaaactggtgaattatagaaagcaatccagatgtggtttactctgccacagtctaatgtcattcacttcatttgatggggtcacttgttagctgtcactaataatggaattaatgggaaacacttgataaatgaaactgtaccgttaaatacaatagctgagttttccccagtgtattgtaaaattgacacacactaatacaagatggattatcaggatgtatctaaatgtcccgagagggttaaaagctaactgtaaattactttaactttcactttcaaatctgacaaatcttgtttatatggtatataaaactttgttttcatcagatttgggggggttttatattaaagaaattaagactacactatttaaataaacgtttcctgtttctgacttattagagctctaaagtttatgaggcctacttctctgaatattctgatgggttttttttgagaccagtctcattttcatactgacatgtctgaaagatttattatttataaagcttaggacatactctgggaagcttagaagatacttcagcactgggaggattttttaaaggaaatgtgttttgtatttcttgtaccagagaatggtgatgttgattgagttttttccatgtaaaaaatgtacttgtttgccaaatgttcctagattgctcttaacctgttaatacaagtaaaactgtagtggggatggagtctggcctaagtacagaatgagggatttaattagaaaagttattttcttttgttctgtatcaaactgcagaacagctatatacttggtattttgtacgtgaataacgttttagcttttgtgcccttttgagcttgaagggttatcctcaaaggggaaaactatgaaggggaagaagacaaacctaagataccataaagtaaaggttgacattacatattttcattcacaatgcccattaaaaaaaaaaaataggttgggcatggtggctcacgcctgtaatcccagcactttaggaggctgaggcggatggattgcttgagcccaggagttcaagaccagcctgggcaacatggcgaaaccctgtctctaccaaaaaaaaaaaacaaaataaattaaccgggtgtggtggcacatgcctgtagtcccagctacttgggaggctgaggtgggaggatgacctgggcccaggaggtggaggttgcagtgagccttgatagcaccactgcactccagcctgggtgacggagcaagaccctgtctcaaaacagacaaacaagcaaaaaatagattaaagtctggatttcactgattttcttgcttaataagttttttaaaaccacgatgctgcaattttttccctctcaagcttcttgaaaatgtgtgatttacccttttttatctattactctaggcaaagctaaatatgatttttttttttttttttgagacggagtctggctctgttgcccaggctggaatgcagtggtgcgatctcagctcactgcaacctccacctctcaggttcaagtagttctcctgcctcagcctcccaagtagctgggattacaggtgtgtgccaccctgcccagctaatttttgtatttttagtagagacagggtttcgccacgttggccaggctggtctcaaactcctgacctcagatgatctacccgccttggcctcccgaagtgcttgaattacaggcgtgagcccccgcgccggtccgaagcaaagctaaatgtaattttatgtactgttttaacagtataaacctatgggataaaggcccccaatcatcagaaggactactgaaaagaaaagaaagcaaacgtagatgtcaaattgtctaaacattcttaagtaccactgattttttttttctggactattatacaaagatgtctgtaaaaagtataccagtggcttttatgcatatacacgattaggctagattgtgaagtacatgggatttcatgagccagaggaggcatttggatccattgggccacatgtgactataagcacattgtgtacacaataaaattgtagccactcatgtattaaaactgttttggtaaaagctgtattaaaagaataattttttgcttgagctacttagtcacttttttgcagggcaccaaaatgtaggctacttttccatagcttgtttgctatgtttttatttcatcttaaatctgagccatttttggcaatatcttttaaaaaatcattattaaacatttattggaaatgttgtatagattcacaagaaagagacaccaaagtgtttgggaattttaatcccaagaagtaaacatcccagagtcagatcccatttgctgttgttcagccatgtttgtatgactgaatgtaatttaggaaatcaggagttagagatgaaaaatacaaacatgtcaaatggttgtaattgctttttttgaacttactggctttaacttaagtaatataggtgtgtagttgttttatctaaagatgtcagattatctgtggccctgttaattaactgcagggaccagagagaggacaaaaatgcctgtataatttgctttaaaggcttgtccttatgtttgtaatttcagttaaatattttctacagattgcttcacttcccctttcccccaataacaagttcatattcttgtaatgtttactttggtcaacgtggtaatttttggaagaaaatgccaaaatgtaagcttctcacaagcagcaaaggaatgtaactgcctgtagctaccacatcaagggagagaagaggcttgcgtactttgggttgatctcactgtacaaaaaaagtgtacccctattggaagaaataaggaatacttgaaggtttctcctttttttacacttgagtcatgtgcaaggttgaaccatatgaaattgccagtgttcaaccattgctgatctgcaaaagcgacaatatcatatgcctcaacctaacacttactcttaaatgcaggttaaaatctctgtgaggcaaagggataatattctctaggaactcacttttgagagtatttttctctaacccatgtggatctaaattttaaaaataggaatgaatctcttaattgcagcttgtggagagtataaaacattttgagcacaatatgcagcacataacttttcagattgtgtttgcatagaaaaggttaaaatcaattctttcagttactgtattgttcatttcttgtaaaggtcttcctacatttgagacgagaccctttaacataggctgccttagtaacaaaataaaacagatgtgtcataatattaactgtcctaaagaacatgtgtcttgcaaatgccatggaactgaatatttatttccttgtgagtattatgaccgttaccaaaggactcaaccagatttagggctcttcttaattgatcatgttcagaaagggactcatttggtcccactttgtaacatgggaagagtagaagagaaaattaaatgtggaaatcataaatgcttttctaacagggttatgctattctgtaacactaaatgtctgtcttttctcttaaaagattaagttttattaattttgtcatacatttctctatttgaatatatcttaaccattttatgttccaaattcgttttttgtccaagacattctatcagaattttacttgcctctataatctgaaaaatgggttctagaatgtcccacttgctgtctcttagaggctgagcttcatttctatgagcaaagagctcatttagcaatgtagttatttcagtatttatttctattatggaatccctggggttcagaatgtaactttgtacatgagatatatataaatatgtatatgaacatgta

SEQ ID NO: 302020 - DNA, 4685 bp, Homo sapiens
agttaataggctggctgtcgcttggggttgctgcataaatgctaggagcagcagctctatggttatgaggtggggagaacggaatgacgtcatcgcttgggagctgctgcaggatggagtggaaagctgctgctgatggcattgtttttgtggcagcaagctgaatgacagatcctcactacaaagatacccctttggcccccgtgtaggcctccttggttcgggtgtttcaccatgccagcacagcgccatgagtcctggatgcatgctgctgtttgtgtttggctttgttggcggggcggtggtcattaattctgctatcttagtatctctctctgttttgctgcttgtgcacttttctatttctaccggtgtgccagctctgacgcagaacctaccaaggatactcagaaaagaacgccctatatcattaggaattttcccattacctgctggagatggattgcttacacctgatgctcagaaaggaggagagacccctggatctgagcaatggaaatttcaggaattaagtcaaccacgttctcataccagcctgaaggatgagctttctgatgttagccaaggcggatctaaagctaccactccagcatcaacagctaattcagatgtggcaacaattcctactgatactcccttaaaggaagaaaacgaaggatttgtgaaggttacagatgcgccaaataaatcagagataagcaaacacattgaagtacaggtagcccaggaaactagaaatgtatctactggctctgctgaaaatgaagaaaagtcagaagttcaagcaatcatcgaatctactcctgagctggatatggacaaagatctcagtggatataaaggttcaagcactcccaccaaaggcatagagaacaaagcttttgatcgcaatacagaatctctctttgaagaaaagcagcaccttatctcagctccctggggataagtccaaagcctttgatttccttagtgaagaaactgaagctagtttagcctcacgcagagaacaaaagagagagcagtatcgtcaggtaaaagcacatgttcagaaggaagacggtagagtgcaggcttttggctggagtctgcctcagaagtacaaacaggtaaccaatggtcaaggtgaaaataagatgaaaaatttacctgtgcctgtctatctcagacctctggatgaaaaagatacatcaatgaagctgtggtgtgctgttggagtcaatttatctggtgggaagaccagagatggtggttctgttgttggagcaagtgtattttacaaggatgttgctggtttggatacagaaggcagtaaacagcgaagtgcctctcagagtagtttagataagttagatcaggaacttaaggaacagcagaaggagttaaaaaatcaagaagaattatccagtctagtttggatctgtaccagcactcattcggctacaaaagttcttattattgatgctgttcaacctggcaacatcctagacagtttcactgtttgcaactctcatgttctgtgcattgcaagtgtgccaggtgcacgagaaacagactaccctgcaggagaagatctttcagaatctggtcaggtagacaaagcatctttatgtggaagtatgacaagcaacagctcagcagagacagacagcctgttaggaggcatcacagtggttggttgttctgcagaaggtgtgacgggagctgccacttcccctagtacaaatggtgcttctccagtgatggataaaccaccagaaatggaagcagaaaatagtgaggttgatgaaaatgttccaacagcagaagaagcaactgaagctacagaagggaatgcggggtcagctgaagacacagtggacatctcccaaactggcgtctacacagagcatgtctttacagatcctttgggagttcagatcccagaagacctctccccagtgtatcagtcgagcaatgactcagatgcatataaagatcaaatatcagtactgccaaatgaacaagacttggtgagagaagaagcccagaaaatgagtagtcttttaccaactatgtggcttggagctcaaaatggctgtttgtatgtccattcatctgtagcccagtggaggaaatgtctccattccattaaacttaaagattcgattctcagtattgtacacgtgaagggaatcgtgttagtagccctggctgacggcacccttgcaatctttcacagaggagtggatgggcagtgggatttgtcaaactatcacctcttagaccttggacggcctcatcattccatccgttgcatgactgtggtacatgacaaagtctggtgtggctataggaacaaaatctatgtgtgcactccagcctgggtgacggagcaagaccctgtctcaaaacagacaaacaagcaaaaaatagattaaagtctggatttcactgattttcttgcttaataagttttttaaaaccacgatgctgcaattttttccctctcaagcttcttgaaaatgtgtgatttacccttttttatctattactctagcaaagctaaatgtaattttatgtactgttttaacagtataaacctatgggataaaggcccccaatcatcagaaggactactgaaaagaaaagaaagcaaacgtagatgtcaaattgtctaaacattcttaagtaccactgattttttttttctggactattatacaaagatgtctgtaaaaagtataccagtggcttttatgcatatacacgattaggctagattgtgaagtacatgggatttcatgagccagaggaggcatttggatccattgggccacatgtgactataagcacattgtgtacacaataaaattgtagccactcatgtattaaaactgttttggtaaaagctgtattaaaagaataattttttgcttgagctacttagtcacttttttgcagggcaccaaaatgtaggctacttttccatagcttgtttgctatgtttttatttcatcttaaatctgagccatttttggcaatatcttttaaaaaatcattattaaacatttattggaaatgttgtatagattcacaagaaagagacaccaaagtgtttgggaattttaatcccaagaagtaaacatcccagagtcagatcccatttgctgttgttcagccatgtttgtatgactgaatgtaatttaggaaatcaggagttagagatgaaaaatacaaacatgtcaaatggttgtaattgctttttttgaacttactggctttaacttaagtaatataggtgtgtagttgttttatctaaagatgtcagattatctgtggccctgttaattaactgcagggaccagagagaggacaaaaatgcctgtataatttgctttaaaggcttgtccttatgtttgtaatttcagttaaatattttctacagattgcttcacttcccctttcccccaataacaagttcatattcttgtaatgtttactttggtcaacgtggtaatttttggaagaaaatgccaaaatgtaagcttctcacaagcagcaaaggaatgtaactgcctgtagctaccacatcaagggagagaagaggcttgcgtactttgggttgatctcactgtacaaaaaaagtgtacccctattggaagaaataaggaatacttgaaggtttctcctttttttacacttgagtcatgtgcaaggttgaaccatatgaaattgccagtgttcaaccattgctgatctgcaaaagcgacaatatcatatgcctcaacctaacacttactcttaaatgcaggttaaaatctctgtgaggcaaagggataatattctctaggaactcacttttgagagtatttttctctaacccatgtggatctaaattttaaaaataggaatgaatctcttaattgcagcttgtggagagtataaaacattttgagcacaatatgcagcacataacttttcagattgtgtttgcatagaaaaggttaaaatcaattctttcagttactgtattgttcatttcttgtaaaggtcttcctacatttgagacgagaccctttaacataggctgccttagtaacaaaataaaacagatgtgtcataatattaactgtcctaaagaacatgtgtcttgcaaatgccatggaactgaatatttatttccttgtgagtattatgaccgttaccaaaggactcaaccagatttagggctcttcttaattgatcatgttcagaaagggactcatttggtcccactttgtaacatgggaagagtagaagagaaaattaaatgtggaaatcataaatgcttttctaacagggttatgctattctgtaacactaaatgtctgtcttttctcttaaaagattaagttttattaattttgtcatacatttctctatttgaatatatcttaaccattttatgttccaaattcgttttttgtccaagacattctatcagaattttacttgcctctataatctgaaaaatgggttctagaatgtcccacttgctgtctcttagaggctgagcttcatttctatgagcaaagagctcatttagcaatgtagttatttcagtatttatttctattatggaatccctggggttcagaatgtaactttgtacatgagatatatataaatatgtatatgaacatgta

SEQ ID NO: 302021 - DNA, 5229 bp, Homo sapiens
tccggccccggcccccaccccgccgggcccagccccagccccggcccgggctccagccctagtacccgtcccagcccgagtcgggtccgtcccgtgcgggcaggtgccgcccctctgccggcgacgccccgggccgcccgcccgtccgcttgccaccatggagctggaggacggtgtggtgtatcaggaggagcccggcggctccggggccgtgatgtcggagcgggtgtccggcctggccggctccatctaccgcgagttcgagcggcttatcgggcgctatgacgaggaggtggtcaaagagctgatgccgctggtggtggctgtgctggagaacctggactcggtgttcgcgcaggaccaggagcaccaggtggagctggagctgctgcgggacgacaacgagcagctcatcacccagtacgagcgggagaaggcgctgcgcaagcacgctgaggagaaattcattgaatttgaagactctcaagaacaggaaaaaaaggacttacagacccgagtggaatctttagaatctcaaacaagacaacttgagctgaaagcgaaaaactatgctgaccagattagcagacttgaagaaagagaagcagaactgaagaaggaatataatgcattacatcaaagacacactgagatgatccataattatatggaacatttagaaagaacaaaacttcatcagctctcagggagtgatcaactagaatccacagctcatagtagaattagaaaagaacgccctatatcattaggaattttcccattacctgctggagatggattgcttacacctgatgctcagaaaggaggagagacccctggatctgagcaatggaaatttcaggaattaagtcaaccacgttctcataccagcctgaaggatgagctttctgatgttagccaaggcggatctaaagctaccactccagcatcaacagctaattcagatgtggcaacaattcctactgatactcccttaaaggaagaaaacgaaggatttgtgaaggttacagatgcgccaaataaatcagagataagcaaacacattgaagtacaggtagcccaggaaactagaaatgtatctactggctctgctgaaaatgaagaaaagtcagaagttcaagcaatcatcgaatctactcctgagctggatatggacaaagatctcagtggatataaaggttcaagcactcccaccaaaggcatagagaacaaagcttttgatcgcaatacagaatctctctttgaagaactgtcttcagctggctcaggcctaataggagatgtggatgaaggagcagatttactaggaatgggtcgggaagttgagaatcttatattagaaaatacacaactgttggaaaccaaaaatgctttgaacatagtgaagaatgatttgatagcaaaagtggatgaactgacctgtgagaaagatgtgctgcaaggggaattggaggctgtgaagcaagccaaactgaaactagaggaaaagaacagagaattggaggaagagcttaggaaagctcgggcagaagctgaagatgcaaggcaaaaagcaaaagatgacgatgatagtgatattcccacagcccagaggaaacggtttactagagtagaaatggcccgtgttctcatggagcgaaaccagtataaagagagattgatggagcttcaggaagctgttcgatggacagagatgattcgggcatcacgagaaaatccagccatgcaggaaaaaaaaaggtcaagcatttggcagtttttcagccgacttttcagctcctcaagtaacacgactaagaagcctgaaccacctgttaatctgaagtacaatgcacccacgtctcatgttactccgtccgtcaagaaaagaagcagcaccttatctcagctccctggggataagtccaaagcctttgatttccttagtgaagaaactgaagctagtttagcctcacgcagagaacaaaagagagagcagtatcgtcaggtaaaagcacatgttcagaaggaagacggtagagtgcaggcttttggctggagtctgcctcagaagtacaaacaggtaaccaatggtcaaggtgaaaataagatgaaaaatttacctgtgcctgtctatctcagacctctggatgaaaaagatacatcaatgaagctgtggtgtgctgttggagtcaatttatctggtgggaagaccagagatggtggttctgttgttggagcaagtgtattttacaaggatgttgctggtttggatacagaaggcagtaaacagcgaagtgcctctcagagtagtttagataagttagatcaggaacttaaggaacagcagaaggagttaaaaaatcaagaagaattatccagtctagtttggatctgtaccagcactcattcggctacaaaagttcttattattgatgctgttcaacctggcaacatcctagacagtttcactgtttgcaactctcatgttctgtgcattgcaagtgtgccaggtgcacgagaaacagactaccctgcaggagaagatctttcagaatctggtcaggtagacaaagcatctttatgtggaagtatgacaagcaacagctcagcagagacagacagcctgttaggaggcatcacagtggttggttgttctgcagaaggtgtgacgggagctgccacttcccctagtacaaatggtgcttctccagtgatggataaaccaccagaaatggaagcagaaaatagtgaggttgatgaaaatgttccaacagcagaagaagcaactgaagctacagaagggaatgcggggtcagctgaagacacagtggacatctcccaaactggcgtctacacagagcatgtctttacagatcctttgggagttcagatcccagaagacctctccccagtgtatcagtcgagcaatgactcagatgcatataaagatcaaatatcagtactgccaaatgaacaagacttggtgagagaagaagcccagaaaatgagtagtcttttaccaactatgtggcttggagctcaaaatggctgtttgtatgtccattcatctgtagcccagtggaggaaatgtctccattccattaaacttaaagattcgattctcagtattgtagtataaacctatgggataaaggcccccaatcatcagaaggactactgaaaagaaaagaaagcaaacgtagatgtcaaattgtctaaacattcttaagtaccactgattttttttttctggactattatacaaagatgtctgtaaaaagtataccagtggcttttatgcatatacacgattaggctagattgtgaagtacatgggatttcatgagccagaggaggcatttggatccattgggccacatgtgactataagcacattgtgtacacaataaaattgtagccactcatgtattaaaactgttttggtaaaagctgtattaaaagaataattttttgcttgagctacttagtcacttttttgcagggcaccaaaatgtaggctacttttccatagcttgtttgctatgtttttatttcatcttaaatctgagccatttttggcaatatcttttaaaaaatcattattaaacatttattggaaatgttgtatagattcacaagaaagagacaccaaagtgtttgggaattttaatcccaagaagtaaacatcccagagtcagatcccatttgctgttgttcagccatgtttgtatgactgaatgtaatttaggaaatcaggagttagagatgaaaaatacaaacatgtcaaatggttgtaattgctttttttgaacttactggctttaacttaagtaatataggtgtgtagttgttttatctaaagatgtcagattatctgtggccctgttaattaactgcagggaccagagagaggacaaaaatgcctgtataatttgctttaaaggcttgtccttatgtttgtaatttcagttaaatattttctacagattgcttcacttcccctttcccccaataacaagttcatattcttgtaatgtttactttggtcaacgtggtaatttttggaagaaaatgccaaaatgtaagcttctcacaagcagcaaaggaatgtaactgcctgtagctaccacatcaagggagagaagaggcttgcgtactttgggttgatctcactgtacaaaaaaagtgtacccctattggaagaaataaggaatacttgaaggtttctcctttttttacacttgagtcatgtgcaaggttgaaccatatgaaattgccagtgttcaaccattgctgatctgcaaaagcgacaatatcatatgcctcaacctaacacttactcttaaatgcaggttaaaatctctgtgaggcaaagggataatattctctaggaactcacttttgagagtatttttctctaacccatgtggatctaaattttaaaaataggaatgaatctcttaattgcagcttgtggagagtataaaacattttgagcacaatatgcagcacataacttttcagattgtgtttgcatagaaaaggttaaaatcaattctttcagttactgtattgttcatttcttgtaaaggtcttcctacatttgagacgagaccctttaacataggctgccttagtaacaaaataaaacagatgtgtcataatattaactgtcctaaagaacatgtgtcttgcaaatgccatggaactgaatatttatttccttgtgagtattatgaccgttaccaaaggactcaaccagatttagggctcttcttaattgatcatgttcagaaagggactcatttggtcccactttgtaacatgggaagagtagaagagaaaattaaatgtggaaatcataaatgcttttctaacagggttatgctattctgtaacactaaatgtctgtcttttctcttaaaagattaagttttattaattttgtcatacatttctctatttgaatatatcttaaccattttatgttccaaattcgttttttgtccaagacattctatcagaattttacttgcctctataatctgaaaaatgggttctagaatgtcccacttgctgtctcttagaggctgagcttcatttctatgagcaaagagctcatttagcaatgtagttatttcagtatttatttctattatggaatccctggggttcagaatgtaactttgtacatgagatatatataaatatgtatatgaacatgta

SEQ ID NO: 302022 - DNA, 4743 bp, Homo sapiens
tccggccccggcccccaccccgccgggcccagccccagccccggcccgggctccagccctagtacccgtcccagcccgagtcgggtccgtcccgtgcgggcaggtgccgcccctctgccggcgacgccccgggccgcccgcccgtccgcttgccaccatggagctggaggacggtgtggtgtatcaggaggagcccggcggctccggggccgtgatgtcggagcgggtgtccggcctggccggctccatctaccgcgagttcgagcggcttatcgggcgctatgacgaggaggtggtcaaagagctgatgccgctggtggtggctgtgctggagaacctggactcggtgttcgcgcaggaccaggagcaccaggtggagctggagctgctgcgggacgacaacgagcagctcatcacccagtacgagcgggagaaggcgctgcgcaagcacgctgaggagaaattcattgaatttgaagactctcaagaacaggaaaaaaaggacttacagacccgagtggaatctttagaatctcaaacaagacaacttgagctgaaagcgaaaaactatgctgaccagattagcagacttgaagaaagagaagcagaactgaagaaggaatataatgcattacatcaaagacacactgagatgatccataattatatggaacatttagaaagaacaaaacttcatcagctctcagggagtgatcaactagaatccacagctcatagtagaattagaaaagaacgccctatatcattaggaattttcccattacctgctggagatggattgcttacacctgatgctcagaaaggaggagagacccctggatctgagcaatggaaatttcaggaattaagtcaaccacgttctcataccagcctgaaggatgagctttctgatgttagccaaggcggatctaaagctaccactccagcatcaacagctaattcagatgtggcaacaattcctactgatactcccttaaaggaagaaaacgaaggatttgtgaaggttacagatgcgccaaataaatcagagataagcaaacacattgaagtacaggtagcccaggaaactagaaatgtatctactggctctgctgaaaatgaagaaaagtcagaagttcaagcaatcatcgaatctactcctgagctggatatggacaaagatctcagtggatataaaggttcaagcactcccaccaaaggcatagagaacaaagcttttgatcgcaatacagaatctctctttgaagaactgtcttcagctggctcaggcctaataggagatgtggatgaaggagcagatttactaggaatgggtcgggaagttgagaatcttatattagaaaatacacaactgttggaaaccaaaaatgctttgaacatagtgaagaatgatttgatagcaaaagtggatgaactgacctgtgagaaagatgtgctgcaaggggaattggaggctgtgaagcaagccaaactgaaactagaggaaaagaacagagaattggaggaagagcttaggaaagctcgggcagaagctgaagatgcaaggcaaaaagcaaaagatgacgatgatagtgatattcccacagcccagaggaaacggtttactagagtagaaatggcccgtgttctcatggagcgaaaccagtataaagagagattgatggagcttcaggaagctgttcgatggacagagatgattcgggcatcacgagaaaatccagccatgcaggaaaaaaaaaggtcaagcatttggcagtttttcagccgacttttcagctcctcaagtaacacgactaagaagcctgaaccacctgttaatctgaagtacaatgcacccacgtctcatgttactccgtccgtcaagaaaagaagcagcaccttatctcagctccctggggataagtccaaagcctttgatttccttagtgaagaaactgaagctagtttagcctcacgcagagaacaaaagagagagcagtatcgtcaggtaaaagcacatgttcagaaggaagacggtagagtgcaggcttttggctggagtctgcctcagaagtacaaacaggtaaccaatggtcaaggtgaaaataagatgaaaaatttacctgtgcctgtctatctcagacctctggatgaaaaagatacatcaatgaagctgtggtgtgctgttggagtcaatttatctggtgggaagaccagagatggtggttctgttgttggagcaagtgtattttacaaggatgttgctggtttggatacagaaggcagtaaacagcgaagtgcctctcagagtagtttagataagttagatcaggaacttaaggaacagcagaaggagttaaaaaatcaagaagaattatccagtctagtttggatctgtaccagcactcattcggctacaaaagttcttattattgatgctgttcaacctggcaacatcctagacagtttcactgtttgcaactctcatgttctgtgcattgcaagtgtgccaggtgcacgagaaacagactaccctgcaggagaagatctttcagaatctggtcaggtagacaaagcatctttatgtggaagtatgacaagcaacagctcagcagagacagacagcctgttaggaggcatcacagtggttggttgttctgcagaaggtgtgacgggagctgccacttcccctagtacaaatggtgcttctccagtgatggataaaccaccagaaatggaagcagaaaatagtgaggttgatgaaaatgttccaacagcagaagaagcaactgaagctacagaagggaatgcggggtcagctgaagacacagtggacatctcccaaactggcgtctacacagagcatgtctttacagatcctttgggagttcagatcccagaagacctctccccagtgtatcagtcgagcaatgactcagatgcatataaagatcaaatatcagtactgccaaatgaacaagacttggtgagagaagaagcccagaaaatgagtagtcttttaccaactatgtggcttggagctcaaaatggctgtttgtatgtccattcatctgtagcccagtggaggaaatgtctccattccattaaacttaaagattcgattctcagtattgtacacgtgaagggaatcgtgttagtagccctggctgacggcacccttgcaatctttcacagaggagtggatgggcagtgggatttgtcaaactatcacctcttagaccttggacggcctcatcattccatccgttgcatgactgtggtacatgacaaagtctggtgtggctataggaacaaaatctatgtggtgcagccaaaggccatgaaaatagagaaatcttttgatgcacatcccaggaaggagagccaagtgcgacagcttgcgtgggtgggggatggcgtgtgggtctccattcgcttggattctacgctccgtctctatcatgcacacacttatcaacatctacaggatgtggacattgagccttatgtaagcaaaatgttaggtactggaaaactgggcttctcttttgtgagaattacagctcttatggtgtcttgtaatcgtttgtgggtggggacaggaaatggtgtcattatctccatcccattgacagaaaccgtaatcctccaccagggacgtttactggggctgagggcaaataaaacctcaggtgtaccaggaaatcgtcctggaagtgtaatccgtgtatatggtgatgaaaacagtgataaagtgactccagggacatttataccctattgttcaatggcacatgcacagctttgcttccatgggcaccgggatgctgtgaaattctttgtggcagtcccaggtcaagtcatcagcccacaaagtagcagtagtggcacggatctgacgggtgacaaagcagggccatctgcacaggagcctggtagtcagacgcccttgaagtctatgcttgtcatcagtggaggagagggctacatcgacttccgaatgggtgatgaaggtggagaatcagaacttcttggagaggatcttccacttgaaccttctgtcaccaaagcagaaaggagtcacttgatagtgtggcaagtgatgtatggcaatgagtgagcccatgggaaacaggtggagatggggaagccgtctcttctgcatggtttattttccctctatccttttatttaatgctcttttgtgagataagtttcaccacataatgtgtgagcattttttcctgttaactttatattacaaaatccgttctaccataacaatacagaggaactagctgtgttactgcaccagtgttataggtaacttcagtatattatgaacaaatcaaagaatgtttacttcctgcaaactggtgaattatagaaagcaatccagatgtggtttactctgccacagtctaatgtcattcacttcatttgatggggtcacttgttagctgtcactaataatggaattaatgggaaacacttgataaatgaaactgtaccgttaaatacaatagctgagttttccccagtgtattgtaaaattgacacacactaatacaagatggattatcaggatgtatctaaatgtcccgagagggttaaaagctaactgtaaattactttaactttcactttcaaatctgacaaatcttgtttatatggtatataaaactttgttttcatcagatttgggggggttttatattaaagaaattaagactacactattta

SEQ ID NO: 302023 - DNA, 3065 bp, Homo sapiens
tccggccccggcccccaccccgccgggcccagccccagccccggcccgggctccagccctagtacccgtcccagcccgagtcgggtccgtcccgtgcgggcaggtgccgcccctctgccggcgacgccccgggccgcccgcccgtccgcttgccaccatggagctggaggacggtgtggtgtatcaggaggagcccggcggctccggggccgtgatgtcggagcgggtgtccggcctggccggctccatctaccgcgagttcgagcggcttatcgggcgctatgacgaggaggtggtcaaagagctgatgccgctggtggtggctgtgctggagaacctggactcggtgttcgcgcaggaccaggagcaccaggtggagctggagctgctgcgggacgacaacgagcagctcatcacccagtacgagcgggagaaggcgctgcgcaagcacgctgaggagaaattcattgaatttgaagactctcaagaacaggaaaaaaaggacttacagacccgagtggaatctttagaatctcaaacaagacaacttgagctgaaagcgaaaaactatgctgaccagattagcagacttgaagaaagagaagcagaactgaagaaggaatataatgcattacatcaaagacacactgagatgatccataattatatggaacatttagaaagaacaaaacttcatcagctctcagggagtgatcaactagaatccacagctcatagtagaattagaaaagaacgccctatatcattaggaattttcccattacctgctggagatggattgcttacacctgatgctcagaaaggaggagagacccctggatctgagcaatggaaatttcaggaattaagtcaaccacgttctcataccagcctgaaggatgagctttctgatgttagccaaggcggatctaaagctaccactccagcatcaacagctaattcagatgtggcaacaattcctactgatactcccttaaaggaagaaaacgaaggatttgtgaaggttacagatgcgccaaataaatcagagataagcaaacacattgaagtacaggtagcccaggaaactagaaatgtatctactggctctgctgaaaatgaagaaaagtcagaagttcaagcaatcatcgaatctactcctgagctggatatggacaaagatctcagtggatataaaggttcaagcactcccaccaaaggcatagagaacaaagcttttgatcgcaatacagaatctctctttgaagaactgtcttcagctggctcaggcctaataggagatgtggatgaaggagcagatttactaggaatgggtcgggaagttgagaatcttatattagaaaatacacaactgttggaaaccaaaaatgctttgaacatagtgaagaatgatttgatagcaaaagtggatgaactgacctgtgagaaagatgtgctgcaaggggaattggaggctgtgaagcaagccaaactgaaactagaggaaaagaacagagaattggaggaagagcttaggaaagctcgggcagaagctgaagatgcaaggcaaaaagcaaaagatgacgatgatagtgatattcccacagcccagaggaaacggtttactagagtagaaatggcccgtgttctcatggagcgaaaccagtataaagagagattgatggagcttcaggaagctgttcgatggacagagatgattcgggcatcacgagaaaatccagccatgcaggaaaaaaaaaggtcaagcatttggcagtttttcagccgacttttcagctcctcaagtaacacgactaagaagcctgaaccacctgttaatctgaagtacaatgcacccacgtctcatgttactccgtccgtcaagaaaagaagcagcaccttatctcagctccctggggataagtccaaagcctttgatttccttagtgaagaaactgaagctagtttagcctcacgcagagaacaaaagagagagcagtatcgtcaggtaaaagcacatgttcagaaggaagacggtagagtgcaggcttttggctggagtctgcctcagaagtacaaacaggtaaccaatggtcaaggtgaaaataagatgaaaaatttacctgtgcctgtctatctcagacctctggatgaaaaagatacatcaatgaagctgtggtgtgctgttggagtcaatttatctggtgggaagaccagagatggtggttctgttgttggagcaagtgtattttacaaggatgttgctggtttggatacagaaggcagtaaacagcgaagtgcctctcagagtagtttagataagttagatcaggaacttaaggaacagcagaaggagttaaaaaatcaagaagaattatccagtctagtttggatctgtaccagcactcattcggctacaaaagttcttattattgatgctgttcaacctggcaacatcctagacagtttcactgtttgcaactctcatgttctgtgcattgcaagtgtgccaggtgcacgagaaacagactaccctgcaggagaagatctttcagaatctggtcaggtagacaaagcatctttatgtggaagtatgacaagcaacagctcagcagagacagacagcctgttaggaggcatcacagtggttggttgttctgcagaaggtgtgacgggagctgccacttcccctagtacaaatggtgcttctccagtgatggataaaccaccagaaatggaagcagaaaatagtgaggttgatgaaaatgttccaacagcagaagaagcaactgaagctacagaagggaatgcggggtcagctgaagacacagtggacatctcccaaactggcgtctacacagagcatgtctttacagatcctttgggagttcagatcccagaagacctctccccagtgtatcagtcgaggtataataatgggtcatcaacttaggcaactgggtgaagtgcacaaataaaaggaaccaaaataatctcaaacagtcaaaagatttccactaattagtgtcactgtggtggattaaaagatacctattcttgtgata

SEQ ID NO: 302024 - DNA, 4332 bp, Homo sapiens
tccggccccggcccccaccccgccgggcccagccccagccccggcccgggctccagccctagtacccgtcccagcccgagtcgggtccgtcccgtgcgggcaggtgccgcccctctgccggcgacgccccgggccgcccgcccgtccgcttgccaccatggagctggaggacggtgtggtgtatcaggaggagcccggcggctccggggccgtgatgtcggagcgggtgtccggcctggccggctccatctaccgcgagttcgagcggcttatcgggcgctatgacgaggaggtggtcaaagagctgatgccgctggtggtggctgtgctggagaacctggactcggtgttcgcgcaggaccaggagcaccaggtggagctggagctgctgcgggacgacaacgagcagctcatcacccagtacgagcgggagaaggcgctgcgcaagcacgctgaggagaaattcattgaatttgaagactctcaagaacaggaaaaaaaggacttacagacccgagtggaatctttagaatctcaaacaagacaacttgagctgaaagcgaaaaactatgctgaccagattagcagacttgaagaaagagaagcagaactgaagaaggaatataatgcattacatcaaagacacactgagatgatccataattatatggaacatttagaaagaacaaaacttcatcagctctcagggagtgatcaactagaatccacagctcatagtagaattagaaaagaacgccctatatcattaggaattttcccattacctgctggagatggattgcttacacctgatgctcagaaaggaggagagacccctggatctgagcaatggaaatttcaggaattaagtcaaccacgttctcataccagcctgaaggatgagctttctgatgttagccaaggcggatctaaagctaccactccagcatcaacagctaattcagatgtggcaacaattcctactgatactcccttaaaggaagaaaacgaaggatttgtgaaggttacagatgcgccaaataaatcagagataagcaaacacattgaagtacaggtagcccaggaaactagaaatgtatctactggctctgctgaaaatgaagaaaagtcagaagttcaagcaatcatcgaatctactcctgagctggatatggacaaagatctcagtggatataaaggttcaagcactcccaccaaaggcatagagaacaaagcttttgatcgcaatacagaatctctctttgaagaactgtcttcagctggctcaggcctaataggagatgtggatgaaggagcagatttactaggaatgggtcgggaagttgagaatcttatattagaaaatacacaactgttggaaaccaaaaatgctttgaacatagtgaagaatgatttgatagcaaaagtggatgaactgacctgtgagaaagatgtgctgcaaggggaattggaggctgtgaagcaagccaaactgaaactagaggaaaagaacagagaattggaggaagagcttaggaaagctcgggcagaagctgaagatgcaaggcaaaaagcaaaagatgacgatgatagtgatattcccacagcccagaggaaacggtttactagagtagaaatggcccgtgttctcatggagcgaaaccagtataaagagagattgatggagcttcaggaagctgttcgatggacagagatgattcgggcatcacgagaaaatccagccatgcaggaaaaaaaaaggtcaagcatttggcagtttttcagccgacttttcagctcctcaagtaacacgactaagaagcctgaaccacctgttaatctgaagtacaatgcacccacgtctcatgttactccgtccgtcaagaaaagaagcagcaccttatctcagctccctggggataagtccaaagcctttgatttccttagtgaagaaactgaagctagtttagcctcacgcagagaacaaaagagagagcagtatcgtcaggtaaaagcacatgttcagaaggaagacggtagagtgcaggcttttggctggagtctgcctcagaagtacaaacaggtaaccaatggtcaaggtgaaaataagatgaaaaatttacctgtgcctgtctatctcagacctctggatgaaaaagatacatcaatgaagctgtggtgtgctgttggagtcaatttatctggtgggaagaccagagatggtggttctgttgttggagcaagtgtattttacaaggatgttgctggtttggatacagaaggcagtaaacagcgaagtgcctctcagagtagtttagataagttagatcaggaacttaaggaacagcagaaggagttaaaaaatcaagaagaattatccagtctagtttggatctgtaccagcactcattcggctacaaaagttcttattattgatgctgttcaacctggcaacatcctagacagtttcactgtttgcaactctcatgttctgtgcattgcaagtgtgccaggtgcacgagaaacagactaccctgcaggagaagatctttcagaatctggtcaggtagacaaagcatctttatgtggaagtatgacaagcaacagctcagcagagacagacagcctgttaggaggcatcacagtggttggttgttctgcagaaggtgtgacgggagctgccacttcccctagtacaaatggtgcttctccagtgatggataaaccaccagaaatggaagcagaaaatagtgaggttgatgaaaatgttccaacagcagaagaagcaactgaagctacagaagggaatgcggggtcagctgaagacacagtggacatctcccaaactggcgtctacacagagcatgtctttacagatcctttgggagttcagatcccagaagacctctccccagtgtatcagtcgagcaatgactcagatgcatataaagatcaaatatcagtactgccaaatgaacaagacttggtgagagaagaagcccagaaaatgagtagtcttttaccaactatgtggcttggagctcaaaatggctgtttgtatgtccattcatctgtagcccagtggaggaaatgtctccattccattaaacttaaagattcgattctcagtattgtacacgtgaagggaatcgtgttagtagccctggctgacggcacccttgcaatctttcacagaggagtggatgggcagtgggatttgtcaaactatcacctcttagaccttggacggcctcatcattccatccgttgcatgactgtggtacatgacaaagtctggtgtggctataggaacaaaatctatgtggtgcagccaaaggccatgaaaatagagaaatcttttgatgcacatcccaggaaggagagccaagtgcgacagcttgcgtgggtgggggatggcgtgtgggtctccattcgcttggattctacgctccgtctctatcatgcacacacttatcaacatctacaggatgtggacattgagccttatgtaagcaaaatgttaggtactggaaaactgggcttctcttttgtgagaattacagctcttatggtgtcttgtaatcgtttgtgggtggggacaggaaatggtgtcattatctccatcccattgacagaaaccgtaatcctccaccagggacgtttactggggctgagggcaaataaaacctcaggtgtaccaggaaatcgtcctggaagtgtaatccgtgtatatggtgatgaaaacagtgataaagtgactccagggacatttataccctattgttcaatggcacatgcacagctttgcttccatgggcaccgggatgctgtgaaattctttgtggcagtcccaggtcaagtcatcagcccacaaagtagcagtagtggcacggatctgacgggtgacaaagcagggccatctgcacaggagcctggtagtcagacgcccttgaagtctatgcttgtcatcagtggaggagagggctacatcgacttccgaatgggtgatgaaggtggagaatcagaacttcttggagaggatcttccacttgaaccttctgtcaccaaagcagaaaggagtcacttgatagtgtggcaagtgatgtatggcaatgagtgagcccatgggaaacaggtggagatggggaagccgtctcttctgcatggtttcctcacccatttcccctcatatcctccctatatcatgtctcttttgatcacatgagcatcatcacatccatcttaaacctttattccttgctcactggtatactactagatgcccctccccatcacactcatatcatatggtaccgagctcgattctatctt

SEQ ID NO: 302025 - DNA, 4606 bp, Homo sapiens
tccggccccggcccccaccccgccgggcccagccccagccccggcccgggctccagccctagtacccgtcccagcccgagtcgggtccgtcccgtgcgggcaggtgccgcccctctgccggcgacgccccgggccgcccgcccgtccgcttgccaccatggagctggaggacggtgtggtgtatcaggaggagcccggcggctccggggccgtgatgtcggagcgggtgtccggcctggccggctccatctaccgcgagttcgagcggcttatcgggcgctatgacgaggaggtggtcaaagagctgatgccgctggtggtggctgtgctggagaacctggactcggtgttcgcgcaggaccaggagcaccaggtggagctggagctgctgcgggacgacaacgagcagctcatcacccagtacgagcgggagaaggcgctgcgcaagcacgctgaggagaaattcattgaatttgaagactctcaagaacaggaaaaaaaggacttacagacccgagtggaatctttagaatctcaaacaagacaacttgagctgaaagcgaaaaactatgctgaccagattagcagacttgaagaaagagaagcagaactgaagaaggaatataatgcattacatcaaagacacactgagatgatccataattatatggaacatttagaaagaacaaaacttcatcagctctcagggagtgatcaactagaatccacagctcatagtagaattagaaaagaacgccctatatcattaggaattttcccattacctgctggagatggattgcttacacctgatgctcagaaaggaggagagacccctggatctgagcaatggaaatttcaggaattaagtcaaccacgttctcataccagcctgaaggatgagctttctgatgttagccaaggcggatctaaagctaccactccagcatcaacagctaattcagatgtggcaacaattcctactgatactcccttaaaggaagaaaacgaaggatttgtgaaggttacagatgcgccaaataaatcagagataagcaaacacattgaagtacaggtagcccaggaaactagaaatgtatctactggctctgctgaaaatgaagaaaagtcagaagttcaagcaatcatcgaatctactcctgagctggatatggacaaagatctcagtggatataaaggttcaagcactcccaccaaaggcatagagaacaaagcttttgatcgcaatacagaatctctctttgaagaactgtcttcagctggctcaggcctaataggagatgtggatgaaggagcagatttactaggaatgggtcgggaagttgagaatcttatattagaaaatacacaactgttggaaaccaaaaatgctttgaacatagtgaagaatgatttgatagcaaaagtggatgaactgacctgtgagaaagatgtgctgcaaggggaattggaggctgtgaagcaagccaaactgaaactagaggaaaagaacagagaattggaggaagagcttaggaaagctcgggcagaagctgaagatgcaaggcaaaaagcaaaagatgacgatgatagtgatattcccacagcccagaggaaacggtttactagagtagaaatggcccgtgttctcatggagcgaaaccagtataaagagagattgatggagcttcaggaagctgttcgatggacagagatgattcgggcatcacgagaaaatccagccatgcaggaaaaaaaaaggtcaagcatttggcagtttttcagccgacttttcagctcctcaagtaacacgactaagaagcctgaaccacctgttaatctgaagtacaatgcacccacgtctcatgttactccgtccgtcaagaaaagaagcagcaccttatctcagctccctggggataagtccaaagcctttgatttccttagtgaagaaactgaagctagtttagcctcacgcagagaacaaaagagagagcagtatcgtcaggtaaaagcacatgttcagaaggaagacggtagagtgcaggcttttggctggagtctgcctcagaagtacaaacaggtaaccaatggtcaaggtgaaaataagatgaaaaatttacctgtgcctgtctatctcagacctctggatgaaaaagatacatcaatgaagctgtggtgtgctgttggagtcaatttatctggtgggaagaccagagatggtggttctgttgttggagcaagtgtattttacaaggatgttgctggtttggatacagaaggcagtaaacagcgaagtgcctctcagagtagtttagataagttagatcaggaacttaaggaacagcagaaggagttaaaaaatcaagaagaattatccagtctagtttggatctgtaccagcactcattcggctacaaaagttcttattattgatgctgttcaacctggcaacatcctagacagtttcactgtttgcaactctcatgttctgtgcattgcaagtgtgccaggtgcacgagaaacagactaccctgcaggagaagatctttcagaatctggtcaggtagacaaagcatctttatgtggaagtatgacaagcaacagctcagcagagacagacagcctgttaggaggcatcacagtggttggttgttctgcagaaggtgtgacgggagctgccacttcccctagtacaaatggtgcttctccagtgatggataaaccaccagaaatggaagcagaaaatagtgaggttgatgaaaatgttccaacagcagaagaagcaactgaagctacagaagggaatgcggggtcagctgaagacacagtggacatctcccaaactggcgtctacacagagcatgtctttacagatcctttgggagttcagatcccagaagacctctccccagtgtatcagtcgagcaatgactcagatgcatataaagatcaaatatcagtactgccaaatgaacaagacttggtgagagaagaagcccagaaaatgagtagtcttttaccaactatgtggcttggagctcaaaatggctgtttgtatgtccattcatctgtagcccagtggaggaaatgtctccattccattaaacttaaagattcgattctcagtattgtacacgtgaagggaatcgtgttagtagccctggctgacggcacccttgcaatctttcacagaggagtggatgggcagtgggatttgtcaaactatcacctcttagaccttggacggcctcatcattccatccgttgcatgactgtggtacatgacaaagtctggtgtggctataggaacaaaatctatgtggtgcagccaaaggccatgaaaatagagaaatcttttgatgcacatcccaggaaggagagccaagtgcgacagcttgcgtgggtgggggatggcgtgtgggtctccattcgcttggattctacgctccgtctctatcatgcacacacttatcaacatctacaggatgtggacattgagccttatgtaagcaaaatgttaggtactggaaaactgggcttctcttttgtgagaattacagctcttatggtgtcttgtaatcgtttgtgggtggggacaggaaatggtgtcattatctccatcccattgacagaaagtaagtatatttttagataactgccatggaacaaataggagaattataggaaatagttatgtctgaaattcaaatctgtgttagctcagaaaatcagtgatggcaaagatctagctatagttacttcactcaatgaaacttataaattctaggaaaataagttttcatgtatcaagaccaatactcataattaaaagtttttcgttgtcaaaacattttcacagttcaggaatcacagtcctatttcatcttttgaaataaaagttaaagtccatttttcttaagccttattataccattatccaaaaacactacctagcattcatcttagtttttcatatctccttagcagatagtttagtatattccatttgtcttatttgaggtttaaaaaaagttgtggaagaagtttctcaggagttcagcaagcctttccatctatcttctattttaaaagaatgtgatttattgtttttatgaataaaatatacctcgtgtgtttctcatatgatgttccattacattaatcatccattaagtaaatgtttttgtgttgcaaaattcatggcagggaatggtttaaaagcaaatactgtaagtctataaaatacattaatacatatacacttcaaaatcaccataccttttttcaggccagaggagggagaaagactagaaggtatttcggaagcctttaaaagaaagcaaggtttcaatcccacctgtcttttctgcagttacttataaatcatatttagacctctccttatatcctaagagattccaggatcccctagagttcatttcagttatttgtaagagcttcattttagcatagttattggaacaggatttgttttttaaaacacacacacacagagaaataaaggagaaattttagcatttaggaaatgctgcacattgagttcttagtgttttgattcagattcactaaaattgctttatta

SEQ ID NO: 302026 - DNA, 3414 bp, Homo sapiens
tccggccccggcccccaccccgccgggcccagccccagccccggcccgggctccagccctagtacccgtcccagcccgagtcgggtccgtcccgtgcgggcaggtgccgcccctctgccggcgacgccccgggccgcccgcccgtccgcttgccaccatggagctggaggacggtgtggtgtatcaggaggagcccggcggctccggggccgtgatgtcggagcgggtgtccggcctggccggctccatctaccgcgagttcgagcggcttatcgggcgctatgacgaggaggtggtcaaagagctgatgccgctggtggtggctgtgctggagaacctggactcggtgttcgcgcaggaccaggagcaccaggtggagctggagctgctgcgggacgacaacgagcagctcatcacccagtacgagcgggagaaggcgctgcgcaagcacgctgaggagaaattcattgaatttgaagactctcaagaacaggaaaaaaaggacttacagacccgagtggaatctttagaatctcaaacaagacaacttgagctgaaagcgaaaaactatgctgaccagattagcagacttgaagaaagagaagcagaactgaagaaggaatataatgcattacatcaaagacacactgagatgatccataattatatggaacatttagaaagaacaaaacttcatcagctctcagggagtgatcaactagaatccacagctcatagtagaattagaaaagaacgccctatatcattaggaattttcccattacctgctggagatggattgcttacacctgatgctcagaaaggaggagagacccctggatctgagcaatggaaatttcaggaattaagtcaaccacgttctcataccagcctgaaggatgagctttctgatgttagccaaggcggatctaaagctaccactccagcatcaacagctaattcagatgtggcaacaattcctactgatactcccttaaaggaagaaaacgaaggatttgtgaaggttacagatgcgccaaataaatcagagataagcaaacacattgaagtacaggtagcccaggaaactagaaatgtatctactggctctgctgaaaatgaagaaaagtcagaagttcaagcaatcatcgaatctactcctgagctggatatggacaaagatctcagtggatataaaggttcaagcactcccaccaaaggcatagagaacaaagcttttgatcgcaatacagaatctctctttgaagaactgtcttcagctggctcaggcctaataggagatgtggatgaaggagcagatttactaggaatgggtcgggaagttgagaatcttatattagaaaatacacaactgttggaaaccaaaaatgctttgaacatagtgaagaatgatttgatagcaaaagtggatgaactgacctgtgagaaagatgtgctgcaaggggaattggaggctgtgaagcaagccaaactgaaactagaggaaaagaacagagaattggaggaagagcttaggaaagctcgggcagaagctgaagatgcaaggcaaaaagcaaaagatgacgatgatagtgatattcccacagcccagaggaaacggtttactagagtagaaatggcccgtgttctcatggagcgaaaccagtataaagagagattgatggagcttcaggaagctgttcgatggacagagatgattcgggcatcacgagaaaatccagccatgcaggaaaaaaaaaggtcaagcatttggcagtttttcagccgacttttcagctcctcaagtaacacgactaagaagcctgaaccacctgttaatctgaagtacaatgcacccacgtctcatgttactccgtccgtcaagaaaagaagcagcaccttatctcagctccctggggataagtccaaagcctttgatttccttagtgaagaaactgaagctagtttagcctcacgcagagaacaaaagagagagcagtatcgtcaggtaaaagcacatgttcagaaggaagacggtagagtgcaggcttttggctggagtctgcctcagaagtacaaacaggtaaccaatggtcaaggtgaaaataagatgaaaaatttacctgtgcctgtctatctcagacctctggatgaaaaagatacatcaatgaagctgtggtgtgctgttggagtcaatttatctggtgggaagaccagagatggtggttctgttgttggagcaagtgtattttacaaggatgttgctggtttggatacagaaggcagtaaacagcgaagtgcctctcagagtagtttagataagttagatcaggaacttaaggaacagcagaaggagttaaaaaatcaagaagaattatccagtctagtttggatctgtaccagcactcattcggctacaaaagttcttattattgatgctgttcaacctggcaacatcctagacagtttcactgtttgcaactctcatgttctgtgcattgcaagtgtgccaggtgcacgagaaacagactaccctgcaggagaagatctttcagaatctggtcaggtagacaaagcatctttatgtggaagtatgacaagcaacagctcagcagagacagacagcctgttaggaggcatcacagtggttggttgttctgcagaaggtgtgacgggagctgccacttcccctagtacaaatggtgcttctccagtgatggataaaccaccagaaatggaagcagaaaatagtgaggttgatgaaaatgttccaacagcagaagaagcaactgaagctacagaagggaatgcggggtcagctgaagacacagtggacatctcccaaactggcgtctacacagagcatgtctttacagatcctttgggagttcagatcccagaagacctctccccagtgtatcagtcgagcaatgactcagatgcatataaagatcaaatatcagtactgccaaatgaacaagacttggtgagagaagaagcccagaaaatgagtagtcttttaccaactatgtggcttggagctcaaaatggctgtttgtatgtccattcatctgtagcccagtggaggaaatgtctccattccattaaacttaaagattcgattctcagtattgtacacgtgaagggaatcgtgttagtagccctggctgacggcacccttgcaatctttcacagaggagtggatggcggggattggcaatattactcttaactgggagggtcataatcacacgtgcatactggggcatgcacagccggggggcttggacccacttgggggcccaggctgaaaaaaaaattttggggcacccggagaaaacacggcacagcggggggagcgtgcacccggatagcggctattggacacaaaacagggggtgccacaaaacgaag

SEQ ID NO: 302027 - DNA, 3070 bp, Homo sapiens
tccggccccggcccccaccccgccgggcccagccccagccccggcccgggctccagccctagtacccgtcccagcccgagtcgggtccgtcccgtgcgggcaggtgccgcccctctgccggcgacgccccgggccgcccgcccgtccgcttgccaccatggagctggaggacggtgtggtgtatcaggaggagcccggcggctccggggccgtgatgtcggagcgggtgtccggcctggccggctccatctaccgcgagttcgagcggcttatcgggcgctatgacgaggaggtggtcaaagagctgatgccgctggtggtggctgtgctggagaacctggactcggtgttcgcgcaggaccaggagcaccaggtggagctggagctgctgcgggacgacaacgagcagctcatcacccagtacgagcgggagaaggcgctgcgcaagcacgctgaggagaaattcattgaatttgaagactctcaagaacaggaaaaaaaggacttacagacccgagtggaatctttagaatctcaaacaagacaacttgagctgaaagcgaaaaactatgctgaccagattagcagacttgaagaaagagaagcagaactgaagaaggaatataatgcattacatcaaagacacactgagatgatccataattatatggaacatttagaaagaacaaaacttcatcagctctcagggagtgatcaactagaatccacagctcatagtagaattagaaaagaacgccctatatcattaggaattttcccattacctgctggagatggattgcttacacctgatgctcagaaaggaggagagacccctggatctgagcaatggaaatttcaggaattaagtcaaccacgttctcataccagcctgaaggatgagctttctgatgttagccaaggcggatctaaagctaccactccagcatcaacagctaattcagatgtggcaacaattcctactgatactcccttaaaggaagaaaacgaaggatttgtgaaggttacagatgcgccaaataaatcagagataagcaaacacattgaagtacaggtagcccaggaaactagaaatgtatctactggctctgctgaaaatgaagaaaagtcagaagttcaagcaatcatcgaatctactcctgagctggatatggacaaagatctcagtggatataaaggttcaagcactcccaccaaaggcatagagaacaaagcttttgatcgcaatacagaatctctctttgaagaactgtcttcagctggctcaggcctaataggagatgtggatgaaggagcagatttactaggaatgggtcgggaagttgagaatcttatattagaaaatacacaactgttggaaaccaaaaatgctttgaacatagtgaagaatgatttgatagcaaaagtggatgaactgacctgtgagaaagatgtgctgcaaggggaattggaggctgtgaagcaagccaaactgaaactagaggaaaagaacagagaattggaggaagagcttaggaaagctcgggcagaagctgaagatgcaaggcaaaaagcaaaagatgacgatgatagtgatattcccacagcccagaggaaacggtttactagagtagaaatggcccgtgttctcatggagcgaaaccagtataaagagagattgatggagcttcaggaagctgttcgatggacagagatgattcgggcatcacgagaaaatccagccatgcaggaaaaaaaaaggtcaagcatttggcagtttttcagccgacttttcagctcctcaagtaacacgactaagaagcctgaaccacctgttaatctgaagtacaatgcacccacgtctcatgttactccgtccgtcaagaaaagaagcagcaccttatctcagctccctggggataagtccaaagcctttgatttccttagtgaagaaactgaagctagtttagcctcacgcagagaacaaaagagagagcagtatcgtcaggtaaaagcacatgttcagaaggaagacggtagagtgcaggcttttggctggagtctgcctcagaagtacaaacaggtaaccaatggtcaaggtgaaaataagatgaaaaatttacctgtgcctgtctatctcagacctctggatgaaaaagatacatcaatgaagctgtggtgtgctgttggagtcaatttatctggtgggaagaccagagatggtggttctgttgttggagcaagtgtattttacaaggatgttgctggtttggatacagaaggcagtaaacagcgaagtgcctctcagagtagtttagataagttagatcaggaacttaaggaacagcagaaggagttaaaaaatcaagaagaattatccagtctagtttggatctgtaccagcactcattcggctacaaaagttcttattattgatgctgttcaacctggcaacatcctagacagtttcactgtttgcaactctcatgttctgtgcattgcaagtgtgccaggtgcacgagaaacagactaccctgcaggagaagatctttcagaatctggtcaggtagacaaagcatctttatgtggaagtatgacaagcaacagctcagcagagacagacagcctgttaggaggcatcacagtggttggttgttctgcagaaggtgtgacgggagctgccacttcccctagtacaaatggtgcttctccagtgatggataaaccaccagaaatggaagcagaaaatagtgaggttgatgaaaatgttccaacagcagaagaagcaactgaagctacagaagggaatgcggggtcagctgaagacacagtggacatctcccaaactggcgtctacacagagcatgtctttacagatcctttgggagttcagatcccagaagacctctccccagtgtatcagtcgaggtataataatgggtcatcaacttaggcaactgggtgaagtgcacaaataaaaggaaccaaaataatctcaaacagtcaaaagatttccaccacagtgacactaattagtggaaatctttgactgttgagattaggaccggcc

SEQ ID NO: 302028 - DNA, 711 bp, Homo sapiens
aaaacaaaaaaacaaaaaacctgaacttgatttcaaggagtaaataacagcagtgcttgctcatgtctcagtggatctgtaataagttcacttttgatgaggcttactaatgtgcctttttcactcctccttccaccattattaggtaaccaatggtcaaggtgaaaataagatgaaaaatttacctgtgcctgtctatctcagacctctggatgaaaaagatacatcaatgaaggtaagttcattgtgaattaaaaggagatgttttctaaactctgggtagttttttttctaaaaccaaaaaagtataagtattacttctatggtgaggttattgttcattttataatattaggttataagacctgtatttacaaccattagttattttaagaaaacatgaaaatgctaaacatttctagacttaatattgttttctttttcacctgagaagctgtggtgtgctgttggagtcaatttatctggtgggaagaccagagatggtggttctgttgttggagcaagtgtattttacaaggatgttgctggtttggatacagaaggcagtaaacagcgaagtgcctctcagagtagtttagataagttagatcaggaacttaaggtacgtgtgtgtactaacatttgacctggttatgagactatgagtttaactctttcatccaaaatttgcctctgggtccagcttctaat

SEQ ID NO: 302029 - DNA, 3237 bp, Homo sapiens
agcgggtcactgcgcaggcgcggcccgggagcgtggggtatctcgaggtgccgggttgcaggcgctcaggagcgctagggtttgaggcctgctttctgctcgcgccagcagagcactacctgaggcagcgaggcgcagcgagcctagcctccccgcgccctgggcagtgtggccatggagaatcaggtgttgacgccgcatgtctactgggctcagcgacaccgcgagctatatctgcgcgtggagctgagtgacgtacagaaccctgccatcagcatcactgaaaacgtgctgcatttcaaagctcaaggacatggtgccaaaggagacaatgtctatgaatttcacctggagttcttagaccttgtgaaaccagagcctgtttacaaactgacccagaggcaggtaaacattacagtacagaagaaagtgagtcagtggtgggagagactcacaaagcaggaaaagcgaccactgtttttggctcctgactttgatcgttggctggatgaatctgatgcggaaatggagctcagagctaaggaagaagagcgcctaaataaactccgactggaaagcgaaggctctcctgaaactcttacaaacttaaggaaaggatacctgtttatgtataatcttgtgcaattcttgggattctcctggatctttgtcaacctgactgtgcgattctgtatcttgggaaaagagtccttttatgacacattccatactgtggctgacatgatgtatttctgccagatgctggcagttgtggaaactatcaatgcagcaattggagtcactacgtcaccggtgctgccttctctgatccagcttcttggaagaaattttattttgtttatcatctttggcaccatggaagaaatgcagaacaaagctgtggttttctttgtgttttatttgtggagtgcaattgaaattttcaggtactctttctacatgctgacgtgcattgacatggattggaaggtgctcacatggcttcgttacactctgtggattcccttatatccactgggatgtttggcggaagctgtctcagtgattcagtccattccaatattcaatgagaccggacgattcagtttcacattgccatatccagtgaaaatcaaagttagattttccttttttcttcagatttatcttataatgatatttttaggtttatacataaattttcgtcacctttataaacagcgcagacggcgctatggacaaaaaaagaaaaagatccactaaaaagaaagatttagatggcttcttgccagtttgagcctaatctgattcttacagttttaccttcttgaaccaatgtaaaagtttttttaatgttaaatgattaaattctcagtgaggctatcttccttttccccagtaacattcctgaatttactgttatcttattgtagtacttgcatgacatggattcctgatatctgatgagaggttcattcttgtgtattcagttaatgacaccaaaaggctcagcccaccccaaccctatctcatgttcagtctgtctaatacatgccagagatttttttttcaaaaagtgctttatccctacaatgtactgacagttcttacagttgagatttgttcttttcagctattgcttgtgaaaaaaagcaagactatgtcactctatagaaggctgttaaagtgactcaggcaggaattaattattctgtacctaaggggttacttgtttaatgggatggcattgactttttgaaaatcaagtggactgagtcattgataaaacatttctaagagtggggctagagaacatactttacatctgacatcctttggcctaacaacatctattattatagtgctcagcagtgtgggcattgaagaggcgcagaatgctttgaaagaaactaatcagaatcttggaacatcatgatcatgccattcttaagtaaatcaactattttcaacactgaagaaaaatgaaacattatttagaaaacaatgagattacaagttccaaactcagccaggaatgtggctcacacctgtaatcccagcactttgggacacctaggtgggagcatcgcttgaagccaggagttcaagaccagcttgggcaacgtagtgagacccctatctctacaaaaaataaaaaaattagctgggtgtgatggcacacacctgttgtcccagctactcaagaagctgagatgggaggatcctgagctcaggaggtcaaggctgcagtgagccgagattgtgccactgcactgcagctggggtgacagtgcaagaccctgtctcaaaccaaaccaaaccacacacacacaaacacacatacacacacacacacacgaggtccaaatggtagcagggatccaaagggaacacagtatgtaggtcaaactggcagtaacagtgtacagcctttgacaaactagaaatattagagtaggccaaacacacctccaaactgtaaggctgtgcacaaacataaaaaatggcagccttccatctcctgcactggctgagtccatttacttgtgtacttgttctagtgagtggtgggactgtacatttttgaatagacctcaaaaatacttcattctgctgctgttcagttggctttttaaacctgtctgcagtaggacactgaaaacagcaagaacttcggggtgaacacccgctgatcctttaacaaggatttctggcaggaaactcacaaaaaggagaactgaaaatttagacatacagttggccattgtaaaaaacatcagtttcctctcatacattccaagtaaaccaagtaaaataagtgttggagtaacacttgcataaaagaatttaaggagtgatagctctttctgttctgccattcccaacattcctgggggaaaggagactcaatgagttaatactatttcactgagcccaagatggaaacttggtttgacctaaaacatctgattaatataggctagctgatttcttaaaaattcgttgcattgaaggatattttgcatgtctgtaacacctgtcaatacttgtttgtattgatttctgatattcttgcagctgactacgtgtaattgggcagatcagctttgcagtagattatgctgcatcctcgtggcaaaattctgtattcttagtgattgttacaaacccctttattgctgtctgagaaagtgaaagattgtgtatttctattaaaacatttacaatcaaaattaa

SEQ ID NO: 302030 - DNA, 436 bp, Homo sapiens
ggaaaggagactcaatgagttaatactatttcactgagcccaagaatgtgggaatggcagaacagaaagagctatcattcccaacattcctgggggaaaggagactcaatgagttaatactatttcactgagcccaagatggaaacttggtttgacctaaaacatctgattaatataggctagctgatttcttaaaaattcgttgcattgaaggatattttgcatgtctgtaacacctgtcaatacttgtttgtattgatttctgatattcttgcagctgactacgtgtaattgggcagatcagctttgcagtagattatgctgcatcctcgtggcaaaattctgtattcttagtgattgttacaaacccctttattgctgtctgagaaagtgaaagattgtgtatttctattaaaacatttacaatcaaaattaa

SEQ ID NO: 302031 - DNA, 3177 bp, Homo sapiens
agcgggtcactgcgcaggcgcggcccgggagcgtggggtatctcgaggtgccgggttgcaggcgctcaggagcgctagggtttgaggcctgctttctgctcgcgccagcagagcactacctgaggcagcgaggcgcagcgagcctagcctccccgcgccctgggcagtgtggccatggagaatcaggtgttgacgccgcatgtctactgggctcagcgacaccgcgagctatatctgcgcgtggagctgagtgacgtacagaaccctgccatcagcatcactgaaaacgtgctgcatttcaaagctcaaggacatggtgccaaaggagacaatgtctatgaatttcacctggagttcttagaccttgtgaaaccagagcctgtttacaaactgacccagaggcaggtaaacattacagtacagaagaaagtgagtcagtggtgggagagactcacaaagcaggaaaagcgaccactgtttttggctcctgactttgatcgttggctggatgaatctgatgcggaaatggagctcagagctaaggaagaagagcgcctaaataaactccgactggaaagcgaaggctctcctgaaactcttacaaacttaaggaaaggatacctgtttatgtataatcttgtgcaattcttgggattctcctggatctttgtcaacctgactgtgcgattctgtatcttgggaaaagagtccttttatgacacattccatactgtggctgacatgatgtatttctgccagatgctggcagttgtggaaactatcaatgcagcaattggagtcactacgtcaccggtgctgccttctctgatccagcttcttggaagaaattttattttgtttatcatctttggcaccatggaagaaatgcagaacaaagctgtggttttctttgtgttttatttgtggagtgcaattgaaattttcaggtactctttctacatgctgacgtgcattgacatggattggaaggtgctcacatggcttcgttacactctgtggattcccttatatccactgggatgtttggcggaagctgtctcagtgattcagtccattccaatattcaatgagaccggacgattcagtttcacattgccatatccagtgaaaatcaaagttagattttccttttttcttcagatttatcttataatgatatttttaggtttatacataaattttcgtcacctttataaacagcgcagacggcgctatggacaaaaaaagaaaaagatccactaaaaagaaagatttagatggcttcttgccagtttgagcctaatctgattcttacagttttaccttcttgaaccaatgtaaaagtttttttaatgttaaatgattaaattctcagtgaggctatcttccttttccccagtaacattcctgaatttactgttatcttattgtagtacttgcatgacatggattcctgatatctgatgagaggttcattcttgtgtattcagttaatgacaccaaaaggctcagcccaccccaaccctatctcatgttcagtctgtctaatacatgccagagatttttttttcaaaaagtgctttatccctacaatgtactgacagttcttacagttgagatttgttcttttcagctattgcttgtgaaaaaaagcaagactatgtcactctatagaaggctgttaaagtgactcaggcaggaattaattattctgtacctaaggggttacttgtttaatgggatggcattgactttttgaaaatcaagtggactgagtcattgataaaacatttctaagagtggggctagagaacatactttacatctgacatcctttggcctaacaacatctattattatagtgctcagcagtgtgggcattgaagaggcgcagaatgctttgaaagaaactaatcagaatcttggaacatcatgatcatgccattcttaagtaaatcaactattttcaacactgaagaaaaatgaaacattatttagaaaacaatgagattacaagttccaaactcagccaggaatgtggctcacacctgtaatcccagcactttgggacacctaggtgggagcatcgcttgaagccaggagttcaagaccagcttgggcaacgtagtgagacccctatctctacaactgagatgggaggatcctgagctcaggaggtcaaggctgcagtgagccgagattgtgccactgcactgcagctggggtgacagtgcaagaccctgtctcaaaccaaaccaaaccacacacacacaaacacacatacacacacacacacacgaggtccaaatggtagcagggatccaaagggaacacagtatgtaggtcaaactggcagtaacagtgtacagcctttgacaaactagaaatattagagtaggccaaacacacctccaaactgtaaggctgtgcacaaacataaaaaatggcagccttccatctcctgcactggctgagtccatttacttgtgtacttgttctagtgagtggtgggactgtacatttttgaatagacctcaaaaatacttcattctgctgctgttcagttggctttttaaacctgtctgcagtaggacactgaaaacagcaagaacttcggggtgaacacccgctgatcctttaacaaggatttctggcaggaaactcacaaaaaggagaactgaaaatttagacatacagttggccattgtaaaaaacatcagtttcctctcatacattccaagtaaaccaagtaaaataagtgttggagtaacacttgcataaaagaatttaaggagtgatagctctttctgttctgccattcccaacattcctgggggaaaggagactcaatgagttaatactatttcactgagcccaagatggaaacttggtttgacctaaaacatctgattaatataggctagctgatttcttaaaaattcgttgcattgaaggatattttgcatgtctgtaacacctgtcaatacttgtttgtattgatttctgatattcttgcagctgactacgtgtaattgggcagatcagctttgcagtagattatgctgcatcctcgtggcaaaattctgtattcttagtgattgttacaaacccctttattgctgtctgagaaagtgaaagattgtgtatttctattaaaacatttacaatcaaaattaa

SEQ ID NO: 302032 - DNA, 3183 bp, Homo sapiens
agcgggtcactgcgcaggcgcggcccgggagcgtggggtatctcgaggtgccgggttgcaggcgctcaggagcgctagggtttgaggcctgctttctgctcgcgccagcagagcactacctgaggcagcgaggcgcagcgagcctagcctccccgcgccctgggcagtgtggccatggagaatcaggtgttgacgccgcatgtctactgggctcagcgacaccgcgagctatatctgcgcgtggagctgagtgacgtacagaaccctgccatcagcatcactgaaaacgtgctgcatttcaaagctcaaggacatggtgccaaaggagacaatgtctatgaatttcacctggagttcttagaccttgtgaaaccagagcctgtttacaaactgacccagaggcaggtaaacattacagtacagaagaaagtgagtcagtggtgggagagactcacaaagcaggaaaagcgaccactgtttttggctcctgactttgatcgttggctggatgaatctgatgcggaaatggagctcagagctaaggaagaagagcgcctaaataaactccgactggaaagcgaaggctctcctgaaactcttacaaacttaaggaaaggatacctgtttatgtataatcttgtgcaattcttgggattctcctggatctttgtcaacctgactgtgcgattctgtatcttgggaaaagagtccttttatgacacattccatactgtggctgacatgatgtatttctgccagatgctggcagttgtggaaactatcaatgcagcaattggagtcactacgtcaccggtgctgccttctctgatccagcttcttggaagaaattttattttgtttatcatctttggcaccatggaagaaatgcagaacaaagctgtggttttctttgtgttttatttgtggagtgcaattgaaattttcaggtactctttctacatgctgacgtgcattgacatggattggaaggtgctcacatggcttcgttacactctgtggattcccttatatccactgggatgtttggcggaagctgtctcagtgattcagtccattccaatattcaatgagaccggacgattcagtttcacattgccatatccagtgaaaatcaaagttagattttccttttttcttcagatttatcttataatgatatttttaggtttatacataaattttcgtcacctttataaacagcgcagacggcgctatggacaaaaaaagaaaaagatccactaaaaagaaagatttagatggcttcttgccagtttgagcctaatctgattcttacagttttaccttcttgaaccaatgtaaaagtttttttaatgttaaatgattaaattctcagtgaggctatcttccttttccccagtaacattcctgaatttactgttatcttattgtagtacttgcatgacatggattcctgatatctgatgagaggttcattcttgtgtattcagttaatgacaccaaaaggctcagcccaccccaaccctatctcatgttcagtctgtctaatacatgccagagatttttttttcaaaaagtgctttatccctacaatgtactgacagttcttacagttgagatttgttcttttcagctattgcttgtgaaaaaaagcaagactatgtcactctatagaaggctgttaaagtgactcaggcaggaattaattattctgtacctaaggggttacttgtttaatgggatggcattgactttttaacatactttacatctgacatcctttggcctaacaacatctattattatagtgctcagcagtgtgggcattgaagaggcgcagaatgctttgaaagaaactaatcagaatcttggaacatcatgatcatgccattcttaagtaaatcaactattttcaacactgaagaaaaatgaaacattatttagaaaacaatgagattacaagttccaaactcagccaggaatgtggctcacacctgtaatcccagcactttgggacacctaggtgggagcatcgcttgaagccaggagttcaagaccagcttgggcaacgtagtgagacccctatctctacaaaaaataaaaaaattagctgggtgtgatggcacacacctgttgtcccagctactcaagaagctgagatgggaggatcctgagctcaggaggtcaaggctgcagtgagccgagattgtgccactgcactgcagctggggtgacagtgcaagaccctgtctcaaaccaaaccaaaccacacacacacaaacacacatacacacacacacacacgaggtccaaatggtagcagggatccaaagggaacacagtatgtaggtcaaactggcagtaacagtgtacagcctttgacaaactagaaatattagagtaggccaaacacacctccaaactgtaaggctgtgcacaaacataaaaaatggcagccttccatctcctgcactggctgagtccatttacttgtgtacttgttctagtgagtggtgggactgtacatttttgaatagacctcaaaaatacttcattctgctgctgttcagttggctttttaaacctgtctgcagtaggacactgaaaacagcaagaacttcggggtgaacacccgctgatcctttaacaaggatttctggcaggaaactcacaaaaaggagaactgaaaatttagacatacagttggccattgtaaaaaacatcagtttcctctcatacattccaagtaaaccaagtaaaataagtgttggagtaacacttgcataaaagaatttaaggagtgatagctctttctgttctgccattcccaacattcctgggggaaaggagactcaatgagttaatactatttcactgagcccaagatggaaacttggtttgacctaaaacatctgattaatataggctagctgatttcttaaaaattcgttgcattgaaggatattttgcatgtctgtaacacctgtcaatacttgtttgtattgatttctgatattcttgcagctgactacgtgtaattgggcagatcagctttgcagtagattatgctgcatcctcgtggcaaaattctgtattcttagtgattgttacaaacccctttattgctgtctgagaaagtgaaagattgtgtatttctattaaaacatttacaatcaaaattaa

SEQ ID NO: 302033 - DNA, 3026 bp, Homo sapiens
agcgggtcactgcgcaggcgcggcccgggagcgtggggtatctcgaggtgccgggttgcaggcgctcaggagcgctagggtttgaggcctgctttctgctcgcgccagcagagcactacctgaggcagcgaggcgcagcgagcctagcctccccgcgccctgggcagtgtggccatggagaatcaggtgttgacgccgcatgtctactgggctcagcgacaccgcgagctatatctgcgcgtggagctgagtgacgtacagaaccctgccatcagcatcactgaaaacgtgctgcatttcaaagctcaaggacatggtgccaaaggagacaatgtctatgaatttcacctggagttcttagaccttgtgaaaccagagcctgtttacaaactgacccagaggcaggtaaacattacagtacagaagaaagtgagtcagtggtgggagagactcacaaagcaggaaaagcgaccactgtttttggctcctgactttgatcgttggctggatgaatctgatgcggaaatggagctcagagctaaggaagaagagcgcctaaataaactccgactggaaagcgaaggctctcctgaaactcttacaaacttaaggaaaggatacctgtttatgtataatcttgtgcaattcttgggattctcctggatctttgtcaacctgactgtgcgattctgtatcttgggaaaagagtccttttatgacacattccatactgtggctgacatgatgtatttctgccagatgctggcagttgtggaaactatcaatgcagcaattggagtcactacgtcaccggtgctgccttctctgatccagcttcttggaagaaattttattttgtttatcatctttggcaccatggaagaaatgcagaacaaagctgtggttttctttgtgttttatttgtggagtgcaattgaaattttcaggtactctttctacatgctgacgtgcattgacatggattggaaggtgctcacatggcttcgttacactctgtggattcccttatatccactgggatgtttggcggaagctgtctcagtgattcagtccattccaatattcaatgagaccggacgattcagtttcacattgccatatccagtgaaaatcaaagttagattttccttttttcttcagatttatcttataatgatatttttaggtttatacataaattttcgtcacctttataaacagcgcagacggcgctatggacaaaaaaagaaaaagatccactaaaaagaaagatttagatggcttcttgccagtttgagcctaatctgattcttacagttttaccttcttgaaccaatgtaaaagtttttttaatgttaaatgattaaattctcagtgaggctatcttccttttccccagtaacattcctgaatttactgttatcttattgtagtacttgcatgacatggattcctgatatctgatgagaggttcattcttgtgtattcagttaatgacaccaaaaggctcagcccaccccaaccctatctcatgttcagtctgtctaatacatgccagagatttttttttcaaaaagtgctttatccctacaatgtactgacagttcttacagttgagatttgttcttttcagctattgcttgtgaaaaaaagcaagactatgtcactctatagaaggctgttaaagtgactcaggcaggaattaattattctgtacctaaggggttacttgtttaatgggatggcattgactttttgaaaatcaagtggactgagtcattgataaaacatttctaagagtggggctagagaacatactttacatctgacatcctttggcctaacaacatctattattatagtgctcagcagtgtgggcattgaagaggcgcagaatgctttgaaagaaactaatcagaatcttggaacatcatgatcatgccattcttaagtaaatcaactattttcaacactgaagaaaaatgaaacattatttagaaaacaatgagattacaagttccaaactcagccaggaatctgagatgggaggatcctgagctcaggaggtcaaggctgcaagtgcaagaccctgtctcaaaccaaaccaaaccacacacacacaaacacacatacacacacacacacacgaggtccaaatggtagcagggatccaaagggaacacagtatgtaggtcaaactggcagtaacagtgtacagcctttgacaaactagaaatattagagtaggccaaacacacctccaaactgtaaggctgtgcacaaacataaaaaatggcagccttccatctcctgcactggctgagtccatttacttgtgtacttgttctagtgagtggtgggactgtacatttttgaatagacctcaaaaatacttcattctgctgctgttcagttggctttttaaacctgtctgcagtaggacactgaaaacagcaagaacttcggggtgaacacccgctgatcctttaacaaggatttctggcaggaaactcacaaaaaggagaactgaaaatttagacatacagttggccattgtaaaaaacatcagtttcctctcatacattccaagtaaaccaagtaaaataagtgttggagtaacacttgcataaaagaatttaaggagtgatagctctttctgttctgccattcccaacattcctgggggaaaggagactcaatgagttaatactatttcactgagcccaagatggaaacttggtttgacctaaaacatctgattaatataggctagctgatttcttaaaaattcgttgcattgaaggatattttgcatgtctgtaacacctgtcaatacttgtttgtattgatttctgatattcttgcagctgactacgtgtaattgggcagatcagctttgcagtagattatgctgcatcctcgtggcaaaattctgtattcttagtgattgttacaaacccctttattgctgtctgagaaagtgaaagattgtgtatttctattaaaacatttacaatcaaaattaa

SEQ ID NO: 302034 - DNA, 3603 bp, Homo sapiens
  misc_feature (3250)..(3250): n is a, c, g, or t
agcgggtcactgcgcaggcgcggcccgggagcgtggggtatctcgaggtgccgggttgcaggcgctcaggagcgctagggtttgaggcctgctttctgctcgcgccagcagagcactacctgaggcagcgaggcgcagcgagcctagcctccccgcgccctgggcagtgtggccatggagaatcaggtgttgacgccgcatgtctactgggctcagcgacaccgcgagctatatctgcgcgtggagctgagtgacgtacagaaccctgccatcagcatcactgaaaacgtgctgcatttcaaagctcaaggacatggtgccaaaggagacaatgtctatgaatttcacctggagttcttagaccttgtgaaaccagagcctgtttacaaactgacccagaggcaggtaaacattacagtacagaagaaagtgagtcagtggtgggagagactcacaaagcaggaaaagcgaccactgtttttggctcctgactttgatcgttggctggatgaatctgatgcggaaatggagctcagagctaaggaagaagagcgcctaaataaactccgactggaaagcgaaggctctcctgaaactcttacaaacttaaggaaaggatacctgtttatgtataatcttgtgcaattcttgggattctcctggatctttgtcaacctgactgtgcgattctgtatcttgggaaaagagtccttttatgacacattccatactgtggctgacatgatgtatttctgccagatgctggcagttgtggaaactatcaatgcagcaattggagtcactacgtcaccggtgctgccttctctgatccagcttcttggaagaaattttattttgtttatcatctttggcaccatggaagaaatgcagaacaaagctgtggttttctttgtgttttatttgtggagtgcaattgaaattttcaggtactctttctacatgctgacgtgcattgacatggattggaaggtgctcacatggcttcgttacactctgtggattcccttatatccactgggatgtttggcggaagctgtctcagtgattcagtccattccaatattcaatgagaccggacgattcagtttcacattgccatatccagtgaaaatcaaagttagattttccttttttcttcagatttatcttataatgatatttttaggtttatacataaattttcgtcacctttataaacagcgcagacggcgctatggacaaaaaaagaaaaagatccactaaaaagaaagatttagatggcttcttgccagtttgagcctaatctgattcttacagttttaccttcttgaaccaatgtaaaagtttttttaatgttaaatgattaaattctcagtgaggctatcttccttttccccagtaacattcctgaatttactgttatcttattgtagtacttgcatgacatggattcctgatatctgatgagaggttcattcttgtgtattcagttaatgacaccaaaaggctcagcccaccccaaccctatctcatgttcagtctgtctaatacatgccagagatttttttttcaaaaagtgctttatccctacaatgtactgacagttcttacagttgagatttgttcttttcagctattgcttgtgaaaaaaagcaagactatgtcactctatagaaggctgttaaagtgactcaggcaggaattaattattctgtacctaaggggttacttgtttaatgggatggcattgactttttgaaaatcaagtggactgagtcattgataaaacatttctaagagtggggctagagaacatactttacatctgacatcctttggcctaacaacatctattattatagtgctcagcagtgtgggcattgaagaggcgcagaatgctttgaaagaaactaatcagaatcttggaacatcatgatcatgccattcttaagtaaatcaactattttcaacactgaagaaaaatgaaacattatttagaaaacaatgagattacaagttccaaactcagccaggaatgtggctcacacctgtaatcccagcactttgggacacctaggtgggagcatcgcttgaagccaggagttcaagaccagcttgggcaacgtagtgagacccctatctctacaaaaaataaaaaaattagctgggtgtgatggcacacacctgttgtcccagctactcaagaagctgagatgggaggatcctgagctcaggaggtcaaggctgcagtgagccgagattgtgccactgcactgcagctggggtgacagtgcaagaccctgtctcaaaccaaaccaaaccacacacacacaaacacacatacacacacacacacacgaggtccaaatggtagcagggatccaaagggaacacagtatgtaggtcaaactggcagtaacagtgtacagcctttgacaaactagaaatattagagtaggccaaacacacctccaaactgtaaggctgtgcacaaacataaaaaatggcagccttccatctcctgcactggctgagtccatttacttgtgtacttgttctagtgagtggtgggactgtacatttttgaatagacctcaaaaatacttcattctgctgctgttcagttggctttttaaacctgtctgcagtaggacactgaaaacagcaagaacttcggggtgaacacccgctgatcctttaacaaggatttctggcaggaaactcacaaaaaggagaactgaaaatttagacatacagttggccattgtaaaaaacatcagtttcctctcatacattccaagtaaaccaagtaaaataagtgttggagtaacacttgcataaaagaatttaaggagtgatagctctttctgttctgccattcccaacattcctgggggaaaggagactcaatgagttaatactatttcactgagcccaagatggaaacttggtttgacctaaaacatctgattaatataggctagctgatttcttaaaaattcgttgcattgaaggatattttgcatgtctgtaacacctgtcaatacttgtttgtattgatttctgatattcttgcagctgactacgtgtaattgggcagatcagctttgcagtagattatgctgcatcctcgtggcaaaattctgtattcttagtgattgttacaaacccctttattgctgtctgagaaagtgaaagattgtgtatttctattaaaacatttacaatcaaaattaaaaaaaaaaaaaanaaaaaaaaaaaaaaaaaaaaaaaaaaaaaaaaaaaaaaaaaaaaaaaaagggggggggggcgcgcgcacaaagagaagaatatctcccgcgcagggggggcgccaccaataggcgcgcgcgccaccgccacagatttgtgttgaaacaagagagggcggccccatatgagaggaggagcgcggctaattaataaacgaggcggagcgcgcgggggcgcggcggttacacacaacgacgcgggaggagggggagaacaagagcggcggacgcgggggcgactctgtgaggaaggaggacgacacctactccgggggggggggggagaacaaataggggggacacaccaccccag

SEQ ID NO: 302035 - DNA, 3213 bp, Homo sapiens
agcgggtcactgcgcaggcgcggcccgggagcgtggggtatctcgaggtgccgggttgcaggcgctcaggagcgctagggtttgaggcctgctttctgctcgcgccagcagagcactacctgaggcagcgaggcgcagcgagcctagcctccccgcgccctgggcagtgtggccatggagaatcaggtgttgacgccgcatgtctactgggctcagcgacaccgcgagctatatctgcgcgtggagctgagtgacgtacagaaccctgccatcagcatcactgaaaacgtgctgcatttcaaagctcaaggacatggtgccaaaggagacaatgtctatgaatttcacctggagttcttagaccttgtgaaaccagagcctgtttacaaactgacccagaggcaggtaaacattacagtacagaagaaagtgagtcagtggtgggagagactcacaaagcaggaaaagcgaccactgtttttggctcctgactttgatcgttggctggatgaatctgatgcggaaatggagctcagagctaaggaagaagagcgcctaaataaactccgactggaaagcgaaggctctcctgaaactcttacaaacttaaggaaaggatacctgtttatgtataatcttgtgcaattcttgggattctcctggatctttgtcaacctgactgtgcgattctgtatcttgggaaaagagtccttttatgacacattccatactgtggctgacatgatgtatttctgccagatgctggcagttgtggaaactatcaatgcagcaattggagtcactacgtcaccggtgctgccttctctgatccagcttcttggaagaaattttattttgtttatcatctttggcaccatggaagaaatgcagaacaaagctgtggttttctttgtgttttatttgtggagtgcaattgaaattttcaggtactctttctacatgctgacgtgcattgacatggattggaaggtgctcacatggcttcgttacactctgtggattcccttatatccactgggatgtttggcggaagctgtctcagtgattcagtccattccaatattcaatgagaccggacgattcagtttcacattgccatatccagtgaaaatcaaagttagattttccttttttcttcagatttatcttataatgatatttttaggtttatacataaattttcgtcacctttataaacagcgcagacggcgctatggacaaaaaaagaaaaagatccactaaaaagaaagatttagatggcttcttgccagtttgagcctaatctgattcttacagttttaccttcttgaaccaatgtaaaagtttttttaatgttaaatgattaaattctcagtgaggctatcttccttttccccagtaacattcctgaatttactgttatcttattgtagtacttgcatgacatggattcctgatatctgatgagaggttcattcttgtgtattcagttaatgacaccaaaaggctcagcccaccccaaccctatctcatgttcagtctgtctaatacatgccagagatttttttttcaaaaagtgctttatccctacaatgtactgacagttcttacagttgagatttgttcttttcagctattgcttgtgaaaaaaagcaagactatgtcactctatagaaggctgttaaagtgactcaggcaggaattaattattctgtacctaaggggttacttgtttaatgggatggcattgactttttgaaaatcaagtggactgagtcattgataaaacatttctaagagtggggctagagaacatactttacatctgacatcctttggcctaacaacatctattattatagtgctcagcagtgtgggcattgaagaggcgcagaatgctttgaaagaaactaatcagaatcttggaacatcatgatcatgccattcttaagtaaatcaactattttcaacactgaagaaaaatgaaacattatttagaaaacaatgagattacaagttccaaactcagccaggaatgtggctcacacctgtaatcccagcactttgggacacctaggtgggagcatcgcttgaagccaggagttcaagaccagcttgggcaacgtagtgagacccctatctctacaaaaaataaaaaaattagctgggtgtgatggcacacacctgttgtcccagctactcaagaagctgagatgggaggatcctgagctcaggaggtcaaggctgcagtgagccgagattgtgccactgcactgcagctggggtgacagtgcaagaccctgtctcaaaccaaaccaaaccacacacacacaaacacacatacacacacacacacacgaggtccaaatggtagcagggatccaaagggaacacagtatgtaggtcaaactggcagtaacagtgtacagcctttgacaaactagaaatattagagtaggccaaacacacctccaaactgtaaggctgtgcacaaacataaaaaatggcagccttccatctcctgcactggctgagtccatttacttgtgtacttgttctagtgagtggtgggactgtacatttttgaatagacctcaaaaatacttcattctgctgctgttcagttggctttttaaacctgtctgcagtaggacactgaaaacagcaagaacttcggggtgaacacccgctgatcctttaacaaggatttctggcaggaaactcacaaaaaggagaactgaaaatttagacatacagttggccattgtaaaaaacatcagtttcctctcatacattccaagtaaaccaagtaaaataagtgttggagtaacacttgcataaaagaatttaaggagtgatagctctttctgttctgccattcccaacattcctgggggaaaggagactcaatgagttaatactatttcactgagcccaagatggaaacttggtttgacctaaaacatctgattaatataggctagctgatttcttaaaaattcgttgcattgaaggatattttgcatgtctgtaacacctgtcaatacttgtttgtattgatttctgatattcttgcagctgactacgtgtaattgggcagatcagctttgcagtagattatgctgcatcctcgtggcaaaattctgtattcttagtgattgttacaaacccctttattgctgtctaacatgcaactcagggcgatccctctag

SEQ ID NO: 302036 - DNA, 3183 bp, Homo sapiens
agcgggtcactgcgcaggcgcggcccgggagcgtggggtatctcgaggtgccgggttgcaggcgctcaggagcgctagggtttgaggcctgctttctgctcgcgccagcagagcactacctgaggcagcgaggcgcagcgagcctagcctccccgcgccctgggcagtgtggccatggagaatcaggtgttgacgccgcatgtctactgggctcagcgacaccgcgagctatatctgcgcgtggagctgagtgacgtacagaaccctgccatcagcatcactgaaaacgtgctgcatttcaaagctcaaggacatggtgccaaaggagacaatgtctatgaatttcacctggagttcttagaccttgtgaaaccagagcctgtttacaaactgacccagaggcaggtaaacattacagtacagaagaaagtgagtcagtggtgggagagactcacaaagcaggaaaagcgaccactgtttttggctcctgactttgatcgttggctggatgaatctgatgcggaaatggagctcagagctaaggaagaagagcgcctaaataaactccgactggaaagcgaaggctctcctgaaactcttacaaacttaaggaaaggatacctgtttatgtataatcttgtgcaattcttgggattctcctggatctttgtcaacctgactgtgcgattctgtatcttgggaaaagagtccttttatgacacattccatactgtggctgacatgatgtatttctgccagatgctggcagttgtggaaactatcaatgcagcaattggagtcactacgtcaccggtgctgccttctctgatccagcttcttggaagaaattttattttgtttatcatctttggcaccatggaagaaatgcagaacaaagctgtggttttctttgtgttttatttgtggagtgcaattgaaattttcaggtactctttctacatgctgacgtgcattgacatggattggaaggtgctcacatggcttcgttacactctgtggattcccttatatccactgggatgtttggcggaagctgtctcagtgattcagtccattccaatattcaatgagaccggacgattcagtttcacattgccatatccagtgaaaatcaaagttagattttccttttttcttcagatttatcttataatgatatttttaggtttatacataaattttcgtcacctttataaacagcgcagacggcgctatggacaaaaaaagaaaaagatccactaaaaagaaagatttagatggcttcttgccagtttgagcctaatctgattcttacagttttaccttcttgaaccaatgtaaaagtttttttaatgttaaatgattaaattctcagtgaggctatcttccttttccccagtaacattcctgaatttactgttatcttattgtagtacttgcatgacatggattcctgatatctgatgagaggttcattcttgtgtattcagttaatgacaccaaaaggctcagcccaccccaaccctatctcatgttcagtctgtctaatacatgccagagatttttttttcaaaaagtgctttatccctacaatgtactgacagttcttacagttgagatttgttcttttcagctattgcttgtgaaaaaaagcaagactatgtcactctatagaaggctgttaaagtgactcaggcaggaattaattattctgtacctaaggggttacttgtttaatgggatggcattgactttttgaaaatcaagtggactgagtcattgataaaacatttctaagagtggggctagagaacatactttacatctgacatcctttggcctaacaacatctattattatagtgctcagcagtgtgggcattgaagaggcgcagaatgctttgaaagaaactaatcagaatcttggaacatcatgatcatgccattcttaagtaaatcaactattttcaacactgaagaaaaatgaaacattatttagaaaacaatgagattacaagttccaaactcagccaggaatgtggctcacacctgtaatcccagcactttgggacacctaggtgggagcatcgcttgaagccaggagttcaagaccagcttgggcaacgtagtgagacccctatctctacaaaaaataaaaaaattagctgggtgtgatggcacacacctgttgtcccagctactcaagaagctgagatgggaggatcctgagctcaggaggtcaaggctgcagtgagccgagattgtgccactgcactgcagctggggtgacagtgcaagaccctgtctcaaaccaaaccaaaccacacacacacaaacacacatacacacacacacacacgaggtccaaatggtagcagggatccaaagggaacacagtatgtaggtcaaactggcagtaacagtgtacagcctttgacaaactagaaatattagagtaggccaaacacacctccaaactgtaaggctgtgcacaaacataaaaaatggcagccttccatctcctgcactggctgagtccatttacttgtgtacttgttctagtgagtggtgggactgtacatttttgaatagacctcaaaaatacttcattctgctgctgttcagttggctttttaaacctgtctgcagtaggacactgaaaacagcaagaacttcggggtgaacacccgctgatcctttaacaaggatttctggcaggaaactcacaaaaaggagaactgaaaatttagacatacagttggccattgtaaaaaacatcagtttcctctcatacattccaagtaaaccaagtaaaataagtgttggagtaacacttgcataaaagaatttaaggagtgatagctctttctgttctgccattcccaacattcctgggggaaaggagactcaatgagttaatactatttcactgagcccaagatggaaacttggtttgacctaaaacatctgattaatataggctagctgatttctttgtttgtattgatttctgatattcttgcagctgactacgtgtaattgggcagatcagctttgcagtagattatgctgcatcctcgtggcaaaattctgtattcttagtgattgttacaaacccctttattgctgtctgagaaagtgaaagattgtgtatttctattaaaacatttacaatcaaaattaa

SEQ ID NO: 302037 - DNA, 3033 bp, Homo sapiens
agcgcggaggtgggcagatcacaaggtcaggagatcaagaccatcctggctaacatgaaccctgccatcagcatcactgaaaacgtgctgcatttcaaagctcaaggacatggtgccaaaggagacaatgtctatgaatttcacctggagttcttagaccttgtgaaaccagagcctgtttacaaactgacccagaggcaggtaaacattacagtacagaagaaagtgagtcagtggtgggagagactcacaaagcaggaaaagcgaccactgtttttggctcctgactttgatcgttggctggatgaatctgatgcggaaatggagctcagagctaaggaagaagagcgcctaaataaactccgactggaaagcgaaggctctcctgaaactcttacaaacttaaggaaaggatacctgtttatgtataatcttgtgcaattcttgggattctcctggatctttgtcaacctgactgtgcgattctgtatcttgggaaaagagtccttttatgacacattccatactgtggctgacatgatgtatttctgccagatgctggcagttgtggaaactatcaatgcagcaattggagtcactacgtcaccggtgctgccttctctgatccagcttcttggaagaaattttattttgtttatcatctttggcaccatggaagaaatgcagaacaaagctgtggttttctttgtgttttatttgtggagtgcaattgaaattttcaggtactctttctacatgctgacgtgcattgacatggattggaaggtgctcacatggcttcgttacactctgtggattcccttatatccactgggatgtttggcggaagctgtctcagtgattcagtccattccaatattcaatgagaccggacgattcagtttcacattgccatatccagtgaaaatcaaagttagattttccttttttcttcagatttatcttataatgatatttttaggtttatacataaattttcgtcacctttataaacagcgcagacggcgctatggacaaaaaaagaaaaagatccactaaaaagaaagatttagatggcttcttgccagtttgagcctaatctgattcttacagttttaccttcttgaaccaatgtaaaagtttttttaatgttaaatgattaaattctcagtgaggctatcttccttttccccagtaacattcctgaatttactgttatcttattgtagtacttgcatgacatggattcctgatatctgatgagaggttcattcttgtgtattcagttaatgacaccaaaaggctcagcccaccccaaccctatctcatgttcagtctgtctaatacatgccagagatttttttttcaaaaagtgctttatccctacaatgtactgacagttcttacagttgagatttgttcttttcagctattgcttgtgaaaaaaagcaagactatgtcactctatagaaggctgttaaagtgactcaggcaggaattaattattctgtacctaaggggttacttgtttaatgggatggcattgactttttgaaaatcaagtggactgagtcattgataaaacatttctaagagtggggctagagaacatactttacatctgacatcctttggcctaacaacatctattattatagtgctcagcagtgtgggcattgaagaggcgcagaatgctttgaaagaaactaatcagaatcttggaacatcatgatcatgccattcttaagtaaatcaactattttcaacactgaagaaaaatgaaacattatttagaaaacaatgagattacaagttccaaactcagccaggaatgtggctcacacctgtaatcccagcactttgggacacctaggtgggagcatcgcttgaagccaggagttcaagaccagcttgggcaacgtagtgagacccctatctctacaaaaaataaaaaaattagctgggtgtgatggcacacacctgttgtcccagctactcaagaagctgagatgggaggatcctgagctcaggaggtcaaggctgcagtgagccgagattgtgccactgcactgcagctggggtgacagtgcaagaccctgtctcaaaccaaaccaaaccacacacacacaaacacacatacacacacacacacacgaggtccaaatggtagcagggatccaaagggaacacagtatgtaggtcaaactggcagtaacagtgtacagcctttgacaaactagaaatattagagtaggccaaacacacctccaaactgtaaggctgtgcacaaacataaaaaatggcagccttccatctcctgcactggctgagtccatttacttgtgtacttgttctagtgagtggtgggactgtacatttttgaatagacctcaaaaatacttcattctgctgctgttcagttggctttttaaacctgtctgcagtaggacactgaaaacagcaagaacttcggggtgaacacccgctgatcctttaacaaggatttctggcaggaaactcacaaaaaggagaactgaaaatttagacatacagttggccattgtaaaaaacatcagtttcctctcatacattccaagtaaaccaagtaaaataagtgttggagtaacacttgcataaaagaatttaaggagtgatagctctttctgttctgccattcccaacattcctgggggaaaggagactcaatgagttaatactatttcactgagcccaagatggaaacttggtttgacctaaaacatctgattaatataggctagctgatttcttaaaaattcgttgcattgaaggatattttgcatgtctgtaacacctgtcaatacttgtttgtattgatttctgatattcttgcagctgactacgtgtaattgggcagatcagctttgcagtagattatgctgcatcctcgtggcaaaattctgtattcttagtgattgttacaaacccctttattgctgtctgagaaagtgaaagattgtgtatttctattaaaacatttacaatcaaaattaa

SEQ ID NO: 302038 - DNA, 3148 bp, Homo sapiens
agcgggtcactgcgcaggcgcggcccgggagcgtggggtatctcgaggtgccgggttgcaggcgctcaggagcgctagggtttgaggcctgctttctgctcgcgccagcagagcactacctgaggcacgacaccgcgagctatatctgcgcgtggagctgagtgacgtacagaaccctgccatcagcatcactgaaaacgtgctgcatttcaaagctcaaggacatggtgccaaaggagacaatgtctatgaatttcacctggagttcttagaccttgtgaaaccagagcctgtttacaaactgacccagaggcaggtaaacattacagtacagaagaaagtgagtcagtggtgggagagactcacaaagcaggaaaagcgaccactgtttttggctcctgactttgatcgttggctggatgaatctgatgcggaaatggagctcagagctaaggaagaagagcgcctaaataaactccgactggaaagcgaaggctctcctgaaactcttacaaacttaaggaaaggatacctgtttatgtataatcttgtgcaattcttgggattctcctggatctttgtcaacctgactgtgcgattctgtatcttgggaaaagagtccttttatgacacattccatactgtggctgacatgatgtatttctgccagatgctggcagttgtggaaactatcaatgcagcaattggagtcactacgtcaccggtgctgccttctctgatccagcttcttggaagaaattttattttgtttatcatctttggcaccatggaagaaatgcagaacaaagctgtggttttctttgtgttttatttgtggagtgcaattgaaattttcaggtactctttctacatgctgacgtgcattgacatggattggaaggtgctcacatggcttcgttacactctgtggattcccttatatccactgggatgtttggcggaagctgtctcagtgattcagtccattccaatattcaatgagaccggacgattcagtttcacattgccatatccagtgaaaatcaaagttagattttccttttttcttcagatttatcttataatgatatttttaggtttatacataaattttcgtcacctttataaacagcgcagacggcgctatggacaaaaaaagaaaaagatccactaaaaagaaagatttagatggcttcttgccagtttgagcctaatctgattcttacagttttaccttcttgaaccaatgtaaaagtttttttaatgttaaatgattaaattctcagtgaggctatcttccttttccccagtaacattcctgaatttactgttatcttattgtagtacttgcatgacatggattcctgatatctgatgagaggttcattcttgtgtattcagttaatgacaccaaaaggctcagcccaccccaaccctatctcatgttcagtctgtctaatacatgccagagatttttttttcaaaaagtgctttatccctacaatgtactgacagttcttacagttgagatttgttcttttcagctattgcttgtgaaaaaaagcaagactatgtcactctatagaaggctgttaaagtgactcaggcaggaattaattattctgtacctaaggggttacttgtttaatgggatggcattgactttttgaaaatcaagtggactgagtcattgataaaacatttctaagagtggggctagagaacatactttacatctgacatcctttggcctaacaacatctattattatagtgctcagcagtgtgggcattgaagaggcgcagaatgctttgaaagaaactaatcagaatcttggaacatcatgatcatgccattcttaagtaaatcaactattttcaacactgaagaaaaatgaaacattatttagaaaacaatgagattacaagttccaaactcagccaggaatgtggctcacacctgtaatcccagcactttgggacacctaggtgggagcatcgcttgaagccaggagttcaagaccagcttgggcaacgtagtgagacccctatctctacaaaaaataaaaaaattagctgggtgtgatggcacacacctgttgtcccagctactcaagaagctgagatgggaggatcctgagctcaggaggtcaaggctgcagtgagccgagattgtgccactgcactgcagctggggtgacagtgcaagaccctgtctcaaaccaaaccaaaccacacacacacaaacacacatacacacacacacacacgaggtccaaatggtagcagggatccaaagggaacacagtatgtaggtcaaactggcagtaacagtgtacagcctttgacaaactagaaatattagagtaggccaaacacacctccaaactgtaaggctgtgcacaaacataaaaaatggcagccttccatctcctgcactggctgagtccatttacttgtgtacttgttctagtgagtggtgggactgtacatttttgaatagacctcaaaaatacttcattctgctgctgttcagttggctttttaaacctgtctgcagtaggacactgaaaacagcaagaacttcggggtgaacacccgctgatcctttaacaaggatttctggcaggaaactcacaaaaaggagaactgaaaatttagacatacagttggccattgtaaaaaacatcagtttcctctcatacattccaagtaaaccaagtaaaataagtgttggagtaacacttgcataaaagaatttaaggagtgatagctctttctgttctgccattcccaacattcctgggggaaaggagactcaatgagttaatactatttcactgagcccaagatggaaacttggtttgacctaaaacatctgattaatataggctagctgatttcttaaaaattcgttgcattgaaggatattttgcatgtctgtaacacctgtcaatacttgtttgtattgatttctgatattcttgcagctgactacgtgtaattgggcagatcagctttgcagtagattatgctgcatcctcgtggcaaaattctgtattcttagtgattgttacaaacccctttattgctgtctgagaaagtgaaagattgtgtatttctattaaaacatttacaatcaaaattaa

SEQ ID NO: 302039 - DNA, 3126 bp, Homo sapiens
agcgggtcactgcgcaggcgcggcccgggagcgtggggtatctcgaggtgccgggttgcaggcgctcaggagcgctagggtttgaggcctgctttctgctcgcgccagcagagcactacctgaggcagcgaggcgcagcgagcctagcctccccgcgccctgggcagtgtggccatggagaatcaggtgttgacgccgcatgtctactgggctcagcgacaccgcgagctatatctgcgcgtggagctgagtgacgtacagaaccctgccatcagcatcactgaaaacgtgctgcatttcaaagctcaaggacatggtgccaaaggagacaatgtctatgaatttcacctggagttcttagaccttgtgaaaccagagcctgtttacaaactgacccagaggcaggtaaacattacagtacagaagaaagtgagtcagtggtgggagagactcacaaagcaggaaaagcgaccactgtttttggctcctgactttgatcgttggctggatgaatctgatgcggaaatggagctcagagctaaggaagaagagcgcctaaataaactccgactggaaagcgaaggctctcctgaaaagtccttttatgacacattccatactgtggctgacatgatgtatttctgccagatgctggcagttgtggaaactatcaatgcagcaattggagtcactacgtcaccggtgctgccttctctgatccagcttcttggaagaaattttattttgtttatcatctttggcaccatggaagaaatgcagaacaaagctgtggttttctttgtgttttatttgtggagtgcaattgaaattttcaggtactctttctacatgctgacgtgcattgacatggattggaaggtgctcacatggcttcgttacactctgtggattcccttatatccactgggatgtttggcggaagctgtctcagtgattcagtccattccaatattcaatgagaccggacgattcagtttcacattgccatatccagtgaaaatcaaagttagattttccttttttcttcagatttatcttataatgatatttttaggtttatacataaattttcgtcacctttataaacagcgcagacggcgctatggacaaaaaaagaaaaagatccactaaaaagaaagatttagatggcttcttgccagtttgagcctaatctgattcttacagttttaccttcttgaaccaatgtaaaagtttttttaatgttaaatgattaaattctcagtgaggctatcttccttttccccagtaacattcctgaatttactgttatcttattgtagtacttgcatgacatggattcctgatatctgatgagaggttcattcttgtgtattcagttaatgacaccaaaaggctcagcccaccccaaccctatctcatgttcagtctgtctaatacatgccagagatttttttttcaaaaagtgctttatccctacaatgtactgacagttcttacagttgagatttgttcttttcagctattgcttgtgaaaaaaagcaagactatgtcactctatagaaggctgttaaagtgactcaggcaggaattaattattctgtacctaaggggttacttgtttaatgggatggcattgactttttgaaaatcaagtggactgagtcattgataaaacatttctaagagtggggctagagaacatactttacatctgacatcctttggcctaacaacatctattattatagtgctcagcagtgtgggcattgaagaggcgcagaatgctttgaaagaaactaatcagaatcttggaacatcatgatcatgccattcttaagtaaatcaactattttcaacactgaagaaaaatgaaacattatttagaaaacaatgagattacaagttccaaactcagccaggaatgtggctcacacctgtaatcccagcactttgggacacctaggtgggagcatcgcttgaagccaggagttcaagaccagcttgggcaacgtagtgagacccctatctctacaaaaaataaaaaaattagctgggtgtgatggcacacacctgttgtcccagctactcaagaagctgagatgggaggatcctgagctcaggaggtcaaggctgcagtgagccgagattgtgccactgcactgcagctggggtgacagtgcaagaccctgtctcaaaccaaaccaaaccacacacacacaaacacacatacacacacacacacacgaggtccaaatggtagcagggatccaaagggaacacagtatgtaggtcaaactggcagtaacagtgtacagcctttgacaaactagaaatattagagtaggccaaacacacctccaaactgtaaggctgtgcacaaacataaaaaatggcagccttccatctcctgcactggctgagtccatttacttgtgtacttgttctagtgagtggtgggactgtacatttttgaatagacctcaaaaatacttcattctgctgctgttcagttggctttttaaacctgtctgcagtaggacactgaaaacagcaagaacttcggggtgaacacccgctgatcctttaacaaggatttctggcaggaaactcacaaaaaggagaactgaaaatttagacatacagttggccattgtaaaaaacatcagtttcctctcatacattccaagtaaaccaagtaaaataagtgttggagtaacacttgcataaaagaatttaaggagtgatagctctttctgttctgccattcccaacattcctgggggaaaggagactcaatgagttaatactatttcactgagcccaagatggaaacttggtttgacctaaaacatctgattaatataggctagctgatttcttaaaaattcgttgcattgaaggatattttgcatgtctgtaacacctgtcaatacttgtttgtattgatttctgatattcttgcagctgactacgtgtaattgggcagatcagctttgcagtagattatgctgcatcctcgtggcaaaattctgtattcttagtgattgttacaaacccctttattgctgtctgagaaagtgaaagattgtgtatttctattaaaacatttacaatcaaaattaa

SEQ ID NO: 302040 - DNA, 2798 bp, Homo sapiens
agcgggtcactgcgcaggcgcggcccgggagcgtggggtatctcgaggtgccgggttgcaggcgctcaggagcgctagggtttgaggcctgctttctgctcgcgccagcagagcactacctgaggcagcgaggcgcagcgagcctagcctccccgcgccctgggcagtgtggccatggagaatcaggtgttgacgccgcatgtctactgggctcagcgacaccgcgagctatatctgcgcgtggagctgagtgacgtacagaaccctgccatcagcatcactgaaaacgtgctgcatttcaaagctcaaggacatggtgccaaaggagacaatgtctatgaatttcacctggagttcttagaccttgtgaaaccagagcctgtttacaaactgacccagaggcaggtaaacattacagtacagaagaaagtgagtcagtggtgggagagactcacaaagcaggaaaagcgaccactgtttttggctcctgactttgatcgttggctggatgaatctgatgcggaaatggagctcagagctaaggaagaagagcgcctaaataaactccgactggaaagcgaaggctctcctgaaactcttacaaacttaaggaaaggatacctgtttatgtataatcttgtgcaattcttgggattctcctggatctttgtcaacctgactgtgcgattctgtatcttgggaaaagagtccttttatgacacattccatactgtggctgacatgatgtatttctgccagatgctggcagttgtggaaactatcaatgcagcaattggagtcactacgtcaccggtgctgccttctctgatccagcttcttggaagaaattttattttgtttatcatctttggcaccatggaagaaatgcagaacaaagctgtggttttctttgtgttttatttgtggagtgcaattgaaattttcaggtactctttctacatgctgacgtgcattgacatggattggaaggtgctcacatggcttcgttacactctgtggattcccttatatccactgggatgtttggcggaagctgtctcagtgattcagtccattccaatattcaatgagaccggacgattcagtttcacattgccatatccagtgaaaatcaaagttagattttccttttttcttcagatttatcttataatgatatttttaggtttatacataaattttcgtcacctttataaacagcgcagacggcgctatggacaaaaaaagaaaaagatccactaaaaagaaagatttagatggcttcttgccagtttgagcctaatctgattcttacagttttaccttcttgaaccaatgtaaaagtttttttaatgttaaatgattaaattctcagtgaggctatcttccttttccccagtaacattcctgaatttactgttatcttattgtagtacttgcatgacatggattcctgatatctgatgagaggttcattcttgtgtattcagttaatgacaccaaaaggctcagcccaccccaaccctatctcatgttcagtctgtctaatacatgccagagatttttttttcaaaaagtgctttatccctacaatgtactgacagttcttacagttgagatttgttcttttcagctattgcttgtgaaaaaaagcaagactatgtcactctatagaaggctgttaaagtgactcaggcaggaattaattattctgtacctaaggggttacttgtttaatgggatggcattgactttttgaaaatcaagtggactgagtcattgataaaacatttctaagagtggggctagagaacatactttacatctgacatcctttggcctaacaacatctattattatagtgctcagcagtgtgggcattgaagaggcgcagaatgctttgaaagaaactaatcagaatcttggaacatcatgatcatgccattcttaagtaaatcaactattttcaacactgaagaaaaatgaaacattatttagaaaacaatgagattacaagttccaaactcagccaggaatgtggctcacacctgtaatcccagcactttgggacacctaggtgggagcatcgcttgaagccaggagttcaagaccagcttgggcaacgtagtgagacccctatctctacaaaaaataaaaaaattagctgggtgtgatggcacacacctgttgtcccagctactcaagaagctgagatgggaggatcctgagctcaggaggtcaaggctgcagtgagccgagattgtgccactgcactgcagctggggtgacagtgcaagaccctgtctcaaaccaaaccaaaccacacacacacaaacacacatacacacacacacacacgaggtccaaatggtagcagggatccaaagggaacacagtatgtaggtcaaactggcagtaacagtgtacagcctttgacaaactagaaatattagagtaggccaaacacacctccaaactgtaaggctgtgcacaaacataaaaaatggcagccttccatctcctgcactggctgagtccatttacttgtgtacttgttctagtgagtggtgggactgtacatttttgaatagacctcaaaaatacttcattctgctgctgttcagttggctttttaaacctgtctgcagtaggacactgaaaacagcaagaacttcggggtgaacacccgctgatcctttaacaaggatttctggcaggaaactcacaaaaaggagaactgaaaatttagacatacagttggcccttatcgagagcccttattggccctttcggggtgg

SEQ ID NO: 302041 - DNA, 2337 bp, Homo sapiens
tctgctccaagctcactcttgtggctgttgacaggaagcttcagtttcttgccatagcccgtctccatatggctactcatggcatggcttcccccaaagcaattggttagagagagagagcccgaagccacagtgcctaatctcagaagtgacaaatcatcacacagaccaacccagtataacatgggaggggactacacaaaggtatgaaataacaggagatagaggttgttgggatcattgtcacggcttgctaccccagacagtgagaggaagaccacgcaaggtttatacataaattttcgtcacctttataaacagcgcagacggcgctatggacaaaaaaagaaaaagatccactaaaaagaaagatttagatggcttcttgccagtttgagcctaatctgattcttacagttttaccttcttgaaccaatgtaaaagtttttttaatgttaaatgattaaattctcagtgaggctatcttccttttccccagtaacattcctgaatttactgttatcttattgtagtacttgcatgacatggattcctgatatctgatgagaggttcattcttgtgtattcagttaatgacaccaaaaggctcagcccaccccaaccctatctcatgttcagtctgtctaatacatgccagagatttttttttcaaaaagtgctttatccctacaatgtactgacagttcttacagttgagatttgttcttttcagctattgcttgtgaaaaaaagcaagactatgtcactctatagaaggctgttaaagtgactcaggcaggaattaattattctgtacctaaggggttacttgtttaatgggatggcattgactttttgaaaatcaagtggactgagtcattgataaaacatttctaagagtggggctagagaacatactttacatctgacatcctttggcctaacaacatctattattatagtgctcagcagtgtgggcattgaagaggcgcagaatgctttgaaagaaactaatcagaatcttggaacatcatgatcatgccattcttaagtaaatcaactattttcaacactgaagaaaaatgaaacattatttagaaaacaatgagattacaagttccaaactcagccaggaatgtggctcacacctgtaatcccagcactttgggacacctaggtgggagcatcgcttgaagccaggagttcaagaccagcttgggcaacgtagtgagacccctatctctacaaaaaataaaaaaattagctgggtgtgatggcacacacctgttgtcccagctactcaagaagctgagatgggaggatcctgagctcaggaggtcaaggctgcagtgagccgagattgtgccactgcactgcagctggggtgacagtgcaagaccctgtctcaaaccaaaccaaaccacacacacacaaacacacatacacacacacacacacgaggtccaaatggtagcagggatccaaagggaacacagtatgtaggtcaaactggcagtaacagtgtacagcctttgacaaactagaaatattagagtaggccaaacacacctccaaactgtaaggctgtgcacaaacataaaaaatggcagccttccatctcctgcactggctgagtccatttacttgtgtacttgttctagtgagtggtgggactgtacatttttgaatagacctcaaaaatacttcattctgctgctgttcagttggctttttaaacctgtctgcagtaggacactgaaaacagcaagaacttcggggtgaacacccgctgatcctttaacaaggatttctggcaggaaactcacaaaaaggagaactgaaaatttagacatacagttggccattgtaaaaaacatcagtttcctctcatacattccaagtaaaccaagtaaaataagtgttggagtaacacttgcataaaagaatttaaggagtgatagctctttctgttctgccattcccaacattcctgggggaaaggagactcaatgagttaatactatttcactgagcccaagatggaaacttggtttgacctaaaacatctgattaatataggctagctgatttcttaaaaattcgttgcattgaaggatattttgcatgtctgtaacacctgtcaatacttgtttgtattgatttctgatattcttgcagctgactacgtgtaattgggcagatcagctttgcagtagattatgctgcatcctcgtggcaaaattctgtattcttagtgattgttacaaacccctttattgctgtctgagaaagtgaaagattgtgtatttctattaaaacatttacaatcaaaattaa

SEQ ID NO: 302042 - DNA, 2002 bp, Homo sapiens
agtatttacatcggttcaagaaggtacaactgtaagaatcagattaggctcaaactggcgagaagccatctacatctttcagttttaccttcttgaaccaatgtaaaagtttttttaatgttaaatgattaaattctcagtgaggctatcttccttttccccagtaacattcctgaatttactgttatcttattgtagtacttgcatgacatggattcctgatatctgatgagaggttcattcttgtgtattcagttaatgacaccaaaaggctcagcccaccccaaccctatctcatgttcagtctgtctaatacatgccagagatttttttttcaaaaagtgctttatccctacaatgtactgacagttcttacagttgagatttgttcttttcagctattgcttgtgaaaaaaagcaagactatgtcactctatagaaggctgttaaagtgactcaggcaggaattaattattctgtacctaaggggttacttgtttaatgggatggcattgactttttgaaaatcaagtggactgagtcattgataaaacatttctaagagtggggctagagaacatactttacatctgacatcctttggcctaacaacatctattattatagtgctcagcagtgtgggcattgaagaggcgcagaatgctttgaaagaaactaatcagaatcttggaacatcatgatcatgccattcttaagtaaatcaactattttcaacactgaagaaaaatgaaacattatttagaaaacaatgagattacaagttccaaactcagccaggaatgtggctcacacctgtaatcccagcactttgggacacctaggtgggagcatcgcttgaagccaggagttcaagaccagcttgggcaacgtagtgagacccctatctctacaaaaaataaaaaaattagctgggtgtgatggcacacacctgttgtcccagctactcaagaagctgagatgggaggatcctgagctcaggaggtcaaggctgcagtgagccgagattgtgccactgcactgcagctggggtgacagtgcaagaccctgtctcaaaccaaaccaaaccacacacacacaaacacacatacacacacacacacacgaggtccaaatggtagcagggatccaaagggaacacagtatgtaggtcaaactggcagtaacagtgtacagcctttgacaaactagaaatattagagtaggccaaacacacctccaaactgtaaggctgtgcacaaacataaaaaatggcagccttccatctcctgcactggctgagtccatttacttgtgtacttgttctagtgagtggtgggactgtacatttttgaatagacctcaaaaatacttcattctgctgctgttcagttggctttttaaacctgtctgcagtaggacactgaaaacagcaagaacttcggggtgaacacccgctgatcctttaacaaggatttctggcaggaaactcacaaaaaggagaactgaaaatttagacatacagttggccattgtaaaaaacatcagtttcctctcatacattccaagtaaaccaagtaaaataagtgttggagtaacacttgcataaaagaatttaaggagtgatagctctttctgttctgccattcccaacattcctgggggaaaggagactcaatgagttaatactatttcactgagcccaagatggaaacttggtttgacctaaaacatctgattaatataggctagctgatttcttaaaaattcgttgcattgaaggatattttgcatgtctgtaacacctgtcaatacttgtttgtattgatttctgatattcttgcagctgactacgtgtaattgggcagatcagctttgcagtagattatgctgcatcctcgtggcaaaattctgtattcttagtgattgttacaaacccctttattgctgtctgagaaagtgaaagattgtgtatttctattaaaacatttacaatcaaaattaa

SEQ ID NO: 302043 - DNA, 1749 bp, Homo sapiens
  misc_feature (1396)..(1396): n is a, c, g, or t
agcgggtcactgcgcaggcgcggcccgggagcgtggggtatctcgaggtgccgggttgcaggcgctcaggagcgctagggtttgaggcctgctttctgctcgcgccagcagagcactacctgaggcagcgaggcgcagcgagcctagcctccccgcgccctgggcagtgtggccatggagaatcaggtgttgacgccgcatgtctactgggctcagcgacaccgcgagctatatctgcgcgtggagctgagtgacgtacagaaccctgccatcagcatcactgaaaacgtgctgcatttcaaagctcaaggacatggtgccaaaggagacaatgtctatgaatttcacctggagttcttagaccttgtgaaaccagagcctgtttacaaactgacccagaggcaggtaaacattacagtacagaagaaagtgagtcagtggtgggagagactcacaaagcaggaaaagcgaccactgtttttggctcctgactttgatcgttggctggatgaatctgatgcggaaatggagctcagagctaaggaagaagagcgcctaaataaactccgactggaaagcgaaggctctcctgaaactcttacaaacttaaggaaaggatacctgtttatgtataatcttgtgcaattcttgggattctcctggatctttgtcaacctgactgtgcgattctgtatcttgggaaaagagtccttttatgacacattccatactgtggctgacatgatgtatttctgccagatgctggcagttgtggaaactatcaatgcagcaattggagtcactacgtcaccggtgctgccttctctgatccagcttcttggaagaaattttattttgtttatcatctttggcaccatggaagaaatgcagaacaaagctgtggttttctttgtgttttatttgtggagtgcaattgaaattttcaggtactctttctacatgctgacgtgcattgacatggattggaaggtgctcacatggcttcgttacactctgtggattcccttatatccactgggatgtttggcggaagctgtctcagtgattcagtccattccaatattcaatgagaccggacgattcagtttcacattgccatatccagtgaaaatcaaagttagattttccttttttcttcagatttatcttataatgatatttttaggtttatacataaattttcgtcacctttataaacagcgcagacggcgctatggacaaaaaaagaaaaagatccactaaaaagaaagatttagatggcttcttgccagtttgagcctaatctgattcttacagttttaccttcttgaaccaatgtaaaagtttttttaatgttaaatgattaaattctcagtgaggctaaaaaaaaaaaaanaaaaaaaaaaaaaaaaaaaaaaaaaaaaaaaaaaaaaaaaaaaaaaaaagggggggggggcgcgcgcacaaagagaagaatatctcccgcgcagggggggcgccaccaataggcgcgcgcgccaccgccacagatttgtgttgaaacaagagagggcggccccatatgagaggaggagcgcggctaattaataaacgaggcggagcgcgcgggggcgcggcggttacacacaacgacgcgggaggagggggagaacaagagcggcggacgcgggggcgactctgtgaggaaggaggacgacacctactccgggggggggggggagaacaaataggggggacacaccaccccag

SEQ ID NO: 302044 - DNA, 1287 bp, Homo sapiens
agcgggtcactgcgcaggcgcggcccgggagcgtggggtatctcgaggtgccgggttgcaggcgctcaggagcgctagggtttgaggcctgctttctgctcgcgccagcagagcactacctgaggcagcgaggcgcagcgagcctagcctccccgcgccctgggcagtgtggccatggagaatcaggtgttgacgccgcatgtctactgggctcagcgacaccgcgagctatatctgcgcgtggagctgagtgacgtacagaaccctgccatcagcatcactgaaaacgtgctgcatttcaaagctcaaggacatggtgccaaaggagacaatgtctatgaatttcacctggagttcttagaccttgtgaaaccagagcctgtttacaaactgacccagaggcaggtaaacattacagtacagaagaaagtgagtcagtggtgggagagactcacaaagcaggaaaagcgaccactgtttttggctcctgactttgatcgttggctggatgaatctgatgcggaaatggagctcagagctaaggaagaagagcgcctaaataaactccgactggaaagcgaaggctctcctgaaactcttacaaacttaaggaaaggatacctgtttatgtataatcttgtgcaattcttgggattctcctggatctttgtcaacctgactgtgcgattctgtatcttgggaaaagagtccttttatgacacattccatactgtggctgacatgatgtatttctgccagatgctggcagttgtggaaactatcaatgcagcaattggagtcactacgtcaccggtgctgccttctctgatccagcttcttggaagaaattttattttgtttatcatctttggcaccatggaagaaatgcagaacaaagctgtggttttctttgtgttttatttgtggagtgcaattgaaattttcaggtactctttctacatgctgacgtgcattgacatggattggaaggtgctcacatggcttcgttacactctgtggattcccttatatccactgggatgtttggcggaagctgtctcagtgattcagtccattccaatattcaatgagaccggacgattcagtttcacattgccatatccagtgaaaatcaaagttagattttccttttttcttcagatttatcttataatgatatttttaggtttatacataaattttcgtcacctttataaacagcgcagactgaaaatgagggcaggcgcagtggctcatgcctgtgatcccagcgctttgggaggctga

SEQ ID NO: 302045 - DNA, 947 bp, Homo sapiens
agcgggtcactgcgcaggcgcggcccgggagcgtggggtatctcgaggtgccgggttgcaggcgctcaggagcgctagggtttgaggcctgctttctgctcgcgccagcagagcactacctgaggcagcgaggcgcagcgagcctagcctccccgcgccctgggcagtgtggccatggagaatcaggtgttgacgccgcatgtctactgggctcagcgacaccgcgagctatatctgcgcgtggagctgagtgacgtacagaaccctgccatcagcatcactgaaaacgtgctgcatttcaaagctcaaggacatggtgccaaaggagacaatgtctatgaatttcacctggagttcttagaccttgtgaaaccagagcctgtttacaaactgacccagaggcaggtaaacattacagtacagaagaaagtgagtcagtggtgggagagactcacaaagcaggaaaagcgaccactgtttttggctcctgactttgatcgttggctggatgaatctgatgcggaaatggagctcagagctaaggttagtaaggatcctaggatctagccattgaggacaaatcatggggaacccacgttattcaggccacttcagatacctctcggtctgaaagaatagctacaaagttacaaattcatttaaagacctggtgatgtgattttcaagaagtattggctatgtattttatagactttccttcggttgaaatctgtctgatgtttctcttacaactagactaaggtgatagatgttgaggagaagaccactgaagtaaagtgcaattcttatcacatcatatcaagagtacatacggccgggcacggtggctcacgcctgtaatcccagcactttgggaggccaaggtgcgtggatcacgaggtcaggagattgagaccatcctggctagcacagtgaaaccctgtctc

SEQ ID NO: 302046 - DNA, 524 bp, Homo sapiens
agcgggtcactgcgcaggcgcggcccgggagcgtggggtatctcgaggtgccgggttgcaggcgctcaggagcgctagggtttgaggcctgctttctgctcgcgccagcagagcactacctgaggcagcgaggcgcagcgagcctagcctccccgcgccctgggcagtgtggccatggagaatcaggtgttgacgccgcatgtctactgggctcagcgacaccgcgagctatatctgcgcgtggagctgagtgacgtacagaaccctgccatcagcatcactgaaaacgtgctgcatttcaaaggtcagtatcccagcaaatgctcccatctctatacacagttaaggaggtgtggtggtggtttcccttttttaaaaaaatgtatttgtcttacttgttttttgctgatgttcacgcctctgatcctcatgaggtaagctaaattgttttgaaatatatgattagaaaagtcaaagaattggtttaaaatcctgtttcccccatggagaggcagtagatacag

SEQ ID NO: 302047 - DNA, 212 bp, Homo sapiens
gccatgtgtggctgagaaatagaattcttctatttaaatgatattctaaggttgcattcggaacctgaagtggcttttcacattggaatcatttattttcaataggtactctttctacatgctgacgtgcattgacatggattggaaggtgctcacatggcttcgttacactctgtggattcccttatatccactgggatgtttggcggaag

SEQ ID NO: 302048 - DNA, 388 bp, Homo sapiens
aaactttatggtggggatgagtggatggggcaagggtttggggagcaatgatcaactgggtaaaatcctggggagtggcaattgagtgggaagggagtcaagaagtgtttagggaaggatgtcggggaagtgagtaataggtaggtcagaggatggagcaagggaatgttgaaaggcaacggatatgctctgtggacaggtggcaaaatatctgaatgggggcccagggagggctactatggagtaacagggaagggaccctgaggtgctgatttctcagagatagacaatgggattggatatgtgttggtggaggaatgcagaaagcccaggccaactccgaatgccattcatttacatgaaatccctctttatgcctccaccatct

SEQ ID NO: 302049 - DNA, 495 bp, Homo sapiens
gtggtggcgtgtgcctatagtcccagctacttgggaggcggaggtgggaggatcacctgagcccgaaggtcaaggctgcagtgagccgtgattgtgccactgcactccagtctgggtgacagagcaagaccctgtctcaaaaaataaaaacaaaatatcattttttacttaccaagttggcacaaataaaactgataatattcagtgctgatgacagggtaaggaagtagaaattctcaatcactgctggtggaagtataaatgatgtaaccttttggggaagcaacctggtaatagctataaaaatgcaatatgcacgtggtctttaatccagaaattccaagttcagaaatctttcatacaagagtaaaattagcaataaggggccgggcatggtggctcatgcctataatcccagcactttgggaagccgaggcgggtggatcacaaggtcaggagtttgagaccagcctggccaatatggtgaaaccctgt

SEQ ID NO: 302050 - DNA, 711 bp, Homo sapiens
tatataaatatcctcccttgttcatgtgctttggcacgcatatgcaaaagtttctgtaaggagttaaattgcttcgtcattccttatgagtattttcatctttattaaatattgccacattgtttttgcagagtggctgtactggtttacagcctcatcagcaggataggtccccttggcgggattccagtctgcccctttggggaggagggtgtagcagggagagaaataaggctggcaaggaatgagaaagccaggcaggagaacaccattagtgccaatccaaggagttcagactgtatttgactgcattgggaagctactggcaattctggaacagggaacaaaatgcaaaaacagggttttgggaaggttagtctttaaagctgtctcttggtttgtgttggcagttggtagtgatagtggtggggttgacttaggccagcagcaggactcaagctcacaggagagagatctgtagggtgacagcacaaaggggacagtgagcacatccctgggggcagaaaaccagagcatcccagatctcccaactcttatccttaaataatccagttagacacacacactgctagtaggtgtgtgaagtgctacagccactctggaaaacaatgtggccgtatttaacaaagataaatatgcacatactgaatggcccacaagttgtaaaatataccaagcaaaacaaacagg

SEQ ID NO: 302051 - DNA, 2149 bp, Homo sapiens
gcgcctgcctcgcagagcttccgcttccggcccttcaggctctgtctctgtggagactgggctttgggagggagaaagagggacctagcgcgggccgcgcaggcgcacggtgggcagctgcaatggcgctgtcgtgtacccttaacaggtatctgctcctcatggcgcaggagcatctggagttccgcctgccggaaataaagtctttgcttttgctttttggaggtcagtttgccagcagtcaagaaacttatggaaagtcaccattttggattcttagcattccctctgaagatattgcaagaaatttgatgaaacggacagtgtgtgccaagtctatatttgaactatggggtcatggacaatctcctgaggagctgtacagttctcttaaaaactaccctgtggagaagatggttccatttctacattcggactctacatataaaataaagattcacacttttaataagacattgacacaagaagagaaaatcaagcgaatagatgcacttgaatttctgccatttgaaggaaaagtgaatttaaagaaaccgcaacatgtattttctgttttggaggattatggtttagacccaaactgcatccctgagaatccacataatatttattttggtagatggattgcagatggacagagagagcttattgagtcatacagtgtcaaaaagagacactttattggaaatacaagtatggatgctggtttgtcattcattatggctaaccatggaaaagtgaaagaaaatgatattgtctttgatccatttgttggaacaggtggcctgctgatagcatgtgctcattttggtgcatatgtgtatgggacagacatagactacaacacagttcatggcttggcctgctcaacatgaaggtgatgaggatgaagacctttatgatgatccacttccacttcatgaatagtaaatctatttttactgaataaagtaattatggaaaatattttaaactctagaagcttcaataatgatgtgtgattggatggaattgaatcaaactgaaaaagtatttcttatagcttaatggaaaggctactaggaaaaaccagaagtggagaggaccagatgaaaacattagggccaatcttcgtcaatatggtttagagaagtattaccttgatgtcctggtttcagatgcatctaaaccttcctggaggaagggcacatattttgatgcaatcattactgatcctccatatggtatcagagaatctacaagaagaacaggttcacagaaggagataccaaaggggatagaaaaatgggaaaaatgtccagaaagccatgttcctgtttccttgagttatcatctgagtgatatgtttcttgacctgttaaacttcgcagctgagaccctcgttttaggtggaagactagtctattggttaccggtgtatacgccagaatacactgaagagatggtgccttggcacccttgcctggaactcgttagcaactgcgagcagaagctttccagtcacacatcaaggcgcttgatcacaatggaaaaggtgaagaaatttgagaatcgggaccagtattcacatctgctaagtgatcattttctgccataccaaggtcataattccttccgtgagaaatattttagtggggtaacaaaaagaattgccaaggaagaaaaatccacccaggaatgaaaattaagattttgacaatgaagaaagaataagaatttgatttaaaaagacatctggatgtgaactttcatgtatgatccagaaaataggtacggttttaaaatattttatatagaaaagctacaaagtaaattgagcaatgcttttaaagttatctttgttttatagacttttttgttgtatgtattacagtctttataatcttatttaatgtatatttgtactttcaagtactgatggagatagactcaaaacagttatttttttacaattaatctacaaagggaattaatattgttgacttttaaaacatctgctggatatattatatgcaattaatagtagttaagaatttattcatttggtagatatgtttatttggtttttggttgtcatcgatttacattgccactaataaaccatattgagaatttctaaaaaaaaaca

SEQ ID NO: 302052 - DNA, 972 bp, Homo sapiens
  misc_feature (789)..(789): n is a, c, g, or t
tcttatcttctcgtagcgtttctaaagtgtggtgagtagtgggactgccttcaaatcgggaccagtattcacatctgctaagtgatcattttctgccataccaaggtcataattccttccgtgagaaatattttagtggggtaacaaaaagaattgccaaggaagaaaaatccacccaggaatgaaaattaagattttgacaatgaagaaagaataagaatttgatttaaaaagacatctggatgtgaactttcatgtatgatccagaaaatagaggagaagacagtgggagagcaagagcagattgataagcataagagtgagtctgataatgagaatatgacagatatggatcaccctgagacctgggactggatacatggatgagactctagcacctattggtaaatacaggtttacaaacacctttaagatggatggactaaatagcaaggtaggctcgaagtctgataaggataacggggggggccttcatttatggtccatatgtcgaacatttgtcggtatttcatatttcctagtgtagatgccaatcctgaaggacaatcgaggtggtttgcttatacctataattacggttcaccgggctcaatcttgaattatggggatcatgtcagagttaattcgggcgctcaatataacagttttgtctagttagttataacacgaaaccgtgtgatcatgtagacagtccgtactgaaagcatgttgagctcaaatcgatgttgaggagccagaggtgaatgcagatggcacactccaccagantctcctagtaatatagcgactggagcgtatatcgtgagtctctaatgtagagtagatatgattgtgtttagctatacactctcttcattaactggagctgtaccacactagatggtgttatatatacaatgacatactcaccgaagatgcaggtcggtccagacagccgtggtggcgtgtgag

SEQ ID NO: 302053 - DNA, 1961 bp, Homo sapiens
gcgcctgcctcgcagagcttccgcttccggcccttcaggctctgtctctgtggagactgggctttgggagggagaaagagggacctagcgcgggccgcgcaggcgcacggtgggcagctgcaatggcgctgtcgtgtacccttaacaggtatctgctcctcatggcgcaggagcatctggagttccgcctgccggaaataaagtctttgcttttgctttttggaggtcagtttgccagcagtcaagaaacttatggaaagtcaccattttggattcttagcattccctctgaagatattgcaagaaatttgatgaaacggacagtgtgtgccaagtctatatttgaactatggggtcatggacaatctcctgaggagctgtacagttctcttaaaaactaccctgtggagaagatggttccatttctacattcggactctacatataaaataaagattcacacttttaataagacattgacacaagaagagaaaatcaagcgaatagatgcacttgaatttctgccatttgaaggaaaagtgaatttaaagaaaccgcaacatgtattttctgttttggaggattatggtttagacccaaactgcatccctgagaatccacataatatttattttggtagatggattgcagatggacagagagagcttattgagtcatacagtgtcaaaaagagacactttattggaaatacaagtatggatgctggtttgtcattcattatggctaaccatggaaaagtgaaagaaaatgatattgtctttgatccatttgttggaacaggtggcctgctgatagcatgtgctcattttggtgcatatgtgtatgggacagacatagactacaacacagttcatggcttgggaaaggctactaggaaaaaccagaagtggagaggaccagatgaaaacattagggccaatcttcgtcaatatggtttagagaagtattaccttgatgtcctggtttcagatgcatctaaaccttcctggaggaagggcacatattttgatgcaatcattactgatcctccatatggtatcagagaatctacaagaagaacaggttcacagaaggagataccaaaggggatagaaaaatgggaaaaatgtccagaaagccatgttcctgtttccttgagttatcatctgagtgatatgtttcttgacctgttaaacttcgcagctgagaccctcgttttaggtggaagactagtctattggttaccggtgtatacgccagaatacactgaagagatggtgccttggcacccttgcctggaactcgttagcaactgcgagcagaagctttccagtcacacatcaaggcgcttgatcacaatggaaaaggtgaagaaatttgagaatcgggaccagtattcacatctgctaagtgatcattttctgccataccaaggtcataattccttccgtgagaaatattttagtggggtaacaaaaagaattgccaaggaagaaaaatccacccaggaatgaaaattaagattttgacaatgaagaaagaataagaatttgatttaaaaagacatctggatgtgaactttcatgtatgatccagaaaataggtacggttttaaaatattttatatagaaaagctacaaagtaaattgagcaatgcttttaaagttatctttgttttatagacttttttgttgtatgtattacagtctttataatcttatttaatgtatatttgtactttcaagtactgatggagatagactcaaaacagttatttttttacaattaatctacaaagggaattaatattgttgacttttaaaacatctgctggatatattatatgcaattaatagtagttaagaatttattcatttggtagatatgtttatttggtttttggttgtcatcgatttacattgccactaataaaccatattgagaatttctaaaaaaaaaca

SEQ ID NO: 302054 - DNA, 2074 bp, Homo sapiens
gcgcctgcctcgcagagcttccgcttccggcccttcaggctctgtctctgtggagactgggctttgggagggagaaagagggacctagcgcgggccgcgcaggcgcacggtgggcagctgcaatggcgctgtcgtgtacccttaacaggtatctgctcctcatggcgcaggagcatctggagttccgcctgccggaaataaagtctttgcttttgctttttggaggtcagtttgccagcagtcaagaaacttatggaaagtcaccattttggattcttagcattccctctgaagatattgcaagaaatttgatgaaacggacagtgtgtgccaagtctatatttgaactatggggtcatggacaatctcctgaggagctgtacagttctcttaaaaactaccctgtggagaagatggttccatttctacattcggactctacatataaaataaagattcacacttttaataagacattgacacaagaagagaaaatcaagcgaatagatgcacttgaatttctgccatttgaaggaaaagtgaatttaaagaaaccgcaacatgtattttctgttttggaggattatggtttagacccaaactgcatccctgagaatccacataatatttattttggtagatggattgcagatggacagagagagcttattgagtcatacagtgtcaaaaagagacactttattggaaatacaagtatggatgctggtttgtcattcattatggctaaccatggaaaagtgaaagaaaatgatattgtctttgatccatttgttggaacagcagtgtacttgtaaattgggtcttctcaaaactcactctaaccaaatggataaggttctgttaaggaagcacaggaaagcttttctgttccccttgacaactagttcttctaggtggcctgctgatagcatgtgctcattttggtgcatatgtgtatgggacagacatagactacaacacagttcatggcttgggaaaggctactaggaaaaaccagaagtggagaggaccagatgaaaacattagggccaatcttcgtcaatatggtttagagaagtattaccttgatgtcctggtttcagatgcatctaaaccttcctggaggaagggcacatattttgatgcaatcattactgatcctccatatggtatcagagaatctacaagaagaacaggttcacagaaggagataccaaaggggatagaaaaatgggaaaaatgtccagaaagccatgttcctgtttccttgagttatcatctgagtgatatgtttcttgacctgttaaacttcgcagctgagaccctcgttttaggtggaagactagtctattggttaccggtgtatacgccagaatacactgaagagatggtgccttggcacccttgcctggaactcgttagcaactgcgagcagaagctttccagtcacacatcaaggcgcttgatcacaatggaaaaggtgaagaaatttgagaatcgggaccagtattcacatctgctaagtgatcattttctgccataccaaggtcataattccttccgtgagaaatattttagtggggtaacaaaaagaattgccaaggaagaaaaatccacccaggaatgaaaattaagattttgacaatgaagaaagaataagaatttgatttaaaaagacatctggatgtgaactttcatgtatgatccagaaaataggtacggttttaaaatattttatatagaaaagctacaaagtaaattgagcaatgcttttaaagttatctttgttttatagacttttttgttgtatgtattacagtctttataatcttatttaatgtatatttgtactttcaagtactgatggagatagactcaaaacagttatttttttacaattaatctacaaagggaattaatattgttgacttttaaaacatctgctggatatattatatgcaattaatagtagttaagaatttattcatttggtagatatgtttatttggtttttggttgtcatcgatttacattgccactaataaaccatattgagaatttctaaaaaaaaaca

SEQ ID NO: 302055 - DNA, 2163 bp, Homo sapiens
gcgcctgcctcgcagagcttccgcttccggcccttcaggctctgtctctgtggagactgggctttgggagggagaaagagggacctagcgcgggccgcgcaggcgcacggtgggcagctgcaatggcgctgtcgtgtacccttaacaggtatctgctcctcatggcgcaggagcatctggagttccgcctgccggaaataaagtctttgcttttgctttttggaggtcagtttgccagcagtcaagaaacttatggaaagtcaccattttggattcttagcattccctctgaagatattgcaagaaatttgatgaaacggacagtgtgtgccaagtctatatttgaactatggggtcatggacaatctcctgaggagctgtacagttctcttaaaaactaccctgtggagaagatggttccatttctacattcggactctacatataaaataaagattcacacttttaataagacattgacacaagaagagaaaatcaagcgaatagatgcacttgaatttctgccatttgaaggaaaagtgaatttaaagaaaccgcaacatgtattttctgttttggaggattatggtttagacccaaactgcatccctgagaatccacataatatttattttggtagatggattgcagatggacagagagagcttattgagtcatacagtgtcaaaaagagacactttattggaaatacaagtatggatgctggtttgtcattcattatggctaaccatggaaaagtgaaagaaaatgatattgtctttgatccatttgttggaacagcagtgtacttgtaaattgggtcttctcaaaactcactctaaccaaatggataaggttctgttaaggaagcacaggaaagcttttctgttccccttgacaactagttcttctaggtggcctgctgatagcatgtgctcattttggtgcatatgtgtatgggacagacatagactacaacacagttcatggcttggcctgctcaacatgaaggtgatgaggatgaagacctttatgatgatccacttccacttcatgaatagtaaatctatttttactgaataaagaaaggctactaggaaaaaccagaagtggagaggaccagatgaaaacattagggccaatcttcgtcaatatggtttagagaagtattaccttgatgtcctggtttcagatgcatctaaaccttcctggaggaagggcacatattttgatgcaatcattactgatcctccatatggtatcagagaatctacaagaagaacaggttcacagaaggagataccaaaggggatagaaaaatgggaaaaatgtccagaaagccatgttcctgtttccttgagttatcatctgagtgatatgtttcttgacctgttaaacttcgcagctgagaccctcgttttaggtggaagactagtctattggttaccggtgtatacgccagaatacactgaagagatggtgccttggcacccttgcctggaactcgttagcaactgcgagcagaagctttccagtcacacatcaaggcgcttgatcacaatggaaaaggtgaagaaatttgagaatcgggaccagtattcacatctgctaagtgatcattttctgccataccaaggtcataattccttccgtgagaaatattttagtggggtaacaaaaagaattgccaaggaagaaaaatccacccaggaatgaaaattaagattttgacaatgaagaaagaataagaatttgatttaaaaagacatctggatgtgaactttcatgtatgatccagaaaataggtacggttttaaaatattttatatagaaaagctacaaagtaaattgagcaatgcttttaaagttatctttgttttatagacttttttgttgtatgtattacagtctttataatcttatttaatgtatatttgtactttcaagtactgatggagatagactcaaaacagttatttttttacaattaatctacaaagggaattaatattgttgacttttaaaacatctgctggatatattatatgcaattaatagtagttaagaatttattcatttggtagatatgtttatttggtttttggttgtcatcgatttacattgccactaataaaccatattgagaatttctaaaaaaaaaca

SEQ ID NO: 302056 - DNA, 2109 bp, Homo sapiens
gcgcctgcctcgcagagcttccgcttccggcccttcaggctctgtctctgtggagactgggctttgggagggagaaagagggacctagcgcgggccgcgcaggcgcacggtgggcagctgcaatggcgctgtcgtgtacccttaacaggtatctgctcctcatggcgcaggagcatctggagttccgcctgccggaaataaagtctttgcttttgctttttggaggtcagtttgccagcagtcaagaaacttatggaaagtcaccattttggattcttagcattccctctgaagatattgcaagaaatttgatgaaacggacagtgtgtgccaagtctatatttgaactatggggtcatggacaatctcctgaggagctgtacagttctcttaaaaactaccctgtggagaagatggttccatttctacattcggactctacatataaaataaagattcacacttttaataagacattgacacaagaagagaaaatcaagcgaatagatgcacttgaatttctgccatttgaaggaaaagtgaatttaaagaaaccgcaacatgtattttctgttttggaggattatggtttagacccaaactgcatccctgagaatccacataatatttattttggtagatggattgcagatggacagagagagcttattgagtcatacagtgtcaaaaagagacactttattggaaatacaagtatggatgctggtttgtcattcattatggctaaccatggaaaagtgaaagaaaatgatattgtctttgatccatttgttggaacagcagtgtacttgtaaattgggtcttctcaaaactcactctaaccaaatggataaggttctgttaaggaagcacaggaaagcttttctgttccccttgacaactagttcttctaggtggcctgctgatagcatgtgctcattttggtgcatatgtgtatgggacagacatagactacaacacagttcatggcttggcctgctcaacatgaaggtgatgaggatgaagacctttatgatgatccacttccacttcatgaatagtaaatctatttttactgaataaagaaaggctactaggaaaaaccagaagtggagaggaccagatgtcctggtttcagatgcatctaaaccttcctggaggaagggcacatattttgatgcaatcattactgatcctccatatggtatcagagaatctacaagaagaacaggttcacagaaggagataccaaaggggatagaaaaatgggaaaaatgtccagaaagccatgttcctgtttccttgagttatcatctgagtgatatgtttcttgacctgttaaacttcgcagctgagaccctcgttttaggtggaagactagtctattggttaccggtgtatacgccagaatacactgaagagatggtgccttggcacccttgcctggaactcgttagcaactgcgagcagaagctttccagtcacacatcaaggcgcttgatcacaatggaaaaggtgaagaaatttgagaatcgggaccagtattcacatctgctaagtgatcattttctgccataccaaggtcataattccttccgtgagaaatattttagtggggtaacaaaaagaattgccaaggaagaaaaatccacccaggaatgaaaattaagattttgacaatgaagaaagaataagaatttgatttaaaaagacatctggatgtgaactttcatgtatgatccagaaaataggtacggttttaaaatattttatatagaaaagctacaaagtaaattgagcaatgcttttaaagttatctttgttttatagacttttttgttgtatgtattacagtctttataatcttatttaatgtatatttgtactttcaagtactgatggagatagactcaaaacagttatttttttacaattaatctacaaagggaattaatattgttgacttttaaaacatctgctggatatattatatgcaattaatagtagttaagaatttattcatttggtagatatgtttatttggtttttggttgtcatcgatttacattgccactaataaaccatattgagaatttctaaaaaaaaaca

SEQ ID NO: 302057 - DNA, 2029 bp, Homo sapiens
gcgcctgcctcgcagagcttccgcttccggcccttcaggctctgtctctgtggagactgggctttgggagggagaaagagggacctagcgcgggccgcgcaggcgcacggtgggcagctgcaatggcgctgtcgtgtacccttaacaggtatctgctcctcatggcgcaggagcatctggagttccgcctgccggtgagtccgtagcgccctccggaacttccgacggaagaggacgctggagtggagtggagtgggtggaggaaataaagtctttgcttttgctttttggaggtcagtttgccagcagtcaagaaacttatggaaagtcaccattttggattcttagcattccctctgaagatattgcaagaaatttgatgaaacggacagtgtgtgccaagtctatatttgaactatggggtcatggacaatctcctgaggagctgtacagttctcttaaaaactaccctgtggagaagatggttccatttctacattcggactctacatataaaataaagattcacacttttaataagacattgacacaagaagagaaaatcaagcgaatagatgcacttgaatttctgccatttgaaggaaaagtgaatttaaagaaaccgcaacatgtattttctgttttggaggattatggtttagacccaaactgcatccctgagaatccacataatatttattttggtagatggattgcagatggacagagagagcttattgagtcatacagtgtcaaaaagagacactttattggaaatacaagtatggatgctggtttgtcattcattatggctaaccatggaaaagtgaaagaaaatgatattgtctttgatccatttgttggaacaggtggcctgctgatagcatgtgctcattttggtgcatatgtgtatgggacagacatagactacaacacagttcatggcttgggaaaggctactaggaaaaaccagaagtggagaggaccagatgaaaacattagggccaatcttcgtcaatatggtttagagaagtattaccttgatgtcctggtttcagatgcatctaaaccttcctggaggaagggcacatattttgatgcaatcattactgatcctccatatggtatcagagaatctacaagaagaacaggttcacagaaggagataccaaaggggatagaaaaatgggaaaaatgtccagaaagccatgttcctgtttccttgagttatcatctgagtgatatgtttcttgacctgttaaacttcgcagctgagaccctcgttttaggtggaagactagtctattggttaccggtgtatacgccagaatacactgaagagatggtgccttggcacccttgcctggaactcgttagcaactgcgagcagaagctttccagtcacacatcaaggcgcttgatcacaatggaaaaggtgaagaaatttgagaatcgggaccagtattcacatctgctaagtgatcattttctgccataccaaggtcataattccttccgtgagaaatattttagtggggtaacaaaaagaattgccaaggaagaaaaatccacccaggaatgaaaattaagattttgacaatgaagaaagaataagaatttgatttaaaaagacatctggatgtgaactttcatgtatgatccagaaaataggtacggttttaaaatattttatatagaaaagctacaaagtaaattgagcaatgcttttaaagttatctttgttttatagacttttttgttgtatgtattacagtctttataatcttatttaatgtatatttgtactttcaagtactgatggagatagactcaaaacagttatttttttacaattaatctacaaagggaattaatattgttgacttttaaaacatctgctggatatattatatgcaattaatagtagttaagaatttattcatttggtagatatgtttatttggtttttggttgtcatcgatttacattgccactaataaaccatattgagaatttctaaaaaaaaaca

SEQ ID NO: 302058 - DNA, 2112 bp, Homo sapiens
gcgcctgcctcgcagagcttccgcttccggcccttcaggctctgtctctgtggagactgggctttgggagggagaaagagggacctagcgcgggccgcgcaggcgcacggtgggcagctgcaatggcgctgtcgtgtacccttaacaggtatctgctcctcatggcgcaggagcatctggagttccgcctgccggtgagtccgtagcgccctccggaacttccgacggaagaggacgctggagtggagtggagtgggtggaggtgatctgcatagcccgaggaagctgggattcgggggtcttcgctggtctgcgcgggtcacgcgtccccagtcctcgggcggggaaataaagtctttgcttttgctttttggaggtcagtttgccagcagtcaagaaacttatggaaagtcaccattttggattcttagcattccctctgaagatattgcaagaaatttgatgaaacggacagtgtgtgccaagtctatatttgaactatggggtcatggacaatctcctgaggagctgtacagttctcttaaaaactaccctgtggagaagatggttccatttctacattcggactctacatataaaataaagattcacacttttaataagacattgacacaagaagagaaaatcaagcgaatagatgcacttgaatttctgccatttgaaggaaaagtgaatttaaagaaaccgcaacatgtattttctgttttggaggattatggtttagacccaaactgcatccctgagaatccacataatatttattttggtagatggattgcagatggacagagagagcttattgagtcatacagtgtcaaaaagagacactttattggaaatacaagtatggatgctggtttgtcattcattatggctaaccatggaaaagtgaaagaaaatgatattgtctttgatccatttgttggaacaggtggcctgctgatagcatgtgctcattttggtgcatatgtgtatgggacagacatagactacaacacagttcatggcttgggaaaggctactaggaaaaaccagaagtggagaggaccagatgaaaacattagggccaatcttcgtcaatatggtttagagaagtattaccttgatgtcctggtttcagatgcatctaaaccttcctggaggaagggcacatattttgatgcaatcattactgatcctccatatggtatcagagaatctacaagaagaacaggttcacagaaggagataccaaaggggatagaaaaatgggaaaaatgtccagaaagccatgttcctgtttccttgagttatcatctgagtgatatgtttcttgacctgttaaacttcgcagctgagaccctcgttttaggtggaagactagtctattggttaccggtgtatacgccagaatacactgaagagatggtgccttggcacccttgcctggaactcgttagcaactgcgagcagaagctttccagtcacacatcaaggcgcttgatcacaatggaaaaggtgaagaaatttgagaatcgggaccagtattcacatctgctaagtgatcattttctgccataccaaggtcataattccttccgtgagaaatattttagtggggtaacaaaaagaattgccaaggaagaaaaatccacccaggaatgaaaattaagattttgacaatgaagaaagaataagaatttgatttaaaaagacatctggatgtgaactttcatgtatgatccagaaaataggtacggttttaaaatattttatatagaaaagctacaaagtaaattgagcaatgcttttaaagttatctttgttttatagacttttttgttgtatgtattacagtctttataatcttatttaatgtatatttgtactttcaagtactgatggagatagactcaaaacagttatttttttacaattaatctacaaagggaattaatattgttgacttttaaaacatctgctggatatattatatgcaattaatagtagttaagaatttattcatttggtagatatgtttatttggtttttggttgtcatcgatttacattgccactaataaaccatattgagaatttctaaaaaaaaaca

SEQ ID NO: 302059 - DNA, 1999 bp, Homo sapiens
ttcgtctagcggagaatagagacagctaacaaatgctcaggctggtgtttgaagtattggaatctgcggatcaagctcagtggaggggatggtggtggggattagatgatggagaagttgagaagagtgttttatttattcaagaaacgttttcagaatgcatgtagtcgaagatcggtacgctgggcatgtaacgatgatgtaagcaatctctgccctctaggagcttactgtttagagtaagggctgagcagacacataggcgtagaatgacagcagtcaagaaacttatggaaagtcaccattttggattcttagcattccctctgaagatattgcaagaaatttgatgaaacggacagtgtgtgccaagtctatatttgaactatggggtcatggacaatctcctgaggagctgtacagttctcttaaaaactaccctgtggagaagatggttccatttctacattcggactctacatataaaataaagattcacacttttaataagacattgacacaagaagagaaaatcaagcgaatagatgcacttgaatttctgccatttgaaggaaaagtgaatttaaagaaaccgcaacatgtattttctgttttggaggattatggtttagacccaaactgcatccctgagaatccacataatatttattttggtagatggattgcagatggacagagagagcttattgagtcatacagtgtcaaaaagagacactttattggaaatacaagtatggatgctggtttgtcattcattatggctaaccatggaaaagtgaaagaaaatgatattgtctttgatccatttgttggaacaggtggcctgctgatagcatgtgctcattttggtgcatatgtgtatgggacagacatagactacaacacagttcatggcttgggaaaggctactaggaaaaaccagaagtggagaggaccagatgaaaacattagggccaatcttcgtcaatatggtttagagaagtattaccttgatgtcctggtttcagatgcatctaaaccttcctggaggaagggcacatattttgatgcaatcattactgatcctccatatggtatcagagaatctacaagaagaacaggttcacagaaggagataccaaaggggatagaaaaatgggaaaaatgtccagaaagccatgttcctgtttccttgagttatcatctgagtgatatgtttcttgacctgttaaacttcgcagctgagaccctcgttttaggtggaagactagtctattggttaccggtgtatacgccagaatacactgaagagatggtgccttggcacccttgcctggaactcgttagcaactgcgagcagaagctttccagtcacacatcaaggcgcttgatcacaatggaaaaggtgaagaaatttgagaatcgggaccagtattcacatctgctaagtgatcattttctgccataccaaggtcataattccttccgtgagaaatattttagtggggtaacaaaaagaattgccaaggaagaaaaatccacccaggaatgaaaattaagattttgacaatgaagaaagaataagaatttgatttaaaaagacatctggatgtgaactttcatgtatgatccagaaaataggtacggttttaaaatattttatatagaaaagctacaaagtaaattgagcaatgcttttaaagttatctttgttttatagacttttttgttgtatgtattacagtctttataatcttatttaatgtatatttgtactttcaagtactgatggagatagactcaaaacagttatttttttacaattaatctacaaagggaattaatattgttgacttttaaaacatctgctggatatattatatgcaattaatagtagttaagaatttattcatttggtagatatgtttatttggtttttggttgtcatcgatttacattgccactaataaaccatattgagaatttctaaaaaaaaaca

SEQ ID NO: 302060 - DNA, 1233 bp, Homo sapiens
gcgcctgcctcgcagagcttccgcttccggcccttcaggctctgtctctgtggagactgggctttgggagggagaaagagggacctagcgcgggccgcgcaggcgcacggtgggcagctgcaatggcgctgtcgtgtacccttaacaggtatctgctcctcatggcgcaggagcatctggagttccgcctgccggaaataaagtctttgcttttgctttttggaggtcagtttgccagcagtcaagaaacttatggaaagtcaccattttggattcttagcattccctctgaagatattgcaagaaatttgatgaaacggacagtgtgtgccaagtctatatttgaactatggggtcatggacaatctcctgaggagctgtacagttctcttaaaaactaccctgtggagaagatggttccatttctacattcggactctacatataaaataaagattcacacttttaataagacattgacacaagaagagaaaatcaagcgaatagatgcacttgaatttctgccatttgaaggaaaagtgaatttaaagaaaccgcaacatgtattttctgttttggaggattatggtttagacccaaactgcatccctgagaatccacataatatttattttggtagatggattgcagatggacagagagagcttattgagtcatacagtgtcaaaaagagacactttattggaaatacaagtatggatgctgaaatattttagtggggtaacaaaaagaattgccaaggaagaaaaatccacccaggaatgaaaattaagattttgacaatgaagaaagaataagaatttgatttaaaaagacatctggatgtgaactttcatgtatgatccagaaaataggtacggttttaaaatattttatatagaaaagctacaaagtaaattgagcaatgcttttaaagttatctttgttttatagacttttttgttgtatgtattacagtctttataatcttatttaatgtatatttgtactttcaagtactgatggagatagactcaaaacagttatttttttacaattaatctacaaagggaattaatattgttgacttttaaaacatctgctggatatattatatgcaattaatagtagttaagaatttattcatttggtagatatgtttatttggtttttggttgtcatcgatttacattgccactaataaaccatattgagaatttctaaaaaaaaaca

SEQ ID NO: 302061 - DNA, 174 bp, Homo sapiens
agatcggtacgctgggcatgtaacgatgatgtaagcaatctctgccctctaggagcttactgtttagagtaagggctgagcagacacataggcgtagaatgacaaaagagcgtcggtaagtgcagtgatagatgcacatggaaatatgagagcacgtggaagggaaatctaatc

SEQ ID NO: 302062 - DNA, 326 bp, Homo sapiens
gataagttagacatcagtacattttactgttatgttgaaattaaaataactatttacttgtatacataaaattaagattttaaatgaaagcaaattttgaataaatgtaggtttcagtgagttaaaacattacttttcctaaatgacagaaaataagaatactctgtttaatactttctctcttcctttttctttcccttcaggaaaggctactaggaaaaaccagaagtggagaggaccagatgaaaacattagggccaatcttcgtcaatatggtttagagaagtattaccttgatgtcctggtttcagatgcatctaaacctt

SEQ ID NO: 302063 - DNA, 5607 bp, Homo sapiens
attcagcctcttcggaccctctctcactccctgtcttccggagcgtgagtgaagcccgggtgaggtgttttcccacacgccgggggcccggagctgagaaggggcatggccagcatcacgcagctgttcgacgacctgtgtgaggccctcctgccggctgccaagactcacctgggccagcgcagtgtgaaccggaagagggcaaagcggagcctcaagaaggtggcctacaatgctcttttcacaaatctttttcaagatgagactcaacagctgcagcctgacatgtcaaaactaccagcgagaaacaagatcctcatgttgtcctttgacttgagagtgggtggcctgggccccaaggccgaccgtttggaggagcttgtggaggagctggaagcagccccttgctgtccgcttttggaggtggggtctgttttggacctcctggttcagctggcagggagtggtccccctcaagttctgccgagaaaacgagactacttccttaacaacaagcatgtggggagaaacgttccgtacagcggctatgattgcgacgacctgagtgtgtttgagatggacgttcagtctctgatctccagagaagagtgtttgtgtcacagcatgatccaggaaacacttcaggttatggaggctgctccaggcactggcctgcccaccgtcgggctcttctcatttggtgacccttgtggtgacaggttcgagagagacacccgggtctcgctcttcggggcccttgtgcacagccgcacttatgacatggacgtccgactgggcctgccccccgtgccagacaatgcggacctctctgggctggctattaaggtcccaccgagtgtggatcagtgggaagacgaaggattccagtcagcgtccaacttgactcctgattcccagtctgagcccagcgtgaccccagacgtggacctgtgggaagccgcacttacctatgaggccagcaagcggaggtgctgggagcgagttggctgcccccctggccacagagaggagccttacctgacggaggcgggaagggacgctttcgacaagttctgcaggctccaccaaggggagctccagctgcttgctgggggcgtcctacaggccccgcagcccgtgctggtgaaggagtgcgagctggtgaaagacgtgctgaacgtcttgattggggtcgtgtctgccacgttttcgctctgccagccggcccaggcctttgtggtgaagcggggcgtccacgtgtcaggagcgtctcccgagagcatcagcagcctgctctcggaagtggccgagtatgggacctgctacacgcgcctgagtcatttctctctgcagcccgtcctggactctttgtacagcaagggcctcgtgttccaggccttcaccagtggcctgaggaggtacctgcagtattaccgggcctgcgtcctttccactccgcccaccctgagcctcctcaccattggttttctcttcaagaaacttggccggcagctcaggtacctggccgagctctgtggcgttggcgctgtgctcccgggcacctgtggaggaggccccagggccgcgtttcccaccggcgtgaagctgctgtcctacctctaccaggaggctctgcacaactgcagcaacgagcactaccctgtactgctgtccctgctgaagaccagctgcgagccctacacccggttcatccacgactgggtgtacagcggggtgttcagagacgcttatggcgagttcatgattcaggtgaaccacgagtacctcagcttccgagataagtcgtactggacacatggctacgtgctcatctccaaagaggtggaggactgtgttcccgtgtttctgaagcacattgcccacgacatatacgtctgcggaaagaccattaacctgctgaagctctgctgcccccggcattacctctgttggtccgacgtccctgtcccccggatctcggtgattttctcccttgaggagttgaaggagattgagaaggactgtgccgtctacgttgggcgcatggagagggtggcccgccacagctctgtcagcaaggaggagaaggaattacgtatggaaattgcaaaacaagaattaatcgctcatgcccgggaagcagcatccagggtcctgagtgcactgagtgaccggcagatgtcagaacggatggccttggatgcccggaagcgtgagcagtttcagaggctgaaagaacaatttgtgaaggaccaggagcgacgccaggcggccaggcaggaggagctggatgatgacttcagctacgcccgtgaactccgagacagggagagaaggctgaagtccctggaggaggagctggagaggaaggcgaggcaggcactggtcgaccactacagcaagctctctgcagaggcagctcgtcgggagcagaaggcactgtggagaatccagaggcaccgactggagagtgcacggcttcgttttctcttagaagatgagaaacacattcaggagatgctgaaagcagtgtctgaggctcaccagccccaggagccgccagacgtcctcttgagcgtgcacccccaggtcacgtctccgggccctgagcacccagagggaggccaaggctgtgattctgggtctgcagagcaacactcgcctgcctgggatggctggaacaggccaggcctgctgaccccacagccccttaagcctctagcagtgggggctggtggcagggggctgcagcaggcggagggggccagacccttctctgacagcctcagcattggagacttcctacctgtgggcccaggggctgagccgtccgtgcagactggcatggtccctctcctggaggtggcgctgcagaccattaacttggacctgcccccctcagctcctggggaggcacccgcagcagccagcactcagccctccaggccacaggagtacgactttagtactgtcctgaggccagctgtggccacctcacctgcaccagggcccctgcaggctgcagagtgcagcttgggcagctcagggctacagctgtgggaggacagttgtgggaagatggatgcctgtggctccgcctcgcgggagactctgctcccctcacacccacccaggcgtgctgctctggaggaggggagcagccagcccacagagcggctctttgggcaggtgtcagggggtggtcttcccacaggggactacgcttctgaaatagctcccacccggccacggtggaacacccacgggcacgtgtctgacgccagcatcagggtcggggagaatgtgtcagatgtggctcccacccagccacggtggaacacccacggacacgtatccaatgccagcatcagcttaggggagtctgtgtcagatgtggctcccactcggccacggtggaacatccatggacatgtgtccaacgccagcatcagggtcggggagaatgtgtcagatgtggctcccaccaggccacggtggaatacccacgggcacgtgtccaacgccagcatcagggttggggagaacgtgtcggacgtggctcccacccggccacggtggaacacccatggacacgtgtccgatgccagcatcagcttgggggagtctgtgtcagacatggctcccgcccggccacggtggaacacccatggacacgtgtctgatgccagcatcagcttgggggagtctgtgtcagacatggctcccacccggccacggtggaacacccacggacatgtgtctgacaccagcatcagggttggggagaacgtatcggacgtggctcccatccggtcacggtgcaacacccatggacacgtgtccgacgccagcatcagcttgggggagcctgtgtcggatgtggtttccacccggccacggtggaacacccatgtacccatccctccgccccacatggtgctgggggctctctcaccagaagctgagcccaacacacccaggccccaacagagcccccctggccacacgtcccagtcagcgctcagcctgggagcacagagcactgtgctggactgtgggccacggctgcctgtagaagtggggccatctctgtcctcccccagctcgggctgcggggaggggagcatcagcgtgggggagaacgtgtcagacgtggctcccacccaaccatggtggcccaacaccccgggagacagtgtctctgaagaactaggccctgggaggagcggggacgctgaggacctctctccaaattggcctctcaactcacaggaagacacagctgcccagagcagcccaggccgtggtgaggaggcggaggcatcggcggcggaggctcagggtggggagcaggcctacctggcaggcctggcagggcagtaccacttggagcggtacccggacagttacgagtccatgtccgagccgcccattgctcatcttttgcgccccgtgcttccccgggccttcgccttccccgtggacccccaggtccagtctgccgctgatgagactgctgtgcagctgagcgagttgctgacgctgcccgtgctcatgaagcgctccatcacggcaccgctggccgcccacatctccttggtgaacaaggccgctgtcgactacttcttcgtggagctgcacctggaggcgcactatgaggcactgcggcacttcctgctgatggaggacggcgagttcgcccagtccctcagcgacctgctctttgagaagcttggagctgggcaaacgcccggagagctgctcaacccgctggtgctgaactctgtgctgagcaaggccctgcagtgcagcctgcatggggacaccccgcacgcctccaacctctccctcgctctcaagtacctgcccgaggtgtttgcccccaacgccccggatgtgctgagctgcctggagctcaggtacaaggtggactggcctctcaacattgtcatcaccgagggctgcctgagcaagtacagcggcgtcttctccttcctgctgcagctgaagctcatgatgtgggcgctcaaggacgtctgcttccacctcaagcgcacagccctgctgagccacatggccggctctgtgcagttccgtcagctgcagctgttcaagcacgagatgcagcatttcgtgaaggtcatccagggctacatcgccaaccagatcctgcacgtcacctggtgcgagttcagggccaggttggccaccgtgggcgacctggaggagatccagcgtgcgcacgcagagtacctgcacaaggccgtcttcaggggcctgctcacggagaaggcggcgcccgtcatgaacgtcatccacagcatcttcagcctcgtgctcaagttccgcagccagctcatctcccaggcctgggggccccctgggggcccgcggggtgcagagcaccccaactttgcactcatgcagcagtcctacaacaccttcaagtactactcccactttctcttcaaagtggtgaccaagctggtgaaccgcggctaccagccccacctggaggactttctgctgcgcatcaacttcaacaactactaccaggacgcctgaggctgctctgcgggggacgtgcacaataaaggtgttctcgga

SEQ ID NO: 302064 - DNA, 5808 bp, Homo sapiens
attcagcctcttcggaccctctctcactccctgtcttccggagcgtgagtgaagcccgggtgaggtgttttcccacacgccgggggcccggagctgagaaggggcatggccagcatcacgcagctgttcgacgacctgtgtgaggccctcctgccggctgccaagactcacctgggccagcgcagtgtgaaccggaagagggcaaagcggagcctcaagaaggtggcctacaatgctcttttcacaaatctttttcaagatgagactcaacagctgcagcctgacatgtcaaaactaccagcgagaaacaagatcctcatgttgtcctttgacttgagagtgggtggcctgggccccaaggccgaccgtttggaggagcttgtggaggagctggaagcagccccttgctgtccgcttttggaggtggggtctgttttggacctcctggttcagctggcagggagtggtccccctcaagttctgccgagaaaacgagactacttccttaacaacaagcatgtggggagaaacgttccgtacagcggctatgattgcgacgacctgagtgtgtttgagatggacgttcagtctctgatctccagagaagagtgtttgtgtcacagcatgatccaggaaacacttcaggttatggaggctgctccaggcactggcctgcccaccgtcgggctcttctcatttggtgacccttgtggtgacaggttcgagagagacacccgggtctcgctcttcggggcccttgtgcacagccgcacttatgacatggacgtccgactgggcctgccccccgtgccagacaatgcggacctctctgggctggctattaaggtcccaccgagtgtggatcagtgggaagacgaaggattccagtcagcgtccaacttgactcctgattcccagtctgagcccagcgtgaccccagacgtggacctgtgggaagccgcacttacctatgaggccagcaagcggaggtgctgggagcgagttggctgcccccctggccacagagaggagccttacctgacggaggcgggaagggacgctttcgacaagttctgcaggctccaccaaggggagctccagctgcttgctgggggcgtcctacaggccccgcagcccgtgctggtgaaggagtgcgagctggtgaaagacgtgctgaacgtcttgattggggtcgtgtctgccacgttttcgctctgccagccggcccaggcctttgtggtgaagcggggcgtccacgtgtcaggagcgtctcccgagagcatcagcagcctgctctcggaagtggccgagtatgggacctgctacacgcgcctgagtcatttctctctgcagcccgtcctggactctttgtacagcaagggcctcgtgttccaggccttcaccagtggcctgaggaggtacctgcagtattaccgggcctgcgtcctttccactccgcccaccctgagcctcctcaccattggttttctcttcaagaaacttggccggcagctcaggtacctggccgagctctgtggcgttggcgctgtgctcccgggcacctgtggaggaggccccagggccgcgtttcccaccggcgtgaagctgctgtcctacctctaccaggaggctctgcacaactgcagcaacgagcactaccctgtactgctgtccctgctgaagaccagctgcgagccctacacccggttcatccacgactgggtgtacagcggggtgttcagagacgcttatggcgagttcatgattcaggtgaaccacgagtacctcagcttccgagataagtcgtactggacacatggctacgtgctcatctccaaagaggtggaggactgtgttcccgtgtttctgaagcacattgcccacgacatatacgtctgcggaaagaccattaacctgctgaagctctgctgcccccggcattacctctgttggtccgacgtccctgtcccccggatctcggtgattttctcccttgaggagttgaaggagattgagaaggactgtgccgtctacgttgggcgcatggagagggtggcccgccacagctctgtcagcaaggaggagaaggaattacgtatggaaattgcaaaacaagaattaatcgctcatgcccgggaagcagcatccagggtcctgagtgcactgagtgaccggcagatgtcagaacggatggccttggatgcccggaagcgtgagcagtttcagaggctgaaagaacaatttgtgaaggaccaggagcgacgccaggcggccaggcaggaggagctggatgatgacttcagctacgcccgtgaactccgagacagggagagaaggctgaagtccctggaggaggagctggagaggaaggcgaggcaggcactggtcgaccactacagcaagctctctgcagaggcagctcgtcgggagcagaaggcactgtggagaatccagaggcaccgactggagagtgcacggcttcgttttctcttagaagatgagaaacacattcaggagatgctgaaagcagtgtctgaggctcaccagccccaggagccgccagacgtcctcttgagcgtgcacccccaggtcacgtctccgggccctgagcacccagagggaggccaaggctgtgattctgggtctgcagagcaacactcgcctgcctgggatggctggaacaggccaggcctgctgaccccacagccccttaagcctctagcagtgggggctggtggcagggggctgcagcaggcggagggggccagacccttctctgacagcctcagcattggagacttcctacctgtgggcccaggggctgagccgtccgtgcagactggcatggtccctctcctggaggtggcgctgcagaccattaacttggacctgcccccctcagctcctggggaggcacccgcagcagccagcactcagccctccaggccacaggagtacgactttagtactgtcctgaggccagctgtggccacctcacctgcaccagggcccctgcaggctgcagagtgcagcttgggcagctcagggctacagctgtgggaggacagttgtgggaagatggatgcctgtggctccgcctcgcgggagactctgctcccctcacacccacccaggcgtgctgctctggaggaggggagcagccagcccacagagcggctctttgggcaggtgtcagggggtggtcttcccacaggggactacgcttctgaaatagctcccacccggccacggtggaacacccacgggcacgtgtctgacgccagcatcagggtcggggagaatgtgtcagatgtggctcccacccagccacggtggaacacccacggacacgtatccaatgccagcatcagcttaggggagtctgtgtcagatgtggctcccactcggccacggtggaacatccatggacatgtgtccaacgccagcatcagggtcggggagaatgtgtcagatgtggctcccaccaggccacggtggaatacccacgggcacgtgtccaacgccagcatcagggttggggagaacgtgtcggacgtggctcccacccggccacggtggaacacccatggacacgtgtccgatgccagcatcagcttgggggagtctgtgtcagacatggctcccgcccggccacggtggaacacccatggacacgtgtctgatgccagcatcagcttgggggagtctgtgtcagacatggctcccacccggccacggtggaacacccacggacatgtgtctgacaccagcatcagggttggggagaacgtatcggacgtggctcccatccggtcacggtgcaacacccatggacacgtgtccgacgccagcatcagcttgggggagcctgtgtcggatgtggtttccacccggccacggtggaacacccatgtacccatccctccgccccacatggtgctgggggctctctcaccagaagctgagcccaacacacccaggccccaacagagcccccctggccacacgtcccagtcagcgctcagcctgggagcacagagcactgtgctggactgtgggccacggctgcctgtagaagtggggccatctctgtcctcccccagctcgggctgcggggaggggagcatcagcgtgggggagaacgtgtcagacgtggctcccacccaaccatggtggcccaacaccccgggagacagtgtctctgaagaactaggtcagagtagggtggctggtggtcaggagtgggactgtgggacgcacagagcctgggaggtaggcgggcagtggggttggtggcatgtgaagttcccctcaggcctcctcgtcagccaggacctgggctgctgtgggggacatgggaggggctgcttgagccagggccggctcggctccgtacccgccacaggcactcggccctgatgccctcgtgtccacttgtgtccacacaggccctgggaggagcggggacgctgaggacctctctccaaattggcctctcaactcacaggaagacacagctgcccagagcagcccaggccgtggtgaggaggcggaggcatcggcggcggaggctcagggtggggagcaggcctacctggcaggcctggcagggcagtaccacttggagcggtacccggacagttacgagtccatgtccgagccgcccattgctcatcttttgcgccccgtgcttccccgggccttcgccttccccgtggacccccaggtccagtctgccgctgatgagactgctgtgcagctgagcgagttgctgacgctgcccgtgctcatgaagcgctccatcacggcaccgctggccgcccacatctccttggtgaacaaggccgctgtcgactacttcttcgtggagctgcacctggaggcgcactatgaggcactgcggcacttcctgctgatggaggacggcgagttcgcccagtccctcagcgacctgctctttgagaagcttggagctgggcaaacgcccggagagctgctcaacccgctggtgctgaactctgtgctgagcaaggccctgcagtgcagcctgcatggggacaccccgcacgcctccaacctctccctcgctctcaagtacctgcccgaggtgtttgcccccaacgccccggatgtgctgagctgcctggagctcaggtacaaggtggactggcctctcaacattgtcatcaccgagggctgcctgagcaagtacagcggcgtcttctccttcctgctgcagctgaagctcatgatgtgggcgctcaaggacgtctgcttccacctcaagcgcacagccctgctgagccacatggccggctctgtgcagttccgtcagctgcagctgttcaagcacgagatgcagcatttcgtgaaggtcatccagggctacatcgccaaccagatcctgcacgtcacctggtgcgagttcagggccaggttggccaccgtgggcgacctggaggagatccagcgtgcgcacgcagagtacctgcacaaggccgtcttcaggtgaggcctgggcagcggctgcgtccctgtggtcacggctcagcccacccagcagcactgcttccccccacccctgggggcccgcggggtgcagagcaccccaactttgcactcatgcagcagtcctacaacaccttcaagtactactcccactttctcttcaaagtggtgaccaagctggtgaaccgcggctaccagccccacctggaggactttctgctgcgcatcaacttcaacaactactaccaggacgcctgaggctgctctgcgggggacgtgcacaataaaggtgttctcgga

SEQ ID NO: 302065 - DNA, 4066 bp, Homo sapiens
  misc_feature (5)..(5): n is a, c, g, or t
  misc_feature (7)..(10): n is a, c, g, or t
  misc_feature (14)..(14): n is a, c, g, or t
  misc_feature (17)..(17): n is a, c, g, or t
  misc_feature (20)..(20): n is a, c, g, or t
cacgngnnnntcanctnccnagataagtcgtactggacacatggctacgtgctcatctccaaagaggtggaggactgtgttcccgtgtttctgaagcacattgcccacgacatatacgtctgcggaaagaccattaacctgctgaagctctgctgcccccggcattacctctgttggtccgacgtccctgtcccccggatctcggtgattttctcccttgaggagttgaaggagattgagaaggactgtgccgtctacgttgggcgcatggagagggtggcccgccacagctctgtcagcaaggaggagaaggaattacgtatggaaattgcaaaacaagaattaatcgctcatgcccgggaagcagcatccagggtcctgagtgcactgagtgaccggcagatgtcagaacggatggccttggatgcccggaagcgtgagcagtttcagaggctgaaagaacaatttgtgaaggaccaggagcgacgccaggcggccaggcaggaggagctggatgatgacttcagctacgcccgtgaactccgagacagggagagaaggctgaagtccctggaggaggagctggagaggaaggcgaggcaggcactggtcgaccactacagcaagctctctgcagaggcagctcgtcgggagcagaaggcactgtggagaatccagaggcaccgactggagagtgcacggcttcgttttctcttagaagatgagaaacacattcaggagatgctgaaagcagtgtctgaggctcaccagccccaggagccgccagacgtcctcttgagcgtgcacccccaggtcacgtctccgggccctgagcacccagagggaggccaaggctgtgattctgggtctgcagagcaacactcgcctgcctgggatggctggaacaggccaggcctgctgaccccacagccccttaagcctctagcagtgggggctggtggcagggggctgcagcaggcggagggggccagacccttctctgacagcctcagcattggagacttcctacctgtgggcccaggggctgagccgtccgtgcagactggcatggtccctctcctggaggtggcgctgcagaccattaacttggacctgcccccctcagctcctggggaggcacccgcagcagccagcactcagccctccaggccacaggagtacgactttagtactgtcctgaggccagctgtggccacctcacctgcaccagggcccctgcaggctgcagagtgcagcttgggcagctcagggctacagctgtgggaggacagttgtgggaagatggatgcctgtggctccgcctcgcgggagactctgctcccctcacacccacccaggcgtgctgctctggaggaggggagcagccagcccacagagcggctctttgggcaggtgtcagggggtggtcttcccacaggggactacgcttctgaaatagctcccacccggccacggtggaacacccacgggcacgtgtctgacgccagcatcagggtcggggagaatgtgtcagatgtggctcccacccagccacggtggaacacccacggacacgtatccaatgccagcatcagcttaggggagtctgtgtcagatgtggctcccactcggccacggtggaacatccatggacatgtgtccaacgccagcatcagggtcggggagaatgtgtcagatgtggctcccaccaggccacggtggaatacccacgggcacgtgtccaacgccagcatcagggttggggagaacgtgtcggacgtggctcccacccggccacggtggaacacccatggacacgtgtccgatgccagcatcagcttgggggagtctgtgtcagacatggctcccgcccggccacggtggaacacccatggacacgtgtctgatgccagcatcagcttgggggagtctgtgtcagacatggctcccacccggccacggtggaacacccacggacatgtgtctgacaccagcatcagggttggggagaacgtatcggacgtggctcccatccggtcacggtgcaacacccatggacacgtgtccgacgccagcatcagcttgggggagcctgtgtcggatgtggtttccacccggccacggtggaacacccatgtacccatccctccgccccacatggtgctgggggctctctcaccagaagctgagcccaacacacccaggccccaacagagcccccctggccacacgtcccagtcagcgctcagcctgggagcacagagcactgtgctggactgtgggccacggctgcctgtagaagtggggccatctctgtcctcccccagctcgggctgcggggaggggagcatcagcgtgggggagaacgtgtcagacgtggctcccacccaaccatggtggcccaacaccccgggagacagtgtctctgaagaactaggtcagagtagggtggctggtggtcaggagtgggactgtgggacgcacagagcctgggaggtaggcgggcagtggggttggtggcatgtgaagttcccctcaggcctcctcgtcagccaggacctgggctgctgtgggggacatgggaggggctgcttgagccagggccggctcggctccgtacccgccacaggcactcggccctgatgccctcgtgtccacttgtgtccacacaggccctgggaggagcggggacgctgaggacctctctccaaattggcctctcaactcacaggaagacacagctgcccagagcagcccaggccgtggtgaggaggcggaggcatcggcggcggaggctcagggtggggagcaggcctacctggcaggcctggcagggcagtaccacttggagcggtacccggacagttacgagtccatgtccgagccgcccattgctcatcttttgcgccccgtgcttccccgggccttcgccttccccgtggacccccaggtccagtctgccgctgatgagactgctgtgcagctgagcgagttgctgacgctgcccgtgctcatgaagcgctccatcacggcaccgctggccgcccacatctccttggtgaacaaggccgctgtcgactacttcttcgtggagctgcacctggaggcgcactatgaggcactgcggcacttcctgctgatggaggacggcgagttcgcccagtccctcagcgacctgctctttgagaagcttggagctgggcaaacgcccggagagctgctcaacccgctggtgctgaactctgtgctgagcaaggccctgcagtgcagcctgcatggggacaccccgcacgcctccaacctctccctcgctctcaagtacctgcccgaggtgtttgcccccaacgccccggatgtgctgagctgcctggagctcaggtacaaggtggactggcctctcaacattgtcatcaccgagggctgcctgagcaagtacagcggcgtcttctccttcctgctgcagctgaagctcatgatgtgggcgctcaaggacgtctgcttccacctcaagcgcacagccctgctgagccacatggccggctctgtgcagttccgtcagctgcagctgttcaagcacgagatgcagcatttcgtgaaggtcatccagggctacatcgccaaccagatcctgcacgtcacctggtgcgagttcagggccaggttggccaccgtgggcgacctggaggagatccagcgtgcgcacgcagagtacctgcacaaggccgtcttcaggggcctgctcacggagaaggcggcgcccgtcatgaacgtcatccacagcatcttcagcctcgtgctcaagttccgcagccagctcatctcccaggcctgggggccccctgggggcccgcggggtgcagagcaccccaactttgcactcatgcagcagtcctacaacaccttcaagtactactcccactttctcttcaaagtggtgaccaagctggtgaaccgcggctaccagccccacctggaggactttctgctgcgcatcaacttcaacaactactaccaggacgcctgaggctgctctgcgggggacgtgcacaataaaggtgttctcgga

SEQ ID NO: 302066 - DNA, 5891 bp, Homo sapiens
attcagcctcttcggaccctctctcactccctgtcttccggagcgtgagtgaagcccgggtgaggtgttttcccacacgccgggggcccggagctgagaaggggcatggccagcatcacgcagctgttcgacgacctgtgtgaggccctcctgccggctgccaagactcacctgggccagcgcagtgtgaaccggaagagggcaaagcggagcctcaagaaggtggcctacaatgctcttttcacaaatctttttcaagatgagactcaacagctgcagcctgacatgtcaaaactaccagcgagaaacaagatcctcatgttgtcctttgacttgagagtgggtggcctgggccccaaggccgaccgtttggaggagcttgtggaggagctggaagcagccccttgctgtccgcttttggaggtggggtctgttttggacctcctggttcagctggcagggagtggtccccctcaagttctgccgagaaaacgagactacttccttaacaacaagcatgtggggagaaacgttccgtacagcggctatgattgcgacgacctgagtgtgtttgagatggacgttcagtctctgatctccagagaagagtgtttgtgtcacagcatgatccaggaaacacttcaggttatggaggctgctccaggcactggcctgcccaccgtcgggctcttctcatttggtgacccttgtggtgacaggttcgagagagacacccgggtctcgctcttcggggcccttgtgcacagccgcacttatgacatggacgtccgactgggcctgccccccgtgccagacaatgcggacctctctgggctggctattaaggtcccaccgagtgtggatcagtgggaagacgaaggattccagtcagcgtccaacttgactcctgattcccagtctgagcccagcgtgaccccagacgtggacctgtgggaagccgcacttacctatgaggccagcaagcggagcccccctggccacagagaggagccttacctgacggaggcgggaagggacgctttcgacaagttctgcaggctccaccaaggggagctccagctgcttgctgggggcgtcctacaggccccgcagcccgtgctggtgaaggagtgcgagctggtgaaagacgtgctgaacgtcttgattggggtcgtgtctgccacgttttcgctctgccagccggcccaggcctttgtggtgaagcggggcgtccacgtgtcaggagcgtctcccgagagcatcagcagcctgctctcggaagtggccgagtatgggacctgctacacgcgcctgagtcatttctctctgcagcccgtcctggactctttgtacagcaagggcctcgtgttccaggccttcaccagtggcctgaggaggtacctgcagtattaccgggcctgcgtcctttccactccgcccaccctgagcctcctcaccattggttttctcttcaagaaacttggccggcagctcaggtacctggccgagctctgtggcgttggcgctgtgctcccgggcacctgtggaggaggccccagggccgcgtttcccaccggcgtgaagctgctgtcctacctctaccaggaggctctgcacaactgcagcaacgagcactaccctgtactgctgtccctgctgaagaccagctgcgagccctacacccggttcatccacgactgggtgtacagcggggtgttcagagacgcttatggcgagttcatgattcaggtgaaccacgagtacctcagcttccgagataagtcgtactggacacatggctacgtgctcatctccaaagaggtggaggactgtgttcccgtgtttctgaagcacattgcccacgacatatacgtctgcggaaagaccattaacctgctgaagctctgctgcccccggcattacctctgttggtccgacgtccctgtcccccggatctcggtgattttctcccttgaggagttgaaggagattgagaaggactgtgccgtctacgttgggcgcatggagagggtggcccgccacagctctgtcagcaaggaggagaaggaattacgtatggaaattgcaaaacaagaattaatcgctcatgcccgggaagcagcatccagggtcctgagtgcactgagtgaccggcagatgtcagaacggatggccttggatgcccggaagcgtgagcagtttcagaggctgaaagaacaatttgtgaaggaccaggagcgacgccaggcggccaggcaggaggagctggatgatgacttcagctacgcccgtgaactccgagacagggagagaaggctgaagtccctggaggaggagctggagaggaaggcgaggcaggcactggtcgaccactacagcaagctctctgcagaggcagctcgtcgggagcagaaggcactgtggagaatccagaggcaccgactggagagtgcacggcttcgttttctcttagaagatgagaaacacattcaggagatgctgaaagcagtgtctgaggctcaccagccccaggagccgccagacgtcctcttgagcgtgcacccccaggtcacgtctccgggccctgagcacccagagggaggccaaggctgtgattctgggtctgcagagcaacactcgcctgcctgggatggctggaacaggccaggcctgctgaccccacagccccttaagcctctagcagtgggggctggtggcagggggctgcagcaggcggagggggccagacccttctctgacagcctcagcattggagacttcctacctgtgggcccaggggctgagccgtccgtgcagactggcatggtccctctcctggaggtggcgctgcagaccattaacttggacctgcccccctcagctcctggggaggcacccgcagcagccagcactcagccctccaggccacaggagtacgactttagtactgtcctgaggccagctgtggccacctcacctgcaccagggcccctgcaggctgcagagtgcagcttgggcagctcagggctacagctgtgggaggacagttgtgggaagatggatgcctgtggctccgcctcgcgggagactctgctcccctcacacccacccaggcgtgctgctctggaggaggggagcagccagcccacagagcggctctttgggcaggtgtcagggggtggtcttcccacaggggactacgcttctgaaatagctcccacccggccacggtggaacacccacgggcacgtgtctgacgccagcatcagggtcggggagaatgtgtcagatgtggctcccacccagccacggtggaacacccacggacacgtatccaatgccagcatcagcttaggggagtctgtgtcagatgtggctcccactcggccacggtggaacatccatggacatgtgtccaacgccagcatcagggtcggggagaatgtgtcagatgtggctcccaccaggccacggtggaatacccacgggcacgtgtccaacgccagcatcagggttggggagaacgtgtcggacgtggctcccacccggccacggtggaacacccatggacacgtgtccgatgccagcatcagcttgggggagtctgtgtcagacatggctcccgcccggccacggtggaacacccatggacacgtgtctgatgccagcatcagcttgggggagtctgtgtcagacatggctcccacccggccacggtggaacacccacggacatgtgtctgacaccagcatcagggttggggagaacgtatcggacgtggctcccatccggtcacggtgcaacacccatggacacgtgtccgacgccagcatcagcttgggggagcctgtgtcggatgtggtttccacccggccacggtggaacacccatgtacccatccctccgccccacatggtgctgggggctctctcaccagaagctgagcccaacacacccaggccccaacagagcccccctggccacacgtcccagtcagcgctcagcctgggagcacagagcactgtgctggactgtgggccacggctgcctgtagaagtggggccatctctgtcctcccccagctcgggctgcggggaggggagcatcagcgtgggggagaacgtgtcagacgtggctcccacccaaccatggtggcccaacaccccgggagacagtgtctctgaagaactaggtcagagtagggtggctggtggtcaggagtgggactgtgggacgcacagagcctgggaggtaggcgggcagtggggttggtggcatgtgaagttcccctcaggcctcctcgtcagccaggacctgggctgctgtgggggacatgggaggggctgcttgagccagggccggctcggctccgtacccgccacaggcactcggccctgatgccctcgtgtccacttgtgtccacacaggccctgggaggagcggggacgctgaggacctctctccaaattggcctctcaactcacaggaagacacagctgcccagagcagcccaggccgtggtgaggaggcggaggcatcggcggcggaggctcagggtggggagcaggcctacctggcaggcctggcagggcagtaccacttggagcggtacccggacagttacgagtccatgtccgagccgcccattgctcatcttttgcgccccgtgcttccccgggccttcgccttccccgtggacccccaggtccagtctgccgctgatgagactgctgtgcagctgagcgagttgctgacgctgcccgtgctcatgaagcgctccatcacggcaccgctggccgcccacatctccttggtgaacaaggccgctgtcgactacttcttcgtggagctgcacctggaggcgcactatgaggcactgcggcacttcctgctgatggaggacggcgagttcgcccagtccctcagcgacctgctctttgagaagcttggagctgggcaaacgcccggagagctgctcaacccgctggtgctgaactctgtgctgagcaaggccctgcagtgcagcctgcatggggacaccccgcacgcctccaacctctccctcgctctcaagtacctgcccgaggtgtttgcccccaacgccccggatgtgctgagctgcctggagctcaggtacaaggtggactggcctctcaacattgtcatcaccgagggctgcctgagcaagtacagcggcgtcttctccttcctgctgcagctgaagctcatgatgtgggcgctcaaggacgtctgcttccacctcaagcgcacagccctgctgagccacatggccggctctgtgcagttccgtcagctgcagctgttcaagcacgagatgcagcatttcgtgaaggtcatccagggctacatcgccaaccagatcctgcacgtcacctggtgcgagttcagggccaggttggccaccgtgggcgacctggaggagatccagcgtgcgcacgcagagtacctgcacaaggccgtcttcaggtgaggcctgggcagcggctgcgtccctgtggtcacggctcagcccacccagcagcactgcttccccccagggcctgctcacggagaaggcggcgcccgtcatgaacgtcatccacagcatcttcagcctcgtgctcaagttccgcagccagctcatctcccaggcctgggggccccctgggggcccgcggggtgcagagcaccccaactttgcactcatgcagcagtcctacaacaccttcaagtactactcccactttctcttcaaagtggtgaccaagctggtgaaccgcggctaccagccccacctggaggactttctgctgcgcatcaacttcaacaactactaccaggacgcctgaggctgctctgcgggggacgtgcacaataaaggtgttctcgga

SEQ ID NO: 302067 - DNA, 5899 bp, Homo sapiens
attcagcctcttcggaccctctctcactccctgtcttccggagcgtgagtgaagcccgggtgaggtgttttcccacacgccgggggcccggagctgagaaggggcatggccagcatcacgcagctgttcgacgacctgtgtgaggccctcctgccggctgccaagactcacctgggccagcgcagtgtgaaccggaagagggcaaagcggagcctcaagaaggtggcctacaatgctcttttcacaaatctttttcaagatgagactcaacagctgcagcctgacatgtcaaaactaccagcgagaaacaagatcctcatgttgtcctttgacttgagagtgggtggcctgggccccaaggccgaccgtttggaggagcttgtggaggagctggaagcagccccttgctgtccgcttttggaggtggggtctgttttggacctcctggttcagctggcagggagtggtccccctcaagttctgccgagaaaacgagactacttccttaacaacaagcatgtggggagaaacgttccgtacagcggctatgattgcgacgacctgagtgtgtttgagatggacgttcagtctctgatctccagagaagagtgtttgtgtcacagcatgatccaggaaacacttcaggttatggaggctgctccaggcactggcctgcccaccgtcgggctcttctcatttggtgacccttgtggtgacaggttcgagagagacacccgggtctcgctcttcggggcccttgtgcacagccgcacttatgacatggacgtccgactgggcctgccccccgtgccagacaatgcggacctctctgggctggctattaaggtcccaccgagtgtggatcagtgggaagacgaaggattccagtcagcgtccaacttgactcctgattcccagtctgagcccagcgtgaccccagacgtggacctgtgggaagccgcacttacctatgaggccagcaagcggagcccccctggccacagagaggagccttacctgacggaggcgggaagggacgctttcgacaagttctgcaggctccaccaaggggagctccagctgcttgctgggggcgtcctacaggccccgcagcccgtgctggtgaaggagtgcgagctggtgaaagacgtgctgaacgtcttgattggggtcgtgtctgccacgttttcgctctgccagccggcccaggcctttgtggtgaagcggggcgtccacgtgtcaggagcgtctcccgagagcatcagcagcctgctctcggaagtggccgagtatgggacctgctacacgcgcctgagtcatttctctctgcagcccgtcctggactctttgtacagcaagggcctcgtgttccaggccttcaccagtggcctgaggaggtacctgcagtattaccgggcctgcgtcctttccactccgcccaccctgagcctcctcaccattggttttctcttcaagaaacttggccggcagctcaggtacctggccgagctctgtggcgttggcgctgtgctcccgggcacctgtggaggaggccccagggccgcgtttcccaccggcgtgaagctgctgtcctacctctaccaggaggctctgcacaactgcagcaacgagcactaccctgtactgctgtccctgctgaagaccagctgcgagccctacacccggttcatccacgactgggtgtacagcggggtgttcagagacgcttatggcgagttcatgattcaggtgaaccacgagtacctcagcttccgagataagtcgtactggacacatggctacgtgctcatctccaaagaggtggaggactgtgttcccgtgtttctgaagcacattgcccacgacatatacgtctgcggaaagaccattaacctgctgaagctctgctgcccccggcattacctctgttggtccgacgtccctgtcccccggatctcggtgattttctcccttgaggagttgaaggagattgagaaggactgtgccgtctacgttgggcgcatggagagggtggcccgccacagctctgtcagcaaggaggagaaggaattacgtatggaaattgcaaaacaagaattaatcgctcatgcccgggaagcagcatccagggtcctgagtgcactgagtgaccggcagatgtcagaacggatggccttggatgcccggaagcgtgagcagtttcagaggctgaaagaacaatttgtgaaggaccaggagcgacgccaggcggccaggcaggaggagctggatgatgacttcagctacgcccgtgaactccgagacagggagagaaggctgaagtccctggaggaggagctggagaggaaggcgaggcaggcactggtcgaccactacagcaagctctctgcagaggcagctcgtcgggagcagaaggcactgtggagaatccagaggcaccgactggagagtgcacggcttcgttttctcttagaagatgagaaacacattcaggagatgctgaaagcagtgtctgaggctcaccagccccaggagccgccagacgtcctcttgagcgtgcacccccaggtcacgtctccgggccctgagcacccagagggaggccaaggctgtgattctgggtctgcagagcaacactcgcctgcctgggatggctggaacaggccaggcctgctgaccccacagccccttaagcctctagcagtgggggctggtggcagggggctgcagcaggcggagggggccagacccttctctgacagcctcagcattggagacttcctacctgtgggcccaggggctgagccgtccgtgcagactggcatggtccctctcctggaggtggcgctgcagaccattaacttggacctgcccccctcagctcctggggaggcacccgcagcagccagcactcagccctccaggccacaggagtacgactttagtactgtcctgaggccagctgtggccacctcacctgcaccagggcccctgcaggctgcagagtgcagcttgggcagctcagggctacagctgtgggaggacagttgtgggaagatggatgcctgtggctccgcctcgcgggagactctgctcccctcacacccacccaggcgtgctgctctggaggaggggagcagccagcccacagagcggctctttgggcaggtgtcagggggtggtcttcccacaggggactacgcttctgaaatagctcccacccggccacggtggaacacccacgggcacgtgtctgacgccagcatcagggtcggggagaatgtgtcagatgtggctcccacccagccacggtggaacacccacggacacgtatccaatgccagcatcagcttaggggagtctgtgtcagatgtggctcccactcggccacggtggaacatccatggacatgtgtccaacgccagcatcagggtcggggagaatgtgtcagatgtggctcccaccaggccacggtggaatacccacgggcacgtgtccaacgccagcatcagggttggggagaacgtgtcggacgtggctcccacccggccacggtggaacacccatggacacgtgtccgatgccagcatcagcttgggggagtctgtgtcagacatggctcccgcccggccacggtggaacacccatggacacgtgtctgatgccagcatcagcttgggggagtctgtgtcagacatggctcccacccggccacggtggaacacccacggacatgtgtctgacaccagcatcagggttggggagaacgtatcggacgtggctcccatccggtcacggtgcaacacccatggacacgtgtccgacgccagcatcagcttgggggagcctgtgtcggatgtggtttccacccggccacggtggaacacccatgtacccatccctccgccccacatggtgctgggggctctctcaccagaagctgagcccaacacacccaggccccaacagagcccccctggccacacgtcccagtcagcgctcagcctgggagcacagagcactgtgctggactgtgggccacggctgcctgtagaagtggggccatctctgtcctcccccagctcgggctgcggggaggggagcatcagcgtgggggagaacgtgtcagacgtggctcccacccaaccatggtggcccaacaccccgggagacagtgtctctgaagaactaggtcagagtagggtggctggtggtcaggagtgggactgtgggacgcacagagcctgggaggtaggcgggcagtggggttggtggcatgtgaagttcccctcaggcctcctcgtcagccaggacctgggctgctgtgggggacatgggaggggctgcttgagccagggccggctcggctccgtacccgccacaggcactcggccctgatgccctcgtgtccacttgtgtccacacaggccctgggaggagcggggacgctgaggacctctctccaaattggcctctcaactcacaggaagacacagctgcccagagcagcccaggccgtggtgaggaggcggaggcatcggcggcggaggctcagggtggggagcaggcctacctggcaggcctggcagggcagtaccacttggagcggtacccggacagttacgagtccatgtccgagccgcccattgctcatcttttgcgccccgtgcttccccgggccttcgccttccccgtggacccccaggtccagtctgccgctgatgagactgctgtgcagctgagcgagttgctgacgctgcccgtgctcatgaagcgctccatcacggcaccgctggccgcccagtgagtgcccctgcccctgcgccagtctgcccacccagcccgtcctggcccgccctgactccagctccctcctgccagcatctccttggtgaacaaggccgctgtcgactacttcttcgtggagctgcacctggaggcgcactatgaggcactgcggcacttcctgctgatggaggacggcgagttcgcccagtccctcagcgacctgctctttgagaagcttggagctgggcaaacgcccggagagctgctcaacccgctggtgctgaactctgtgctgagcaaggccctgcagtgcagcctgcatggggacaccccgcacgcctccaacctctccctcgctctcaagtacctgcccgaggtgtttgcccccaacgccccggatgtgctgagctgcctggagctcaggtacaaggtggactggcctctcaacattgtcatcaccgagggctgcctgagcaagtacagcggcgtcttctccttcctgctgcagctgaagctcatgatgtgggcgctcaaggacgtctgcttccacctcaagcgcacagccctgctgagccacatggccggctctgtgcagttccgtcagctgcagctgttcaagcacgagatgcagcatttcgtgaaggtcatccagggctacatcgccaaccagatcctgcacgtcacctggtgcgagttcagggccaggttggccaccgtgggcgacctggaggagatccagcgtgcgcacgcagagtacctgcacaaggccgtcttcaggggcctgctcacggagaaggcggcgcccgtcatgaacgtcatccacagcatcttcagcctcgtgctcaagttccgcagccagctcatctcccaggcctgggggccccctgggggcccgcggggtgcagagcaccccaactttgcactcatgcagcagtcctacaacaccttcaagtactactcccactttctcttcaaagtggtgaccaagctggtgaaccgcggctaccagccccacctggaggactttctgctgcgcatcaacttcaacaactactaccaggacgcctgaggctgctctgcgggggacgtgcacaataaaggtgttctcgga

SEQ ID NO: 302068 - DNA, 3508 bp, Homo sapiens
  misc_feature (3055)..(3055): n is a, c, g, or t
attcagcctcttcggaccctctctcactccctgtcttccggagcgtgagtgaagcccgggtgaggtgttttcccacacgccgggggcccggagctgagaaggggcatggccagcatcacgcagctgttcgacgacctgtgtgaggccctcctgccggctgccaagactcacctgggccagcgcagtgtgaaccggaagagggcaaagcggagcctcaagaaggtggcctacaatgctcttttcacaaatctttttcaagatgagactcaacagctgcagcctgacatgtcaaaactaccagcgagaaacaagatcctcatgttgtcctttgacttgagagtgggtggcctgggccccaaggccgaccgtttggaggagcttgtggaggagctggaagcagccccttgctgtccgcttttggaggtggggtctgttttggacctcctggttcagctggcagggagtggtccccctcaagttctgccgagaaaacgagactacttccttaacaacaagcatgtggggagaaacgttccgtacagcggctatgattgcgacgacctgagtgtgtttgagatggacgttcagtctctgatctccagagaagagtgtttgtgtcacagcatgatccaggaaacacttcaggttatggaggctgctccaggcactggcctgcccaccgtcgggctcttctcatttggtgacccttgtggtgacaggttcgagagagacacccgggtctcgctcttcggggcccttgtgcacagccgcacttatgacatggacgtccgactgggcctgccccccgtgccagacaatgcggacctctctgggctggctattaaggtcccaccgagtgtggatcagtgggaagacgaaggattccagtcagcgtccaacttgactcctgattcccagtctgagcccagcgtgaccccagacgtggacctgtgggaagccgcacttacctatgaggccagcaagcggagcccccctggccacagagaggagccttacctgacggaggcgggaagggacgctttcgacaagttctgcaggctccaccaaggggagctccagctgcttgctgggggcgtcctacaggccccgcagcccgtgctggtgaaggagtgcgagctggtgaaagacgtgctgaacgtcttgattggggtcgtgtctgccacgttttcgctctgccagccggcccaggcctttgtggtgaagcggggcgtccacgtgtcaggagcgtctcccgagagcatcagcagcctgctctcggaagtggccgagtatgggacctgctacacgcgcctgagtcatttctctctgcagcccgtcctggactctttgtacagcaagggcctcgtgttccaggccttcaccagtggcctgaggaggtacctgcagtattaccgggcctgcgtcctttccactccgcccaccctgagcctcctcaccattggttttctcttcaagaaacttggccggcagctcaggtacctggccgagctctgtggcgttggcgctgtgctcccgggcacctgtggaggaggccccagggccgcgtttcccaccggcgtgaagctgctgtcctacctctaccaggaggctctgcacaactgcagcaacgagcactaccctgtactgctgtccctgctgaagaccagctgcgagccctacacccggttcatccacgactgggtgtacagcggggtgttcagagacgcttatggcgagttcatgattcaggtgaaccacgagtacctcagcttccgagataagtcgtactggacacatggctacgtgctcatctccaaagaggtggaggactgtgttcccgtgtttctgaagcacattgcccacgacatatacgtctgcggaaagaccattaacctgctgaagctctgctgcccccggcattacctctgttggtccgacgtccctgtcccccggatctcggtgattttctcccttgaggagttgaaggagattgagaaggactgtgccgtctacgttgggcgcatggagagggtggcccgccacagctctgtcagcaaggaggagaaggaattacgtatggaaattgcaaaacaagaattaatcgctcatgcccgggaagcagcatccagggtcctgagtgcactgagtgaccggcagatgtcagaacggatggccttggatgcccggaagcgtgagcagtttcagaggctgaaagaacaatttgtgaaggaccaggagcgacgccaggcggccaggcaggaggagctggatgatgacttcagctacgcccgtgaactccgagacagggagagaaggctgaagtccctggaggaggagctggagaggaaggcgaggtagggcagcccgggctccaggcccaggggtgcagtgcggcaggggccccatagctctggcttaatcttactgatgattttactttttgttttgaaaaccttcaaacatacattaaggtagaaagaccaatatgctgaacccagagtggctgtgggcgttctgccttatccaggcatccttagctgttctgcgcgttgtcttgtggtggtttgtatggattagggtccaggcgaggcctgcgtactgtttggggtcctgtctctttatttatcttctttctgaacatccttccttatttatttttaagtctgttattggtctgacagagacagggcgtttttttttttttttttttttttggaaacagagtcttgctctgtcacccaggctggagtgcagtggcacaatctcggctcactgtaacctccgcctcccaggttcaagcaattctcctgcctcagcctcctgagtagctggggttacaggcatccgccaccacatccagctagttttttgtatttttagtacagacggggtttaaccatgttggccaggctggtctcaaactcctgacctcaggtgatccacctgcctcggcctcccaaagtgctgggattacaggcgcgagccaccgcgctcggctgagacagggcatttgtccagcacagcatctgcgtctgtctccctgtgctgttatcancctgtcctgtgctgtcatcaggctgtcccaggctgagtagtgctggatccttcaaggggctgtttggggttttggagagagcccctcacgggaggggctggccgcttcctgctcagccccacgcgatgctgtaggtcccaaccttagatctctttatggagcgagtgagggatgtgtgtggaggggtgcgcgtgcctgtgtgcacgtgtgtccgtgtatgcatttatgcatgagtacgtgttcatgcatgtatgtcagtcgatactgtcctgttaacacatggagaaaaccaggcctagacactacgtctctggcctgtggcagccaaattagagctggccagtccaggtttgagcccagttgcctgctggtgagaagctcaaaatcatggggcacgatcggtgaagcaggctttgaattcagcaaataaagcgtttgtgttggttttgcttc

SEQ ID NO: 302069 - DNA, 3607 bp, Homo sapiens
  misc_feature (3055)..(3055): n is a, c, g, or t
attcagcctcttcggaccctctctcactccctgtcttccggagcgtgagtgaagcccgggtgaggtgttttcccacacgccgggggcccggagctgagaaggggcatggccagcatcacgcagctgttcgacgacctgtgtgaggccctcctgccggctgccaagactcacctgggccagcgcagtgtgaaccggaagagggcaaagcggagcctcaagaaggtggcctacaatgctcttttcacaaatctttttcaagatgagactcaacagctgcagcctgacatgtcaaaactaccagcgagaaacaagatcctcatgttgtcctttgacttgagagtgggtggcctgggccccaaggccgaccgtttggaggagcttgtggaggagctggaagcagccccttgctgtccgcttttggaggtggggtctgttttggacctcctggttcagctggcagggagtggtccccctcaagttctgccgagaaaacgagactacttccttaacaacaagcatgtggggagaaacgttccgtacagcggctatgattgcgacgacctgagtgtgtttgagatggacgttcagtctctgatctccagagaagagtgtttgtgtcacagcatgatccaggaaacacttcaggttatggaggctgctccaggcactggcctgcccaccgtcgggctcttctcatttggtgacccttgtggtgacaggttcgagagagacacccgggtctcgctcttcggggcccttgtgcacagccgcacttatgacatggacgtccgactgggcctgccccccgtgccagacaatgcggacctctctgggctggctattaaggtcccaccgagtgtggatcagtgggaagacgaaggattccagtcagcgtccaacttgactcctgattcccagtctgagcccagcgtgaccccagacgtggacctgtgggaagccgcacttacctatgaggccagcaagcggagcccccctggccacagagaggagccttacctgacggaggcgggaagggacgctttcgacaagttctgcaggctccaccaaggggagctccagctgcttgctgggggcgtcctacaggccccgcagcccgtgctggtgaaggagtgcgagctggtgaaagacgtgctgaacgtcttgattggggtcgtgtctgccacgttttcgctctgccagccggcccaggcctttgtggtgaagcggggcgtccacgtgtcaggagcgtctcccgagagcatcagcagcctgctctcggaagtggccgagtatgggacctgctacacgcgcctgagtcatttctctctgcagcccgtcctggactctttgtacagcaagggcctcgtgttccaggccttcaccagtggcctgaggaggtacctgcagtattaccgggcctgcgtcctttccactccgcccaccctgagcctcctcaccattggttttctcttcaagaaacttggccggcagctcaggtacctggccgagctctgtggcgttggcgctgtgctcccgggcacctgtggaggaggccccagggccgcgtttcccaccggcgtgaagctgctgtcctacctctaccaggaggctctgcacaactgcagcaacgagcactaccctgtactgctgtccctgctgaagaccagctgcgagccctacacccggttcatccacgactgggtgtacagcggggtgttcagagacgcttatggcgagttcatgattcaggtgaaccacgagtacctcagcttccgagataagtcgtactggacacatggctacgtgctcatctccaaagaggtggaggactgtgttcccgtgtttctgaagcacattgcccacgacatatacgtctgcggaaagaccattaacctgctgaagctctgctgcccccggcattacctctgttggtccgacgtccctgtcccccggatctcggtgattttctcccttgaggagttgaaggagattgagaaggactgtgccgtctacgttgggcgcatggagagggtggcccgccacagctctgtcagcaaggaggagaaggaattacgtatggaaattgcaaaacaagaattaatcgctcatgcccgggaagcagcatccagggtcctgagtgcactgagtgaccggcagatgtcagaacggatggccttggatgcccggaagcgtgagcagtttcagaggctgaaagaacaatttgtgaaggaccaggagcgacgccaggcggccaggcaggaggagctggatgatgacttcagctacgcccgtgaactccgagacagggagagaaggctgaagtccctggaggaggagctggagaggaaggcgaggtagggcagcccgggctccaggcccaggggtgcagtgcggcaggggccccatagctctggcttaatcttactgatgattttactttttgttttgaaaaccttcaaacatacattaaggtagaaagaccaatatgctgaacccagagtggctgtgggcgttctgccttatccaggcatccttagctgttctgcgcgttgtcttgtggtggtttgtatggattagggtccaggcgaggcctgcgtactgtttggggtcctgtctctttatttatcttctttctgaacatccttccttatttatttttaagtctgttattggtctgacagagacagggcgtttttttttttttttttttttttggaaacagagtcttgctctgtcacccaggctggagtgcagtggcacaatctcggctcactgtaacctccgcctcccaggttcaagcaattctcctgcctcagcctcctgagtagctggggttacaggcatccgccaccacatccagctagttttttgtatttttagtacagacggggtttaaccatgttggccaggctggtctcaaactcctgacctcaggtgatccacctgcctcggcctcccaaagtgctgggattacaggcgcgagccaccgcgctcggctgagacagggcatttgtccagcacagcatctgcgtctgtctccctgtgctgttatcancctgtcctgtgctgtcatcaggctgtcccaggctgagtagtgctggatccttcaaggggctgtttggggttttggagagagcccctcacgggaggggctggccgcttcctgctcagccccacgcgatgctgtaggtcccaaccttagatctctttatggagcgagtgagggatgtgtgtggaggggtgcgcgtgcctgtgtgcacgtgtgtccgtgtatgcatttatgcatgagtacgtgttcatgcatgtatgtcagtcgatactgtcctgttaacacatggagaaaaccaggcctagacactacgtctctggcctgtggcagccaaattagagctggccagtccaggtttgagcccagttgcctgctggtgagaagctcaaaatcatggggcacgatcggtgaagcaggctttgaattcagcaaataaagcgtttgtgttggttttgcttcatgtgcttttttgcattagttttcagttctcaggtttgtacctgtagaaggggaagaggcctaacttcttagaggcctggggccctcggcctcctgctc

SEQ ID NO: 302070 - DNA, 1834 bp, Homo sapiens
cgctccagtttaaaacctgcggttccagggttctccagcccctccctttttcacgctccgaagccgagaaggcccaaagcgaagacagagaggacccggaagtagggaaaacctctgagcacgtgatgggggaacacgcgggtgctgtcacgtgatccgacaaacggcctctgcatagtgcagaacattctgctgctcttaaagaccctcatccctcccgtgggagccccctttggacactctatgaccctggaccctcgggggacctgaacttgatgcgatgggaggctgtgcaggctcgcggcggcgcttttcggattccgagggggaggagaccgtcccggagccccggctccctctgttggaccatcagggcgcgcattggaagaacgcggtgggcttctggctgctgggcctttgcaacaacttctcttatgtggtgatgctgagtgccgcccacgacatccttagccacaagaggacatcgggaaaccagagccatgtggacccaggcccaacgccgatcccccacaacagctcatcacgatttgactgcaactctgtctctacggctgctgtgctcctggcggacatcctccccacactcgtcatcaaattgttggctcctcttggccttcacctgctgccctacagcccccgggttctcgtcagtgggatttgtgctgctggaagcttcgtcctggttgccttttctcattctgtggggaccagcctgtgtggtgtggtcttcgctagcatctcatcaggccttggggaggtcaccttcctctccctcactgccttctaccccagggccgtgatctcctggtggtcctcagggactgggggagctgggctgctgggggccctgtcctacctgggcctcacccaggccggcctctcccctcagcagaccctgctgtccatgctgggtatccctgccctgctgctggccagctatttcttgttgctcacatctcctgaggcccaggaccctggaggggaagaagaagcagagagcgcagcccggcagcccctcataagaaccgaggccccggagtcgaagccaggctccagctccagcctctcccttcgggaaaggtggacagtgttcaagggtctgctgtggtacattgttcccttggtcgtagtttactttgccgagtatttcattaaccagggactttttgaactcctctttttctggaacacttccctgagtcacgctcagcaataccgctggtaccagatgctgtaccaggctggcgtctttgcctcccgctcttctctccgctgctgtcgcatccgtttcacctgggccctggccctgctgcagtgcctcaacctggtgttcctgctggcagacgtgtggttcggctttctgccaagcatctacctcgtcttcctgatcattctgtatgaggggctcctgggaggcgcagcctacgtgaacaccttccacaacatcgccctggagaccagtgatgagcaccgggagtttgcaatggcggccacctgcatctctgacacactggggatctccctgtcggggctcctggctttgcctctgcatgacttcctctgccagctctcctgatactcgggatcctcaggacgcaggtcacattcacctgtgggcagagggacaggtcagacacccaggcccaccccagagaccctccatgaactgtgctcccagccttcccggcaggtctgggagtagggaagggctgaagccttgtttcccttgcaggggggccagccattgtctcccacttggggagtttcttcctggcatcatgccttctgaataaatgccgattttatccatgga

SEQ ID NO: 302071 - DNA, 2018 bp, Homo sapiens
cgctccagtttaaaacctgcggttccagggttctccagcccctccctttttcacgctccgaagccgagaaggcccaaagcgaagacagagaggacccggaagtagggaaaacctctgagcacgtgatgggggaacacgcgggtgctgtcacgtgatccgacaaacggcctctgcatagtgcagaacattctgctgctcttaaaggtacaggcctcagggtccctgctgtagacggggcgggggagagtacgatgggtggggcgtggtgggtcgtagggcgctcgagatggagcccccagcttccttgatggatcgcggggcgcgagtgccctagacaagccggagctgggaccggcaatcgggcgttgatccttgtcacctgtcgcagaccctcatccctcccgtgggagccccctttggacactctatgaccctggaccctcgggggacctgaacttgatgcgatgggaggctgtgcaggctcgcggcggcgcttttcggattccgagggggaggagaccgtcccggagccccggctccctctgttggaccatcagggcgcgcattggaagaacgcggtgggcttctggctgctgggcctttgcaacaacttctcttatgtggtgatgctgagtgccgcccacgacatccttagccacaagaggacatcgggaaaccagagccatgtggacccaggcccaacgccgatcccccacaacagctcatcacgatttgactgcaactctgtctctacggctgctgtgctcctggcggacatcctccccacactcgtcatcaaattgttggctcctcttggccttcacctgctgccctacagcccccgggttctcgtcagtgggatttgtgctgctggaagcttcgtcctggttgccttttctcattctgtggggaccagcctgtgtggtgtggtcttcgctagcatctcatcaggccttggggaggtcaccttcctctccctcactgccttctaccccagggccgtgatctcctggtggtcctcagggactgggggagctgggctgctgggggccctgtcctacctgggcctcacccaggccggcctctcccctcagcagaccctgctgtccatgctgggtatccctgccctgctgctggccagctatttcttgttgctcacatctcctgaggcccaggaccctggaggggaagaagaagcagagagcgcagcccggcagcccctcataagaaccgaggccccggagtcgaagccaggctccagctccagcctctcccttcgggaaaggtggacagtgttcaagggtctgctgtggtacattgttcccttggtcgtagtttactttgccgagtatttcattaaccagggactttttgaactcctctttttctggaacacttccctgagtcacgctcagcaataccgctggtaccagatgctgtaccaggctggcgtctttgcctcccgctcttctctccgctgctgtcgcatccgtttcacctgggccctggccctgctgcagtgcctcaacctggtgttcctgctggcagacgtgtggttcggctttctgccaagcatctacctcgtcttcctgatcattctgtatgaggggctcctgggaggcgcagcctacgtgaacaccttccacaacatcgccctggagaccagtgatgagcaccgggagtttgcaatggcggccacctgcatctctgacacactggggatctccctgtcggggctcctggctttgcctctgcatgacttcctctgccagctctcctgatactcgggatcctcaggacgcaggtcacattcacctgtgggcagagggacaggtcagacacccaggcccaccccagagaccctccatgaactgtgctcccagccttcccggcaggtctgggagtagggaagggctgaagccttgtttcccttgcaggggggccagccattgtctcccacttggggagtttcttcctggcatcatgccttctgaataaatgccgattttatccatgga

SEQ ID NO: 302072 - DNA, 2204 bp, Homo sapiens
cgctccagtttaaaacctgcggttccagggttctccagcccctccctttttcacgctccgaagccgagaaggcccaaagcgaagacagagaggacccggaagtagggaaaacctctgagcacgtgatgggggaacacgcgggtgctgtcacgtgatccgacaaacggcctctgcatagtgcagaacattctgctgctcttaaaggtacaggcctcagggtccctgctgtagacggggcgggggagagtacgatgggtggggcgtggtgggtcgtagggcgctcgagatggagcccccagcttccttgatggatcgcggggcgcgagtgccctagacaagccggagctgggaccggcaatcgggcgttgatccttgtcacctgtcgcagaccctcatccctcccgtgggagccccctttggacactctatgaccctggaccctcgggggacctgaacttgatgcgatgggaggctgtgcaggctcgcggcggcgcttttcggattccgagggggaggagaccgtcccggagccccggctccctctgttggaccatcagggcgcgcattggaagaacgcggtgggcttctggctgctgggcctttgcaacaacttctcttatgtggtgatgctgagtgccgcccacgacatccttagccacaagaggacatcgggaaaccagagccatgtggacccaggcccaacgccgatcccccacaacagctcatcacgatttgactgcaactctgtctctacggctgctgtgctcctggcggacatcctccccacactcgtcatcaaattgttggctcctcttggccttcacctgctgccctacagcccccgggttctcgtcagtgggatttgtgctgctggaagcttcgtcctggttgccttttctcattctgtggggaccagcctgtgtggtgtggtcttcgctagcatctcatcaggccttggggaggtcaccttcctctccctcactgccttctaccccagggccgtgatctcctggtggtcctcagggactgggggagctgggctgctgggggccctgtcctacctgggcctcacccaggccggcctctcccctcagcagaccctgctgtccatgctgggtatccctgccctgctgctggccagctatttcttgttgctcacatctcctgaggcccaggaccctggaggggaagaagaagcagagagcgcagcccggcagcccctcataagaaccgaggccccggagtcgaagccaggctccagctccagcctctcccttcgggaaaggtggacagtgttcaagggtctgctgtggtacattgttcccttggtcgtagtttactttgccgagtatttcattaaccagggactttttgaactcctctttttctggaacacttccctgagtcacgctcagcaataccgctggtaccagatgctgtaccaggctggcgtctttgcctcccgctcttctctccgctgctgtcgcatccgtttcacctgggccctggccctgctgcagtgcctcaacctggtgttcctgctggcagacgtgtggttcggctttctgccaagcatctacctcgtcttcctgatcattctgtatgaggggctcctgggaggcgcagcctacgtgaacaccttccacaacatcgccctggagaccagtgatgagcaccgggagtttgcaatggcggccacctgcatctctgacacactggggatctccctgtcggggctcctggctttgcctctgcatgacttcctctgccagctctcctgatactcgggatcctcaggacgcaggtcacattcacctgtgggcagagggacaggtcagacacccaggcccaccccagagaccctccatgaactgtgctcccagccttcccggcaggtctgggagtagggaagggctgaagccttgtttcccttgcaggggggccagccattgtctcccacttggggagtttcttcctggcatcatgccttctgaataaatgccgattttatccatggaaaagcaacaagacaaacacacacaaaaaaaaccacaaacaagaatactgaagcacaaaatggggcggccacaccacgaagaaaccacgggcgagggacagggaaaagcaacagaaaacccgaaataaaggaagagggggggggcccaaaaagacatcgcgagagaacgcccacatcggccccgcgc

SEQ ID NO: 302073 - DNA, 1914 bp, Homo sapiens
cgctccagtttaaaacctgcggttccagggttctccagcccctccctttttcacgctccgaagccgagaaggcccaaagcgaagacagagaggacccggaagtagggaaaacctctgagcacgtgatgggggaacacgcgggtgctgtcacgtgatccgacaaacggcctctgcatagtgcagaacattctgctgctcttaaaggtacaggcctcagggtccctgctgtagacggggcgggggagagtacgatgggtggggcgtggtgggtcgtagggcgctcgagatggagcccccagcttccttgatggatcgcggggcgcgagtgccctagacaagccggagctgggaccggcaatcgggcgttgatccttgtcacctgtcgcagaccctcatccctcccgtgggagccccctttggacactctatgaccctggaccctcgggggacctgaacttgatgcgatgggaggctgtgcaggctcgcggcggcgcttttcggattccgagggggaggagaccgtcccggagccccggctccctctgttggaccatcagggcgcgcattggaagaacgcggtgggcttctggctgctgggcctttgcaacaacttctcttatgtggtgatgctgagtgccgcccacgacatccttagccacaagaggacatcgggaaaccagagccatgtggacccaggcccaacgccgatcccccacaacagctcatcacgatttgactgcaactctgtctctacggctgctgtgctcctggcggacatcctccccacactcgtcatcaaattgttggctcctcttggccttcacctgctgccctacagcccccgggttctcgtcagtgggatttgtgctgctggaagcttcgtcctggttgccttttctcattctgtggggaccagcctgtgtggtgtggtcttcgctagcatctcatcaggccttggggaggtcaccttcctctccctcactgccttctaccccagggccgtgatctcctggtggtcctcagggactgggggagctgggctgctgggggccctgtcctacctgggcctcacccaggccggcctctcccctcagcagaccctgctgtccatgctgggtatccctgccctgctgctggccagctatttcttgttgctcacatctcctgaggcccaggaccctggaggggaagaagaagcagagagcgcagcccggcagcccctcataagaaccgaggccccggagtcgaagccaggctccagctccagcctctcccttcgggaaaggtggacagtgttcaagggtctgctgtggtacattgttcccttggtcgtagtttactttgccgagtatttcattaaccagggactttttgaactcctctttttctggaacacttccctgagtcacgctcagcaataccgctggtaccagatgctgtaccaggctggcgtctttgcctcccgctcttctctccgctgctgtcgcatccgtttcacctgggccctggccctgctgcagtgcctcaacctggtgttcctgctggcagacgtgtggttcggctttctgccaagcatctacctcgtcttcctgatcattctgtatgaggggctcctgggaggcgcagcctacgtgaacaccttccacaacatcgccctggagaccagtgatgagcaccgggagtttgcaatggcggccacctgcatctctgacacactggggatctccctgtcggggctcctggctttgcctctgcatgacttcctctgccagctctcctgatactcgggatcctcaggacgcaggtcacattcacctgtgggcagagggacaggggggccagccattgtctcccacttggggagtttcttcctggcatcatgccttctgaataaatgccgattttatccatgga

SEQ ID NO: 302074 - DNA, 1939 bp, Homo sapiens
cgctccagtttaaaacctgcggttccagggttctccagcccctccctttttcacgctccgaagccgagaaggcccaaagcgaagacagagaggacccggaagtagggaaaacctctgagcacgtgatgggggaacacgcgggtgctgtcacgtgatccgacaaacggcctctgcatagtgcagaacattctgctgctcttaaaggtacaggcctcagggtccctgctgtagacggggcgggggagagtacgatgggtggggcgtggtgggtcgtagggcgctcgagatggagcccccagcttccttgatggatcgcggggcgcgagtgccctagacaagccggagctgggaccggcaatcgggcgttgatccttgtcacctgtcgcagaccctcatccctcccgtgggagccccctttggacactctatgaccctggaccctcgggggacctgaacttgatgcgatgggaggctgtgcaggctcgcggcggcgcttttcggattccgagggctgctgggcctttgcaacaacttctcttatgtggtgatgctgagtgccgcccacgacatccttagccacaagaggacatcgggaaaccagagccatgtggacccaggcccaacgccgatcccccacaacagctcatcacgatttgactgcaactctgtctctacggctgctgtgctcctggcggacatcctccccacactcgtcatcaaattgttggctcctcttggccttcacctgctgccctacagcccccgggttctcgtcagtgggatttgtgctgctggaagcttcgtcctggttgccttttctcattctgtggggaccagcctgtgtggtgtggtcttcgctagcatctcatcaggccttggggaggtcaccttcctctccctcactgccttctaccccagggccgtgatctcctggtggtcctcagggactgggggagctgggctgctgggggccctgtcctacctgggcctcacccaggccggcctctcccctcagcagaccctgctgtccatgctgggtatccctgccctgctgctggccagctatttcttgttgctcacatctcctgaggcccaggaccctggaggggaagaagaagcagagagcgcagcccggcagcccctcataagaaccgaggccccggagtcgaagccaggctccagctccagcctctcccttcgggaaaggtggacagtgttcaagggtctgctgtggtacattgttcccttggtcgtagtttactttgccgagtatttcattaaccagggactttttgaactcctctttttctggaacacttccctgagtcacgctcagcaataccgctggtaccagatgctgtaccaggctggcgtctttgcctcccgctcttctctccgctgctgtcgcatccgtttcacctgggccctggccctgctgcagtgcctcaacctggtgttcctgctggcagacgtgtggttcggctttctgccaagcatctacctcgtcttcctgatcattctgtatgaggggctcctgggaggcgcagcctacgtgaacaccttccacaacatcgccctggagaccagtgatgagcaccgggagtttgcaatggcggccacctgcatctctgacacactggggatctccctgtcggggctcctggctttgcctctgcatgacttcctctgccagctctcctgatactcgggatcctcaggacgcaggtcacattcacctgtgggcagagggacaggtcagacacccaggcccaccccagagaccctccatgaactgtgctcccagccttcccggcaggtctgggagtagggaagggctgaagccttgtttcccttgcaggggggccagccattgtctcccacttggggagtttcttcctggcatcatgccttctgaataaatgccgattttatccatgga

SEQ ID NO: 302075 - DNA, 2146 bp, Homo sapiens
cgctccagtttaaaacctgcggttccagggttctccagcccctccctttttcacgctccgaagccgagaaggcccaaagcgaagacagagaggacccggaagtagggaaaacctctgagcacgtgatgggggaacacgcgggtgctgtcacgtgatccgacaaacggcctctgcatagtgcagaacattctgctgctcttaaaggtacaggcctcagggtccctgctgtagacggggcgggggagagtacgatgggtggggcgtggtgggtcgtagggcgctcgagatggagcccccagcttccttgatggatcgcggggcgcgagtgccctagacaagccggagctgggaccggcaatcgggcgttgatccttgtcacctgtcgcagaccctcatccctcccgtgggagccccctttggacactctatgaccctggaccctcgggggacctgaacttgatgcgatgggaggctgtgcaggctcgcggcggcgcttttcggattccgagggggaggagaccgtcccggagccccggctccctctgttggaccatcagggcgcgcattggaagaacgcggtgggcttctggctgctgggcctttgcaacaacttctcttatgtggtgatgctgagtgccgcccacgacatccttagccacaagaggacatcgggaaaccagagccatgtggacccaggcccaacgccgatcccccacaacagctcatcacgatttgactgcaactctgtctctacggctgctgtgctcctggcggacatcctccccacactcgtcatcaaattgttggctcctcttggccttcacctgctgccctacagcccccgggttctcgtcagtgggatttgtgctgctggaagcttcgtcctggttgccttttctcattctgtggggaccagcctgtgtggtgtggtcttcgctagcatctcatcaggccttggggaggtcaccttcctctccctcactgccttctaccccagggccgtgatctcctggtggtcctcagggactgggggagctgggctgctgggggccctgtcctacctgggcctcacccaggccggcctctcccctcagcagaccctgctgtccatgctgggtatccctgccctgctgctggccagctatttcttgttgctcacatctcctgaggcccaggaccctggaggggaagaagaagcagagagcgcagcccggcagcccctcataagaaccgaggccccggagtcgaagccaggctccagctccagcctctcccttcgggaaaggtggacagtgttcaagggtctgctgtggtacattgttcccttggtcgtagtttactttgccgagtatttcattaaccagggactttttgaactcctctttttctggaacacttccctgagtcacgctcagcaataccgctggtaagaggagcgagggcagtgggctgggagggcgccgtggtgatgcagctgccctgcccagtaggcaccggggggagcgggatggtccctggaggagcctcctctcctccccccaaccctaacctcaggtaccagatgctgtaccaggctggcgtctttgcctcccgctcttctctccgctgctgtcgcatccgtttcacctgggccctggccctgctgcagtgcctcaacctggtgttcctgctggcagacgtgtggttcggctttctgccaagcatctacctcgtcttcctgatcattctgtatgaggggctcctgggaggcgcagcctacgtgaacaccttccacaacatcgccctggagaccagtgatgagcaccgggagtttgcaatggcggccacctgcatctctgacacactggggatctccctgtcggggctcctggctttgcctctgcatgacttcctctgccagctctcctgatactcgggatcctcaggacgcaggtcacattcacctgtgggcagagggacaggtcagacacccaggcccaccccagagaccctccatgaactgtgctcccagccttcccggcaggtctgggagtagggaagggctgaagccttgtttcccttgcaggggggccagccattgtctcccacttggggagtttcttcctggcatcatgccttctgaataaatgccgattttatccatgga

SEQ ID NO: 302076 - DNA, 1949 bp, Homo sapiens
cgctccagtttaaaacctgcggttccagggttctccagcccctccctttttcacgctccgaagccgagaaggcccaaagcgaagacagagaggacccggaagtagggaaaacctctgagcacgtgatgggggaacacgcgggtgctgtcacgtgatccgacaaacggcctctgcatagtgcagaacattctgctgctcttaaaggtacaggcctcagggtccctgctgtagacggggcgggggagagtacgatgggtggggcgtggtgggtcgtagggcgctcgagatggagcccccagcttccttgatggatcgcggggcgcgagtgccctagacaagccggagctgggaccggcaatcgggcgttgatccttgtcacctgtcgcagaccctcatccctcccgtgggagccccctttggacactctatgaccctggaccctcgggggacctgaacttgatgcgatgggaggctgtgcaggctcgcggcggcgcttttcggattccgagggggaggagaccgtcccggagccccggctccctctgttggaccatcagggcgcgcattggaagaacgcggtgggcttctggctgctgggcctttgcaacaacttctcttatgtggtgatgctgagtgccgcccacgacatccttagccacaagaggacatcgggaaaccagagccatgtggacccaggcccaacgccgatcccccacaacagctcatcacgatttgactgcaactctgtctctacggctgctgtgctcctggcggacatcctccccacactcgtcatcaaattgttggctcctcttggccttcacctgctgccctacagcccccgggttctcgtcagtgggatttgtgctgctggaagcttcgtcctggttgccttttctcattctgtggggaccagcctgtgtggtgtggtcttcgctagcatctcatcaggccttggggaggtcaccttcctctccctcactgccttctaccccagggccgtgatctcctggtggtcctcagggactgggggagctgggctgctgggggccctgtcctacctgggcctcacccaggccggcctctcccctcagcagaccctgctgtccatgctgggtatccctgccctgctgctggccagctatttcttgttgctcacatctcctgaggcccaggaccctggaggggaagaagaagcagagagcgcagcccggcagcccctcataagaaccgaggccccggagtcgaagccaggctccagctccagcctctcccttcgggaaaggtggacagtgttcaagtttgaactcctctttttctggaacacttccctgagtcacgctcagcaataccgctggtaccagatgctgtaccaggctggcgtctttgcctcccgctcttctctccgctgctgtcgcatccgtttcacctgggccctggccctgctgcagtgcctcaacctggtgttcctgctggcagacgtgtggttcggctttctgccaagcatctacctcgtcttcctgatcattctgtatgaggggctcctgggaggcgcagcctacgtgaacaccttccacaacatcgccctggagaccagtgatgagcaccgggagtttgcaatggcggccacctgcatctctgacacactggggatctccctgtcggggctcctggctttgcctctgcatgacttcctctgccagctctcctgatactcgggatcctcaggacgcaggtcacattcacctgtgggcagagggacaggtcagacacccaggcccaccccagagaccctccatgaactgtgctcccagccttcccggcaggtctgggagtagggaagggctgaagccttgtttcccttgcaggggggccagccattgtctcccacttggggagtttcttcctggcatcatgccttctgaataaatgccgattttatccatgga

SEQ ID NO: 302077 - DNA, 2112 bp, Homo sapiens
cgctccagtttaaaacctgcggttccagggttctccagcccctccctttttcacgctccgaagccgagaaggcccaaagcgaagacagagaggacccggaagtagggaaaacctctgagcacgtgatgggggaacacgcgggtgctgtcacgtgatccgacaaacggcctctgcatagtgcagaacattctgctgctcttaaaggtacaggcctcagggtccctgctgtagacggggcgggggagagtacgatgggtggggcgtggtgggtcgtagggcgctcgagatggagcccccagcttccttgatggatcgcggggcgcgagtgccctagacaagccggagctgggaccggcaatcgggcgttgatccttgtcacctgtcgcagaccctcatccctcccgtgggagccccctttggacactctatgaccctggaccctcgggggacctgaacttgatgcgatgggaggctgtgcaggctcgcggcggcgcttttcggattccgagggggaggagaccgtcccggagccccggctccctctgttggaccatcagggcgcgcattggaagaacgcggtgggcttctggctgctgggcctttgcaacaacttctcttatgtggtgatgctgagtgccgcccacgacatccttagccacaagaggacatcgggaaaccagagccatgtggacccaggcccaacgccgatcccccacaacagctcatcacgatttgactgcaactctgtctctacggctgctgtgctcctggcggacatcctccccacactcgtcatcaaattgttggctcctcttggccttcacctgctgccctacagcccccgggttctcgtcagtgggatttgtgctgctggaagcttcgtcctggttgccttttctcattctgtggggaccagcctgtgtggtgtggtcttcgctagcatctcatcaggccttggggaggtcaccttcctctccctcactgccttctaccccagggccgtgatctcctggtggtcctcagggactgggggagctgggctgctgggggccctgtcctacctgggcctcacccaggccggcctctcccctcagcagaccctgctgtccatgctgggtatccctgccctgctgctggccagctatttcttgttgctcacatctcctgaggcccaggaccctggaggggaagaagaagcagagagcgcagcccggcagcccctcataagaaccgaggccccggagtcgaagccaggctccagctccagcctctcccttcgggaaaggtggacagtgttcaagggtctgctgtggtacattgttcccttggtcgtagtttactttgccgagtatttcattaaccagggacttgtaagtgaggggtgctaggaggggtgtggaggtggcgattggggctgggacccacacagccccgtccatctcccctgtctggtatttgttgcagtttgaactcctctttttctggaacacttccctgagtcacgctcagcaataccgctggtaccagatgctgtaccaggctggcgtctttgcctcccgctcttctctccgctgctgtcgcatccgtttcacctgggccctggccctgctgcagtgcctcaacctggtgttcctgctggcagacgtgtggttcggctttctgccaagcatctacctcgtcttcctgatcattctgtatgaggggctcctgggaggcgcagcctacgtgaacaccttccacaacatcgccctggagaccagtgatgagcaccgggagtttgcaatggcggccacctgcatctctgacacactggggatctccctgtcggggctcctggctttgcctctgcatgacttcctctgccagctctcctgatactcgggatcctcaggacgcaggtcacattcacctgtgggcagagggacaggtcagacacccaggcccaccccagagaccctccatgaactgtgctcccagccttcccggcaggtctgggagtagggaagggctgaagccttgtttcccttgcaggggggccagccattgtctcccacttggggagtttcttcctggcatcatgccttctgaataaatgccgattttatccatgga

SEQ ID NO: 302078 - DNA, 1987 bp, Homo sapiens
cgctccagtttaaaacctgcggttccagggttctccagcccctccctttttcacgctccgaagccgagaaggcccaaagcgaagacagagaggacccggaagtagggaaaacctctgagcacgtgatgggggaacacgcgggtgctgtcacgtgatccgacaaacggcctctgcatagtgcagaacattctgctgctcttaaagaccctcatccctcccgtgggagccccctttggacactctatgaccctggaccctcgggggacctgaacttgatgcgatgggaggctgtgcaggctcgcggcggcgcttttcggattccgagggtgagtattcccgcccaccctcatggaacgaccacctctggctcgcagcccacctgaggggaatgagagctgactcggccccgggaggacacgcaaggagcggtcgtgcacctgagagtaggtgggggtcatgccctcttctcgctctcccaggggaggagaccgtcccggagccccggctccctctgttggaccatcagggcgcgcattggaagaacgcggtgggcttctggctgctgggcctttgcaacaacttctcttatgtggtgatgctgagtgccgcccacgacatccttagccacaagaggacatcgggaaaccagagccatgtggacccaggcccaacgccgatcccccacaacagctcatcacgatttgactgcaactctgtctctacggctgctgtgctcctggcggacatcctccccacactcgtcatcaaattgttggctcctcttggccttcacctgctgccctacagcccccgggttctcgtcagtgggatttgtgctgctggaagcttcgtcctggttgccttttctcattctgtggggaccagcctgtgtggtgtggtcttcgctagcatctcatcaggccttggggaggtcaccttcctctccctcactgccttctaccccagggccgtgatctcctggtggtcctcagggactgggggagctgggctgctgggggccctgtcctacctgggcctcacccaggccggcctctcccctcagcagaccctgctgtccatgctgggtatccctgccctgctgctggccagctatttcttgttgctcacatctcctgaggcccaggaccctggaggggaagaagaagcagagagcgcagcccggcagcccctcataagaaccgaggccccggagtcgaagccaggctccagctccagcctctcccttcgggaaaggtggacagtgttcaagggtctgctgtggtacattgttcccttggtcgtagtttactttgccgagtatttcattaaccagggactttttgaactcctctttttctggaacacttccctgagtcacgctcagcaataccgctggtaccagatgctgtaccaggctggcgtctttgcctcccgctcttctctccgctgctgtcgcatccgtttcacctgggccctggccctgctgcagtgcctcaacctggtgttcctgctggcagacgtgtggttcggctttctgccaagcatctacctcgtcttcctgatcattctgtatgaggggctcctgggaggcgcagcctacgtgaacaccttccacaacatcgccctggagaccagtgatgagcaccgggagtttgcaatggcggccacctgcatctctgacacactggggatctccctgtcggggctcctggctttgcctctgcatgacttcctctgccagctctcctgatactcgggatcctcaggacgcaggtcacattcacctgtgggcagagggacaggtcagacacccaggcccaccccagagaccctccatgaactgtgctcccagccttcccggcaggtctgggagtagggaagggctgaagccttgtttcccttgcaggggggccagccattgtctcccacttggggagtttcttcctggcatcatgccttctgaataaatgccgattttatccatgga

SEQ ID NO: 302079 - DNA, 1874 bp, Homo sapiens
cgctccagtttaaaacctgcggttccagggttctccagcccctccctttttcacgctccgaagccgagaaggcccaaagcgaagacagagaggacccggaagtagggaaaacctctgagcacgtgatgggggaacacgcgggtgctgtcacgtgatccgacaaacggcctctgcatagtgcagaacattctgctgctcttaaaggtacaggcctcagggtccctgctgtagacggggcgggggagagtacgatgggtggggcgtggtgggtcgtagggcgctcgagatggagcccccagcttccttgatggatcgcggggcgcgagtgccctagacaagccggagctgggaccggcaatcgggcgttgatccttgtcacctgtcgcagaccctcatccctcccgtgggagccccctttggacactctatgaccctggaccctcgggggacctgaacttgatgcgatgggaggctgtgcaggctcgcggcggcgcttttcggattccgagggggaggagaccgtcccggagccccggctccctctgttggaccatcagggcgcgcattggaagaacgcggtgggcttctggctgctgggcctttgcaacaacttctcttatgtggtgatgctgagtgccgcccacgacatccttagccacaagaggacatcgggaaaccagagccatgtggacccaggcccaacgccgatcccccacaacagctcatcacgatttgactgcaactctgtctctacggctgctgtgctcctggcggacatcctccccacactcgtcatcaaattgttggctcctcttggccttcacctgctgccctacagcccccgggttctcgtcagtgggatttgtgctgctggaagcttcgtcctggttgccttttctcattctgtggggaccagcctgtgtggtgtggtcttcgctagcatctcatcaggccttggggaggtcaccttcctctccctcactgccttctaccccagctatttcttgttgctcacatctcctgaggcccaggaccctggaggggaagaagaagcagagagcgcagcccggcagcccctcataagaaccgaggccccggagtcgaagccaggctccagctccagcctctcccttcgggaaaggtggacagtgttcaagggtctgctgtggtacattgttcccttggtcgtagtttactttgccgagtatttcattaaccagggactttttgaactcctctttttctggaacacttccctgagtcacgctcagcaataccgctggtaccagatgctgtaccaggctggcgtctttgcctcccgctcttctctccgctgctgtcgcatccgtttcacctgggccctggccctgctgcagtgcctcaacctggtgttcctgctggcagacgtgtggttcggctttctgccaagcatctacctcgtcttcctgatcattctgtatgaggggctcctgggaggcgcagcctacgtgaacaccttccacaacatcgccctggagaccagtgatgagcaccgggagtttgcaatggcggccacctgcatctctgacacactggggatctccctgtcggggctcctggctttgcctctgcatgacttcctctgccagctctcctgatactcgggatcctcaggacgcaggtcacattcacctgtgggcagagggacaggtcagacacccaggcccaccccagagaccctccatgaactgtgctcccagccttcccggcaggtctgggagtagggaagggctgaagccttgtttcccttgcaggggggccagccattgtctcccacttggggagtttcttcctggcatcatgccttctgaataaatgccgattttatccatgga

SEQ ID NO: 302080 - DNA, 1787 bp, Homo sapiens
cgctccagtttaaaacctgcggttccagggttctccagcccctccctttttcacgctccgaagccgagaaggcccaaagcgaagacagagaggacccggaagtagggaaaacctctgagcacgtgatgggggaacacgcgggtgctgtcacgtgatccgacaaacggcctctgcatagtgcagaacattctgctgctcttaaaggtacaggcctcagggtccctgctgtagacggggcgggggagagtacgatgggtggggcgtggtgggtcgtagggcgctcgagatggagcccccagcttccttgatggatcgcggggcgcgagtgccctagacaagccggagctgggaccggcaatcgggcgttgatccttgtcacctgtcgcagaccctcatccctcccgtgggagccccctttggacactctatgaccctggaccctcgggggacctgaacttgatgcgatgggaggctgtgcaggctcgcggcggcgcttttcggattccgagggctgctgggcctttgcaacaacttctcttatgtggtgatgctgagtgccgcccacgacatccttagccacaagaggacatcgggaaaccagagccatcccccgggttctcgtcagtgggatttgtgctgctggaagcttcgtcctggttgccttttctcattctgtggggaccagcctgtgtggtgtggtcttcgctagcatctcatcaggccttggggaggtcaccttcctctccctcactgccttctaccccagggccgtgatctcctggtggtcctcagggactgggggagctgggctgctgggggccctgtcctacctgggcctcacccaggccggcctctcccctcagcagaccctgctgtccatgctgggtatccctgccctgctgctggccagctatttcttgttgctcacatctcctgaggcccaggaccctggaggggaagaagaagcagagagcgcagcccggcagcccctcataagaaccgaggccccggagtcgaagccaggctccagctccagcctctcccttcgggaaaggtggacagtgttcaagggtctgctgtggtacattgttcccttggtcgtagtttactttgccgagtatttcattaaccagggactttttgaactcctctttttctggaacacttccctgagtcacgctcagcaataccgctggtaccagatgctgtaccaggctggcgtctttgcctcccgctcttctctccgctgctgtcgcatccgtttcacctgggccctggccctgctgcagtgcctcaacctggtgttcctgctggcagacgtgtggttcggctttctgccaagcatctacctcgtcttcctgatcattctgtatgaggggctcctgggaggcgcagcctacgtgaacaccttccacaacatcgccctggagaccagtgatgagcaccgggagtttgcaatggcggccacctgcatctctgacacactggggatctccctgtcggggctcctggctttgcctctgcatgacttcctctgccagctctcctgatactcgggatcctcaggacgcaggtcacattcacctgtgggcagagggacaggtcagacacccaggcccaccccagagaccctccatgaactgtgctcccagccttcccggcaggtctgggagtagggaagggctgaagccttgtttcccttgcaggggggccagccattgtctcccacttggggagtttcttcctggcatcatgccttctgaataaatgccgattttatccatgga

SEQ ID NO: 302081 - DNA, 1801 bp, Homo sapiens
cgctccagtttaaaacctgcggttccagggttctccagcccctccctttttcacgctccgaagccgagaaggcccaaagcgaagacagagaggacccggaagtagggaaaacctctgagcacgtgatgggggaacacgcgggtgctgtcacgtgatccgacaaacggcctctgcatagtgcagaacattctgctgctcttaaaggtacaggcctcagggtccctgctgtagacggggcgggggagagtacgatgggtggggcgtggtgggtcgtagggcgctcgagatggagcccccagcttccttgatggatcgcggggcgcgagtgccctagacaagccggagctgggaccggcaatcgggcgttgatccttgtcacctgtcgcagaccctcatccctcccgtgggagccccctttggacactctatgaccctggaccctcgggggacctgaacttgatgcgatgggaggctgtgcaggctcgcggcggcgcttttcggattccgagggggaggagaccgtcccggagccccggctccctctgttggaccatcagggcgcgcattggaagaacgcggtgggcttctggctgctgggcctttgcaacaacttctcttatgtggtgatgctgagtgccgcccacgacatccttagccacaagaggacatcgggaaaccagagccatgtggacccaggcccaacgccgatcccccacaacagctcatcacgatttgactgcaactctgtctctacggctgctgtgctcctggcggacatcctccccacactcgtcatcaaattgttggctcctcttggccttcacctgctgccctacagcccccgggttctcgtcagtgggatttgtgctgctggaagcttcgtcctggttgccttttctcattctgtggggaccagcctgtgtgctatttcttgttgctcacatctcctgaggcccaggaccctggaggggaagaagaagcagagagcgcagcccggcagcccctcataagaaccgaggccccggagtcgaagccaggctccagctccagcctctcccttcgggaaaggtggacagtgttcaagggtctgctgtggtacattgttcccttggtcgtagtttactttgccgagtatttcattaaccagggactttttgaactcctctttttctggaacacttccctgagtcacgctcagcaataccgctggtaccagatgctgtaccaggctggcgtctttgcctcccgctcttctctccgctgctgtcgcatccgtttcacctgggccctggccctgctgcagtgcctcaacctggtgttcctgctggcagacgtgtggttcggctttctgccaagcatctacctcgtcttcctgatcattctgtatgaggggctcctgggaggcgcagcctacgtgaacaccttccacaacatcgccctggagaccagtgatgagcaccgggagtttgcaatggcggccacctgcatctctgacacactggggatctccctgtcggggctcctggctttgcctctgcatgacttcctctgccagctctcctgatactcgggatcctcaggacgcaggtcacattcacctgtgggcagagggacaggtcagacacccaggcccaccccagagaccctccatgaactgtgctcccagccttcccggcaggtctgggagtagggaagggctgaagccttgtttcccttgcaggggggccagccattgtctcccacttggggagtttcttcctggcatcatgccttctgaataaatgccgattttatccatgga

SEQ ID NO: 302082 - DNA, 1721 bp, Homo sapiens
cgctccagtttaaaacctgcggttccagggttctccagcccctccctttttcacgctccgaagccgagaaggcccaaagcgaagacagagaggacccggaagtagggaaaacctctgagcacgtgatgggggaacacgcgggtgctgtcacgtgatccgacaaacggcctctgcatagtgcagaacattctgctgctcttaaaggtacaggcctcagggtccctgctgtagacggggcgggggagagtacgatgggtggggcgtggtgggtcgtagggcgctcgagatggagcccccagcttccttgatggatcgcggggcgcgagtgccctagacaagccggagctgggaccggcaatcgggcgttgatccttgtcacctgtcgcagaccctcatccctcccgtgggagccccctttggacactctatgaccctggaccctcgggggacctgaacttgatgcgatgggaggctgtgcaggctcgcggcggcgcttttcggattccgagggggaggagaccgtcccggagccccggctccctctgttggaccatcagggcgcgcattggaagaacgcggtgggcttctggctgctgggcctttgcaacaacttctcttatgtggtgatgctgagtgccgcccacgacatccttagccacaagaggacatcgggaaaccagagccatgtggacccaggcccaacgccgatcccccacaacagctcatcacgatttgactgcaactctgtctctacggctcccccgggttctcgtcagtgggatttgtgctgctggaagcttcgtcctggttgccttttctcattctgtggggaccagcctgtgtgctatttcttgttgctcacatctcctgaggcccaggaccctggaggggaagaagaagcagagagcgcagcccggcagcccctcataagaaccgaggccccggagtcgaagccaggctccagctccagcctctcccttcgggaaaggtggacagtgttcaagggtctgctgtggtacattgttcccttggtcgtagtttactttgccgagtatttcattaaccagggactttttgaactcctctttttctggaacacttccctgagtcacgctcagcaataccgctggtaccagatgctgtaccaggctggcgtctttgcctcccgctcttctctccgctgctgtcgcatccgtttcacctgggccctggccctgctgcagtgcctcaacctggtgttcctgctggcagacgtgtggttcggctttctgccaagcatctacctcgtcttcctgatcattctgtatgaggggctcctgggaggcgcagcctacgtgaacaccttccacaacatcgccctggagaccagtgatgagcaccgggagtttgcaatggcggccacctgcatctctgacacactggggatctccctgtcggggctcctggctttgcctctgcatgacttcctctgccagctctcctgatactcgggatcctcaggacgcaggtcacattcacctgtgggcagagggacaggtcagacacccaggcccaccccagagaccctccatgaactgtgctcccagccttcccggcaggtctgggagtagggaagggctgaagccttgtttcccttgcaggggggccagccattgtctcccacttggggagtttcttcctggcatcatgccttctgaataaatgccgattttatccatgga

SEQ ID NO: 302083 - DNA, 1874 bp, Homo sapiens
cgctccagtttaaaacctgcggttccagggttctccagcccctccctttttcacgctccgaagccgagaaggcccaaagcgaagacagagaggacccggaagtagggaaaacctctgagcacgtgatgggggaacacgcgggtgctgtcacgtgatccgacaaacggcctctgcatagtgcagaacattctgctgctcttaaaggtacaggcctcagggtccctgctgtagacggggcgggggagagtacgatgggtggggcgtggtgggtcgtagggcgctcgagatggagcccccagcttccttgatggatcgcggggcgcgagtgccctagacaagccggagctgggaccggcaatcgggcgttgatccttgtcacctgtcgcagaccctcatccctcccgtgggagccccctttggacactctatgaccctggaccctcgggggacctgaacttgatgcgatgggaggctgtgcaggctcgcggcggcgcttttcggattccgagggggaggagaccgtcccggagccccggctccctctgttggaccatcagggcgcgcattggaagaacgcggtgggcttctggctgctgggcctttgcaacaacttctcttatgtggtgatgctgagtgccgcccacgacatccttagccacaagaggacatcgggaaaccagagccatgtggacccaggcccaacgccgatcccccacaacagctcatcacgatttgactgcaactctgtctctacggctcccccgggttctcgtcagtgggatttgtgctgctggaagcttcgtcctggttgccttttctcattctgtggggaccagcctgtgtggtgtggtcttcgctagcatctcatcaggccttggggaggtcaccttcctctccctcactgccttctaccccagctgggcctcacccaggccggcctctcccctcagcagaccctgctgtccatgctgggtatccctgccctgctgctggccagctatttcttgttgctcacatctcctgaggcccaggaccctggaggggaagaagaagcagagagcgcagcccggcagcccctcataagaaccgaggccccggagtcgaagccaggctccagctccagcctctcccttcgggaaaggtggacagtgttcaagggtctgctgtggtacattgttcccttggtcgtagtttactttgccgagtatttcattaaccagggactttttgaactcctctttttctggaacacttccctgagtcacgctcagcaataccgctggtaccagatgctgtaccaggctggcgtctttgcctcccgctcttctctccgctgctgtcgcatccgtttcacctgggccctggccctgctgcagtgcctcaacctggtgttcctgctggcagacgtgtggttcggctttctgccaagcatctacctcgtcttcctgatcattctgtatgaggggctcctgggaggcgcagcctacgtgaacaccttccacaacatcgccctggagaccagtgatgagcaccgggagtttgcaatggcggccacctgcatctctgacacactggggatctccctgtcggggctcctggctttgcctctgcatgacttcctctgccagctctcctgatactcgggatcctcaggacgcaggtcacattcacctgtgggcagagggacaggtcagacacccaggcccaccccagagaccctccatgaactgtgctcccagccttcccggcaggtctgggagtagggaagggctgaagccttgtttcccttgcaggggggccagccattgtctcccacttggggagtttcttcctggcatcatgccttctgaataaatgccgattttatccatgga

SEQ ID NO: 302084 - DNA, 1649 bp, Homo sapiens
cgctccagtttaaaacctgcggttccagggttctccagcccctccctttttcacgctccgaagccgagaaggcccaaagcgaagacagagaggacccggaagtagggaaaacctctgagcacgtgatgggggaacacgcgggtgctgtcacgtgatccgacaaacggcctctgcatagtgcagaacattctgctgctcttaaaggtacaggcctcagggtccctgctgtagacggggcgggggagagtacgatgggtggggcgtggtgggtcgtagggcgctcgagatggagcccccagcttccttgatggatcgcggggcgcgagtgccctagacaagccggagctgggaccggcaatcgggcgttgatccttgtcacctgtcgcagaccctcatccctcccgtgggagccccctttggacactctatgaccctggaccctcgggggacctgaacttgatgcgatgggaggctgtgcaggctcgcggcggcgcttttcggattccgagggggaggagaccgtcccggagccccggctccctctgttggaccatcagggcgcgcattggaagaacgcggtgggcttctggctgctgggcctttgcaacaacttctcttatgtggtgatgctgagtgccgcccacgacatccttagccacaagaggacatcgggaaaccagagccatcccccgggttctcgtcagtgggatttgtgctgctggaagcttcgtcctggttgccttttctcattctgtggggaccagcctgtgtgctatttcttgttgctcacatctcctgaggcccaggaccctggaggggaagaagaagcagagagcgcagcccggcagcccctcataagaaccgaggccccggagtcgaagccaggctccagctccagcctctcccttcgggaaaggtggacagtgttcaagggtctgctgtggtacattgttcccttggtcgtagtttactttgccgagtatttcattaaccagggactttttgaactcctctttttctggaacacttccctgagtcacgctcagcaataccgctggtaccagatgctgtaccaggctggcgtctttgcctcccgctcttctctccgctgctgtcgcatccgtttcacctgggccctggccctgctgcagtgcctcaacctggtgttcctgctggcagacgtgtggttcggctttctgccaagcatctacctcgtcttcctgatcattctgtatgaggggctcctgggaggcgcagcctacgtgaacaccttccacaacatcgccctggagaccagtgatgagcaccgggagtttgcaatggcggccacctgcatctctgacacactggggatctccctgtcggggctcctggctttgcctctgcatgacttcctctgccagctctcctgatactcgggatcctcaggacgcaggtcacattcacctgtgggcagagggacaggtcagacacccaggcccaccccagagaccctccatgaactgtgctcccagccttcccggcaggtctgggagtagggaagggctgaagccttgtttcccttgcaggggggccagccattgtctcccacttggggagtttcttcctggcatcatgccttctgaataaatgccgattttatccatgga

SEQ ID NO: 302085 - DNA, 1545 bp, Homo sapiens
cgctccagtttaaaacctgcggttccagggttctccagcccctccctttttcacgctccgaagccgagaaggcccaaagcgaagacagagaggacccggaagtagggaaaacctctgagcacgtgatgggggaacacgcgggtgctgtcacgtgatccgacaaacggcctctgcatagtgcagaacattctgctgctcttaaaggtacaggcctcagggtccctgctgtagacggggcgggggagagtacgatgggtggggcgtggtgggtcgtagggcgctcgagatggagcccccagcttccttgatggatcgcggggcgcgagtgccctagacaagccggagctgggaccggcaatcgggcgttgatccttgtcacctgtcgcagaccctcatccctcccgtgggagccccctttggacactctatgaccctggaccctcgggggacctgaacttgatgcgatgggaggctgtgcaggctcgcggcggcgcttttcggattccgagggtggacccaggcccaacgccgatcccccacaacagctcatcacgatttgactgcaactctgtctctacggctcccccgggttctcgtcagtgggatttgtgctgctggaagcttcgtcctggttgccttttctcattctgtggggaccagcctgtgtgctatttcttgttgctcacatctcctgaggcccaggaccctggaggggaagaagaagcagagagcgcagcccggcagcccctcataagaaccgaggccccggagtcgaagccaggctccagctccagcctctcccttcgggaaaggtggacagtgttcaagggtctgctgtggtacattgttcccttggtcgtagtttactttgccgagtatttcattaaccagggactttttgaactcctctttttctggaacacttccctgagtcacgctcagcaataccgctggtaccagatgctgtaccaggctggcgtctttgcctcccgctcttctctccgctgctgtcgcatccgtttcacctgggccctggccctgctgcagtgcctcaacctggtgttcctgctggcagacgtgtggttcggctttctgccaagcatctacctcgtcttcctgatcattctgtatgaggggctcctgggaggcgcagcctacgtgaacaccttccacaacatcgccctggagaccagtgatgagcaccgggagtttgcaatggcggccacctgcatctctgacacactggggatctccctgtcggggctcctggctttgcctctgcatgacttcctctgccagctctcctgatactcgggatcctcaggacgcaggtcacattcacctgtgggcagagggacaggtcagacacccaggcccaccccagagaccctccatgaactgtgctcccagccttcccggcaggtctgggagtagggaagggctgaagccttgtttcccttgcaggggggccagccattgtctcccacttggggagtttcttcctggcatcatgccttctgaataaatgccgattttatccatgga

SEQ ID NO: 302086 - DNA, 1987 bp, Homo sapiens
cgctccagtttaaaacctgcggttccagggttctccagcccctccctttttcacgctccgaagccgagaaggcccaaagcgaagacagagaggacccggaagtagggaaaacctctgagcacgtgatgggggaacacgcgggtgctgtcacgtgatccgacaaacggcctctgcatagtgcagaacattctgctgctcttaaaggtacaggcctcagggtccctgctgtagacggggcgggggagagtacgatgggtggggcgtggtgggtcgtagggcgctcgagatggagcccccagcttccttgatggatcgcggggcgcgagtgccctagacaagccggagctgggaccggcaatcgggcgttgatccttgtcacctgtcgcagaccctcatccctcccgtgggagccccctttggacactctatgaccctggaccctcgggggacctgaacttgatgcgatgggaggctgtgcaggctcgcggcggcgcttttcggattccgagggctgctgggcctttgcaacaacttctcttatgtggtgatgctgagtgccgcccacgacatccttagccacaagaggacatcgggaaaccagagccatgtggacccaggcccaacgccgatcccccacaacagctcatcacgatttgactgcaactctgtctctacggctcccccgggttctcgtcagtgggatttgtgctgctggaagcttcgtcctggttgccttttctcattctgtggggaccagcctgtgtggtgtggtcttcgctagcatctcatcaggccttggggaggtcaccttcctctccctcactgccttctaccccagggccgtgatctcctggtggtcctcagggactgggggagctgggctgctgggggccctgtcctacctgggcctcacccaggccggcctctcccctcagcagaccctgctgtccatgctgggtatccctgccctgctgctggccagctatttcttgttgctcacatctcctgaggcccaggaccctggaggggaagaagaagcagagagcgcagcccggcagcccctcataagaaccgaggccccggagtcgaagccaggctccagctccagcctctcccttcgggaaaggtggacagtgttcaagggtctgctgtggtacattgttcccttggtcgtagtttactttgccgagtatttcattaaccagggactttttgaactcctctttttctggaacacttccctgagtcacgctcagcaataccgctggtaagaggagcgagggcagtgggctgggagggcgccgtggtgatgcagctgccctgcccagtaggcaccggggggagcgggatggtccctggaggagcctcctctcctccccccaaccctaacctcaggtaccagatgctgtaccaggctggcgtctttgcctcccgctcttctctccgctgctgtcgcatccgtttcacctgggccctggccctgctgcagtgcctcaacctggtgttcctgctggcagacgtgtggttcggctttctgccaagcatctacctcgtcttcctgatcattctgtatgaggggctcctgggaggcgcagcctacgtgaacaccttccacaacatcgccctggagaccagtgatgagcaccgggagtttgcaatggcggccacctgcatctctgacacactggggatctccctgtcggggctcctggctttgcctctgcatgacttcctctgccagctctcctgatactcgggatcctcaggacgcaggtcacattcacctgtgggcagagggacaggtcagacacccaggcccaccccagagaccctccatgaactgtgctcccagccttcccggcaggtctgggagtagggaagggctgaagccttgtttcccttgcaggggggccagccattgtctcccacttggggagtttcttcctggcatcatgccttctgaataaatgccgattttatccatgga

SEQ ID NO: 302087 - DNA, 1810 bp, Homo sapiens
cgctccagtttaaaacctgcggttccagggttctccagcccctccctttttcacgctccgaagccgagaaggcccaaagcgaagacagagaggacccggaagtagggaaaacctctgagcacgtgatgggggaacacgcgggtgctgtcacgtgatccgacaaacggcctctgcatagtgcagaacattctgctgctcttaaaggtacaggcctcagggtccctgctgtagacggggcgggggagagtacgatgggtggggcgtggtgggtcgtagggcgctcgagatggagcccccagcttccttgatggatcgcggggcgcgagtgccctagacaagccggagctgggaccggcaatcgggcgttgatccttgtcacctgtcgcagaccctcatccctcccgtgggagccccctttggacactctatgaccctggaccctcgggggacctgaacttgatgcgatgggaggctgtgcaggctcgcggcggcgcttttcggattccgagggggaggagaccgtcccggagccccggctccctctgttggaccatcagggcgcgcattggaagaacgcggtgggcttctggctgctgggcctttgcaacaacttctcttatgtggtgatgctgagtgccgcccacgacatccttagccacaagaggacatcgggaaaccagagccatgtggacccaggcccaacgccgatcccccacaacagctcatcacgatttgactgcaactctgtctctacggctgctgtgctcctggcggacatcctccccacactcgtcatcaaattgttggctcctcttggccttcacctgctgccctacagcccccgggttctcgtcagtgggatttgtgctgctggaagcttcgtcctggttgccttttctcattctgtggggaccagcctgtgtggctccagctccagcctctcccttcgggaaaggtggacagtgttcaagggtctgctgtggtacattgttcccttggtcgtagtttactttgccgagtatttcattaaccagggactttttgaactcctctttttctggaacacttccctgagtcacgctcagcaataccgctggtaccagatgctgtaccaggctggcgtctttgcctcccgctcttctctccgctgctgtcgcatccgtttcacctgggccctggccctgctgcagatggagtctcgctctgttgcccaggctggaatgtagcggtgcaatcttggctcactgcaacccctgcctcccagattcaagcgattctcaagcctcagccttccgagtagctgggattacagtgcctcaacctggtgttcctgctggcagacgtgtggttcggctttctgccaagcatctacctcgtcttcctgatcattctgtatgaggggctcctgggaggcgcagcctacgtgaacaccttccacaacatcgccctggagaccagtgatgagcaccgggagtttgcaatggcggccacctgcatctctgacacactggggatctccctgtcggggctcctggctttgcctctgcatgacttcctctgccagctctcctgatactcgggatcctcaggacgcaggtcacattcacctgtgggcagagggacaggtcagacacccaggcccaccccagagaccctccatgaactgtgctcccagccttcccggcaggtctgggagtagggaagggctgaagccttgtttcccttgcaggggggccagccattgtctcccacttggggagtttcttcctggcatcatgccttctgaataaatgccgattttatccatgga

SEQ ID NO: 302088 - DNA, 1028 bp, Homo sapiens
cgctccagtttaaaacctgcggttccagggttctccagcccctccctttttcacgctccgaagccgagaaggcccaaagcgaagacagagaggacccggaagtagggaaaacctctgagcacgtgatgggggaacacgcgggtgctgtcacgtgatccgacaaacggcctctgcatagtgcagaacattctgctgctcttaaaggtacaggcctcagggtccctgctgtagacggggcgggggagagtacgatgggtggggcgtggtgggtcgtagggcgctcgagatggagcccccagcttccttgatggatcgcggggcgcgagtgccctagacaagccggagctgggaccggcaatcgggcgttgatccttgtcacctgtcgcagaccctcatccctcccgtgggagccccctttggacactctatgaccctggaccctcgggggacctgaacttgatgcgatgggaggctgtgcaggctcgcggcggcgcttttcggattccgagggctgctgggcctttgcaacaacttctcttatgtggtgatgctgagtgccgcccacgacatccttagccacaagaggacatcgggaaaccagagccatgtggacccaggcccaacgccgatcccccacaacagctcatcacgatttgactgcaactctgtctctacggctgctgtgctcctggcggacatcctccccacactcgtcatcaaattgttggctccagctccagcctctcccttcgggaaaggtggacagtgttcaagtctgccagctctcctgatactcgggatcctcaggacgcaggtcacattcacctgtgggcagagggacaggtcagacacccaggcccaccccagagaccctccatgaactgtgctcccagccttcccggcaggtctgggagtagggaagggctgaagccttgtttcccttgcaggggggccagccattgtctcccacttggggagtttcttcctggcatcatgccttctgaataaatgccgattttatccatgga

SEQ ID NO: 302089 - DNA, 1938 bp, Homo sapiens
cgctccagtttaaaacctgcggttccagggttctccagcccctccctttttcacgctccgaagccgagaaggcccaaagcgaagacagagaggacccggaagtagggaaaacctctgagcacgtgatgggggaacacgcgggtgctgtcacgtgatccgacaaacggcctctgcatagtgcagaacattctgctgctcttaaaggtacaggcctcagggtccctgctgtagacggggcgggggagagtacgatgggtggggcgtggtgggtcgtagggcgctcgagatggagcccccagcttccttgatggatcgcggggcgcgagtgccctagacaagccggagctgggaccggcaatcgggcgttgatccttgtcacctgtcgcagaccctcatccctcccgtgggagccccctttggacactctatgaccctggaccctcgggggacctgaacttgatgcgatgggaggctgtgcaggctcgcggcggcgcttttcggattccgagggggaggagaccgtcccggagccccggctccctctgttggaccatcagggcgcgcattggaagaacgcggtgggcttctggctgctgggcctttgcaacaacttctcttatgtggtgatgctgagtgccgcccacgacatccttagccacaagaggacatcgggaaaccagagccatgtggacccaggcccaacgccgatcccccacaacagctcatcacgatttgactgcaactctgtctctacggctcccccgggttctcgtcagtgggatttgtgctgctggaagcttcgtcctggttgccttttctcattctgtggggaccagcctgtgtggtgtggtcttcgctagcatctcatcaggccttggggaggtcaccttcctctccctcactgccttctaccccagggccgtgatctcctggtggtcctcagggactgggggagctgggctgctgggggccctgtcctacctgggcctcacccaggccggcctctcccctcagcagaccctgctgtccatgctgggtatccctgccctgctgctggccagctatttcttgttgctcacatctcctgaggcccaggaccctggaggggaagaagaagcagagagcgcagcccggcagcccctcataagaaccgaggccccggagtcgaagccaggctccagctccagcctctcccttcgggaaaggtggacagtgttcaagggtctgctgtggtacattgttcccttggtcgtagtttactttgccgagtatttcattaaccagggactttttgaactcctctttttctggaacacttccctgagtcacgctcagcaataccgctggtaccagatgctgtaccaggctggcgtctttgcctcccgctcttctctccgctgctgtcgcatccgtttcacctgggccctggccctgctgcagtgcctcaacctggtgttcctgctggcagacgtgtggttcggctttctgccaagcatctacctcgtcttcctgatcattctgtatgaggggctcctgggaggcgcagcctacgtgaacaccttccacaacatcgccctggagaccagtgatgagcaccgggagtttgcaatggcggccacctgcatctctgacacactggggatctccctgtcggggctcctggctttgcctctgcatgacttcctctgccagctctcctgatactcgggatcctcaggacgcaggtcacattcacctgtgggcagagggacaggtcagacacccaggcccaccccagagaccctccatgaactgtgctcccagccttcccggcaggtctgggagtagggaagggctgaagccttgtttcccttgcaggggggccagccattgtctcccacttggggagtttcttcctggcatcatgccttctgaataaatgccgattttatccatgga

SEQ ID NO: 302090 - DNA, 2191 bp, Homo sapiens
cgctccagtttaaaacctgcggttccagggttctccagcccctccctttttcacgctccgaagccgagaaggcccaaagcgaagacagagaggacccggaagtagggaaaacctctgagcacgtgatgggggaacacgcgggtgctgtcacgtgatccgacaaacggcctctgcatagtgcagaacattctgctgctcttaaaggtacaggcctcagggtccctgctgtagacggggcgggggagagtacgatgggtggggcgtggtgggtcgtagggcgctcgagatggagcccccagcttccttgatggatcgcggggcgcgagtgccctagacaagccggagctgggaccggcaatcgggcgttgatccttgtcacctgtcgcagaccctcatccctcccgtgggagccccctttggacactctatgaccctggaccctcgggggacctgaacttgatgcgatgggaggctgtgcaggctcgcggcggcgcttttcggattccgagggggaggagaccgtcccggagccccggctccctctgttggaccatcagggcgcgcattggaagaacgcggtgggcttctggctgctgggcctttgcaacaacttctcttatgtggtgatgctgagtgccgcccacgacatccttagccacaagaggacatcgggaaaccagagccatgtggacccaggcccaacgccgatcccccacaacagctcatcacgatttgactgcaactctgtctctacggctgctgtgctcctggcggacatcctccccacactcgtcatcaaattgttggctcctcttggccttcacctgctgccctacagcccccgggttctcgtcagtgggatttgtgctgctggaagcttcgtcctggttgccttttctcattctgtggggaccagcctgtgtggtgtggtcttcgctagcatctcatcaggccttggggaggtcaccttcctctccctcactgccttctaccccagggccgtgatctcctggtggtcctcagggactgggggagctgggctgctgggggccctgtcctacctgggcctcacccaggccggcctctcccctcagcagaccctgctgtccatgctgggtatccctgccctgctgctggccagctatttcttgttgctcacatctcctgaggcccaggaccctggaggggaagaagaagcagagagcgcagcccggcagcccctcataagaaccgaggccccggagtcgaagccaggctccagctccagcctctcccttcgggaaaggtggacagtgttcaagttcggatgatggctggggtatgtccctgtggggcttgctcacctccaggccccccgcttatatcttctgccttttccagggtctgctgtggtacattgttcccttggtcgtagtttactttgccgagtatttcattaaccagggacttgtaagtgaggggtgctaggaggggtgtggaggtggcgattggggctgggacccacacagccccgtccatctcccctgtctggtatttgttgcagtttgaactcctctttttctggaacacttccctgagtcacgctcagcaataccgctggtaccagatgctgtaccaggctggcgtctttgcctcccgctcttctctccgctgctgtcgcatccgtttcacctgggccctggccctgctgcagtgcctcaacctggtgttcctgctggcagacgtgtggttcggctttctgccaagcatctacctcgtcttcctgatcattctgtatgaggggctcctgggaggcgcagcctacgtgaacaccttccacaacatcgccctggagaccagtgatgagcaccgggagtttgcaatggcggccacctgcatctctgacacactggggatctccctgtcggggctcctggctttgcctctgcatgacttcctctgccagctctcctgatactcgggatcctcaggacgcaggtcacattcacctgtgggcagagggacaggtcagacacccaggcccaccccagagaccctccatgaactgtgctcccagccttcccggcaggtctgggagtagggaagggctgaagccttgtttcccttgcaggggggccagccattgtctcccacttggggagtttcttcctggcatcatgccttctgaataaatgccgattttatccatgga

SEQ ID NO: 302091 - DNA, 1632 bp, Homo sapiens
cgctccagtttaaaacctgcggttccagggttctccagcccctccctttttcacgctccgaagccgagaaggcccaaagcgaagacagagaggacccggaagtagggaaaacctctgagcacgtgatgggggaacacgcgggtgctgtcacgtgatccgacaaacggcctctgcatagtgcagaacattctgctgctcttaaaggtacaggcctcagggtccctgctgtagacggggcgggggagagtacgatgggtggggcgtggtgggtcgtagggcgctcgagatggagcccccagcttccttgatggatcgcggggcgcgagtgccctagacaagccggagctgggaccggcaatcgggcgttgatccttgtcacctgtcgcagaccctcatccctcccgtgggagccccctttggacactctatgaccctggaccctcgggggacctgaacttgatgcgatgggaggctgtgcaggctcgcggcggcgcttttcggattccgagggggaggagaccgtcccggagccccggctccctctgttggaccatcagggcgcgcattggaagaacgcggtgggcttctggctgtgctcctggcggacatcctccccacactcgtcatcaaattgttggctcctcttggccttcacctgctgccctacagcccccgggttctcgtcagtgggatttgtgctgctggaagcttcgtcctggttgccttttctcattctgtggggaccagcctgtgtgctatttcttgttgctcacatctcctgaggcccaggaccctggaggggaagaagaagcagagagcgcagcccggcagcccctcataagaaccgaggccccggagtcgaagccaggctccagctccagcctctcccttcgggaaaggtggacagtgttcaagggtctgctgtggtacattgttcccttggtcgtagtttactttgccgagtatttcattaaccagggactttttgaactcctctttttctggaacacttccctgagtcacgctcagcaataccgctggtaccagatgctgtaccaggctggcgtctttgcctcccgctcttctctccgctgctgtcgcatccgtttcacctgggccctggccctgctgcagtgcctcaacctggtgttcctgctggcagacgtgtggttcggctttctgccaagcatctacctcgtcttcctgatcattctgtatgaggggctcctgggaggcgcagcctacgtgaacaccttccacaacatcgccctggagaccagtgatgagcaccgggagtttgcaatggcggccacctgcatctctgacacactggggatctccctgtcggggctcctggctttgcctctgcatgacttcctctgccagctctcctgatactcgggatcctcaggacgcaggtcacattcacctgtgggcagagggacaggtcagacacccaggcccaccccagagaccctccatgaactgtgctcccagccttcccggcaggtctgggagtagggaagggctgaagccttgtttcccttgcaggggggccagccattgtctcccacttggggagtttcttcctggcatcatgccttctgaataaatgccgattttatccatgga

SEQ ID NO: 302092 - DNA, 1929 bp, Homo sapiens
cgctccagtttaaaacctgcggttccagggttctccagcccctccctttttcacgctccgaagccgagaaggcccaaagcgaagacagagaggacccggaagtagggaaaacctctgagcacgtgatgggggaacacgcgggtgctgtcacgtgatccgacaaacggcctctgcatagtgcagaacattctgctgctcttaaaggtacaggcctcagggtccctgctgtagacggggcgggggagagtacgatgggtggggcgtggtgggtcgtagggcgctcgagatggagcccccagcttccttgatggatcgcggggcgcgagtgccctagacaagccggagctgggaccggcaatcgggcgttgatccttgtcacctgtcgcagaccctcatccctcccgtgggagccccctttggacactctatgaccctggaccctcgggggacctgaacttgatgcgatgggaggctgtgcaggctcgcggcggcgcttttcggattccgagggggaggagaccgtcccggagccccggctccctctgttggaccatcagggcgcgcattggaagaacgcggtgggcttctggctgctgggcctttgcaacaacttctcttatgtggtgatgctgagtgccgcccacgacatccttagccacaagaggacatcgggaaaccagagccatgtggacccaggcccaacgccgatcccccacaacagctcatcacgatttgactgcaactctgtctctacggctgctgtgctcctggcggacatcctccccacactcgtcatcaaattgttggctcctcttggccttcacctgctgccctacagcccccgggttctcgtcagtgggatttgtgctgctggaagcttcgtcctggttgccttttctcattctgtggggaccagcctgtgtgctatttcttgttgctcacatctcctgaggcccaggaccctggaggggaagaagaagcagagagcgcagcccggcagcccctcataagaaccgaggccccggagtcgaagccaggctccagctccagcctctcccttcgggaaaggtggacagtgttcaagggtctgctgtggtacattgttcccttggtcgtagtttactttgccgagtatttcattaaccagggactttttgaactcctctttttctggaacacttccctgagtcacgctcagcaataccgctggtaagaggagcgagggcagtgggctgggagggcgccgtggtgatgcagctgccctgcccagtaggcaccggggggagcgggatggtccctggaggagcctcctctcctccccccaaccctaacctcaggtaccagatgctgtaccaggctggcgtctttgcctcccgctcttctctccgctgctgtcgcatccgtttcacctgggccctggccctgctgcagtgcctcaacctggtgttcctgctggcagacgtgtggttcggctttctgccaagcatctacctcgtcttcctgatcattctgtatgaggggctcctgggaggcgcagcctacgtgaacaccttccacaacatcgccctggagaccagtgatgagcaccgggagtttgcaatggcggccacctgcatctctgacacactggggatctccctgtcggggctcctggctttgcctctgcatgacttcctctgccagctctcctgatactcgggatcctcaggacgcaggtcacattcacctgtgggcagagggacaggtcagacacccaggcccaccccagagaccctccatgaactgtgctcccagccttcccggcaggtctgggagtagggaagggctgaagccttgtttcccttgcaggggggccagccattgtctcccacttggggagtttcttcctggcatcatgccttctgaataaatgccgattttatccatgga

SEQ ID NO: 302093 - DNA, 1642 bp, Homo sapiens
cgctccagtttaaaacctgcggttccagggttctccagcccctccctttttcacgctccgaagccgagaaggcccaaagcgaagacagagaggacccggaagtagggaaaacctctgagcacgtgatgggggaacacgcgggtgctgtcacgtgatccgacaaacggcctctgcatagtgcagaacattctgctgctcttaaaggtacaggcctcagggtccctgctgtagacggggcgggggagagtacgatgggtggggcgtggtgggtcgtagggcgctcgagatggagcccccagcttccttgatggatcgcggggcgcgagtgccctagacaagccggagctgggaccggcaatcgggcgttgatccttgtcacctgtcgcagaccctcatccctcccgtgggagccccctttggacactctatgaccctggaccctcgggggacctgaacttgatgcgatgggaggctgtgcaggctcgcggcggcgcttttcggattccgagggctgctgggcctttgcaacaacttctcttatgtggtgatgctgagtgccgcccacgacatccttagccacaagaggacatcgggaaaccagagccatgtggacccaggcccaacgccgatcccccacaacagctcatcacgatttgactgcaactctgtctctacggctcccccgggttctcgtcagtgggatttgtgctgctggaagcttcgtcctggttgccttttctcattctgtggggaccagcctgtgtgctatttcttgttgctcacatctcctgaggcccaggaccctggaggggaagaagaagcagagagcgcagcccggcagcccctcataagaaccgaggccccggagtcgaagccaggctccagctccagcctctcccttcgggaaaggtggacagtgttcaagggtctgctgtggtacattgttcccttggtcgtagtttactttgccgagtatttcattaaccagggactttttgaactcctctttttctggaacacttccctgagtcacgctcagcaataccgctggtaccagatgctgtaccaggctggcgtctttgcctcccgctcttctctccgctgctgtcgcatccgtttcacctgggccctggccctgctgcagtgcctcaacctggtgttcctgctggcagacgtgtggttcggctttctgccaagcatctacctcgtcttcctgatcattctgtatgaggggctcctgggaggcgcagcctacgtgaacaccttccacaacatcgccctggagaccagtgatgagcaccgggagtttgcaatggcggccacctgcatctctgacacactggggatctccctgtcggggctcctggctttgcctctgcatgacttcctctgccagctctcctgatactcgggatcctcaggacgcaggtcacattcacctgtgggcagagggacaggtcagacacccaggcccaccccagagaccctccatgaactgtgctcccagccttcccggcaggtctgggagtagggaagggctgaagccttgtttcccttgcaggggggccagccattgtctcccacttggggagtttcttcctggcatcatgccttctgaataaatgccgattttatccatgga

SEQ ID NO: 302094 - DNA, 1563 bp, Homo sapiens
cgctccagtttaaaacctgcggttccagggttctccagcccctccctttttcacgctccgaagccgagaaggcccaaagcgaagacagagaggacccggaagtagggaaaacctctgagcacgtgatgggggaacacgcgggtgctgtcacgtgatccgacaaacggcctctgcatagtgcagaacattctgctgctcttaaaggtacaggcctcagggtccctgctgtagacggggcgggggagagtacgatgggtggggcgtggtgggtcgtagggcgctcgagatggagcccccagcttccttgatggatcgcggggcgcgagtgccctagacaagccggagctgggaccggcaatcgggcgttgatccttgtcacctgtcgcagaccctcatccctcccgtgggagccccctttggacactctatgaccctggaccctcgggggacctgaacttgatgcgatgggaggctgtgcaggctcgcggcggcgcttttcggattccgagggggaggagaccgtcccggagccccggctccctctgttggaccatcagggcgcgcattggaagaacgcggtgggcttctggctgctgggcctttgcaacaacttctcttatgtggtgatgctgagtgccgcccacgacatccttagccacaagaggacatcgggaaaccagagccatctatttcttgttgctcacatctcctgaggcccaggaccctggaggggaagaagaagcagagagcgcagcccggcagcccctcataagaaccgaggccccggagtcgaagccaggctccagctccagcctctcccttcgggaaaggtggacagtgttcaagggtctgctgtggtacattgttcccttggtcgtagtttactttgccgagtatttcattaaccagggactttttgaactcctctttttctggaacacttccctgagtcacgctcagcaataccgctggtaccagatgctgtaccaggctggcgtctttgcctcccgctcttctctccgctgctgtcgcatccgtttcacctgggccctggccctgctgcagtgcctcaacctggtgttcctgctggcagacgtgtggttcggctttctgccaagcatctacctcgtcttcctgatcattctgtatgaggggctcctgggaggcgcagcctacgtgaacaccttccacaacatcgccctggagaccagtgatgagcaccgggagtttgcaatggcggccacctgcatctctgacacactggggatctccctgtcggggctcctggctttgcctctgcatgacttcctctgccagctctcctgatactcgggatcctcaggacgcaggtcacattcacctgtgggcagagggacaggtcagacacccaggcccaccccagagaccctccatgaactgtgctcccagccttcccggcaggtctgggagtagggaagggctgaagccttgtttcccttgcaggggggccagccattgtctcccacttggggagtttcttcctggcatcatgccttctgaataaatgccgattttatccatgga

SEQ ID NO: 302095 - DNA, 1926 bp, Homo sapiens
cgctccagtttaaaacctgcggttccagggttctccagcccctccctttttcacgctccgaagccgagaaggcccaaagcgaagacagagaggacccggaagtagggaaaacctctgagcacgtgatgggggaacacgcgggtgctgtcacgtgatccgacaaacggcctctgcatagtgcagaacattctgctgctcttaaaggtacaggcctcagggtccctgctgtagacggggcgggggagagtacgatgggtggggcgtggtgggtcgtagggcgctcgagatggagcccccagcttccttgatggatcgcggggcgcgagtgccctagacaagccggagctgggaccggcaatcgggcgttgatccttgtcacctgtcgcagaccctcatccctcccgtgggagccccctttggacactctatgaccctggaccctcgggggacctgaacttgatgcgatgggaggctgtgcaggctcgcggcggcgcttttcggattccgagggggaggagaccgtcccggagccccggctccctctgttggaccatcagggcgcgcattggaagaacgcggtgggcttctggctgctgggcctttgcaacaacttctcttatgtggtgatgctgagtgccgcccacgacatccttagccacaagaggacatcgggaaaccagagccatgtggacccaggcccaacgccgatcccccacaacagctcatcacgatttgactgcaactctgtctctacggctgctgtgctcctggcggacatcctccccacactcgtcatcaaattgttggctcctcttggccttcacctgctgccctacagcccccgggttctcgtcagtgggatttgtgctgctggaagcttcgtcctggttgccttttctcattctgtggggaccagcctgtgtgctatttcttgttgctcacatctcctgaggcccaggaccctggaggggaagaagaagcagagagcgcagcccggcagcccctcataagaaccgaggccccggagtcgaagccaggctccagctccagcctctcccttcgggaaaggtggacagtgttcaagggtctgctgtggtacattgttcccttggtcgtagtttactttgccgagtatttcattaaccagggactttttgaactcctctttttctggaacacttccctgagtcacgctcagcaataccgctggtaccagatgctgtaccaggctggcgtctttgcctcccgctcttctctccgctgctgtcgcatccgtttcacctgggccctggccctgctgcagagacagagttttgctcttgtagctcaggctagagtacaatggcgtgatcttggctcactgcaacctccgcctcccaggttcaggcgattcttctgcctcagcctcctgcgtagctgggattacagtgcctcaacctggtgttcctgctggcagacgtgtggttcggctttctgccaagcatctacctcgtcttcctgatcattctgtatgaggggctcctgggaggcgcagcctacgtgaacaccttccacaacatcgccctggagaccagtgatgagcaccgggagtttgcaatggcggccacctgcatctctgacacactggggatctccctgtcggggctcctggctttgcctctgcatgacttcctctgccagctctcctgatactcgggatcctcaggacgcaggtcacattcacctgtgggcagagggacaggtcagacacccaggcccaccccagagaccctccatgaactgtgctcccagccttcccggcaggtctgggagtagggaagggctgaagccttgtttcccttgcaggggggccagccattgtctcccacttggggagtttcttcctggcatcatgccttctgaataaatgccgattttatccatgga

SEQ ID NO: 302096 - DNA, 1447 bp, Homo sapiens
cgctccagtttaaaacctgcggttccagggttctccagcccctccctttttcacgctccgaagccgagaaggcccaaagcgaagacagagaggacccggaagtagggaaaacctctgagcacgtgatgggggaacacgcgggtgctgtcacgtgatccgacaaacggcctctgcatagtgcagaacattctgctgctcttaaaggtacaggcctcagggtccctgctgtagacggggcgggggagagtacgatgggtggggcgtggtgggtcgtagggcgctcgagatggagcccccagcttccttgatggatcgcggggcgcgagtgccctagacaagccggagctgggaccggcaatcgggcgttgatccttgtcacctgtcgcagaccctcatccctcccgtgggagccccctttggacactctatgaccctggaccctcgggggacctgaacttgatgcgatgggaggctgtgcaggctcgcggcggcgcttttcggattccgagggggaggagaccgtcccggagccccggctccctctgttggaccatcagggcgcgcattggaagaacgcggtgggcttctggctgctgggcctttgcaacaacttctcttatgtggtgatgctgagtgccgcccacgacatccttagccacaagaggacatcgggaaaccagagccatgtggacccaggcccaacgccgatcccccacaacagctcatcacgatttgactgcaactctgtctctacggctgctgtgctcctggcggacatcctccccacactcgtcatcaaattgttggctcctcttggccttcacctgctgccctacagcccccgggttctcgtcagtgggatttgtgctgctggaagcttcgtcctggttgccttttctcattctgtggggaccagcctgtgtggtgtggtcttcgctagcatctcatcaggccttggggaggtcaccttcctctccctcactgccttctaccccagggccgtgatctcctggtggtcctcagggactgggggagctgggctgctgggggccctgtcctacctgggcctcacccaggccggcctctcccctcagcagaccctgctgtccatgctgggtatccctgccctgctgctggccagctatttcttgttgctcacatctcctgaggcccaggaccctggaggggaagaagaagcagagagcgcagcccggcagcccctcataagaaccgaggccccggagtcgaagccagctccagctcagctctccttcgggaaaggggccggtcagggctgcggggtacatgtcccggccgaagtactggcggagaatcataccagggcctggaacccccttctggaatcccgacgcgccgaacggggccaagcgccgggggtggcccccaaccgggggcaccaccgggggcgcggggcaccggtcgggag

SEQ ID NO: 302097 - DNA, 756 bp, Homo sapiens
  misc_feature (2)..(3): n is a, c, g, or t
gnnagacactctccaaaaagcagagacagcaggaagaggggagtggaggcagcccattcacctggggaaatgactgggttgtcgatggacggtggcggcagccccaagggggacgtggacccgttctactatgactatgagaccgttcgcaatgggggcctgatcttcgctggactggccttcatcgtggggctcctcatcctcctcagcagaagattccgctgtgggggcaataagaagcgcaggcaaatcaatgaagatgagccgtaacagcagcctcggcggtgccacccactgcactggggccagctgggaagccaagcatggccctgcctctggcgcctccccttcttccctgggctttagacctttgtccccgtcactgccagcgcttgggctgaaggaagctccagactcaatgtgacccccaggtggcatcgccaacgcctgcctcgtgccacctcatgcttataataaagccggcgtcagagaccgctgcttccctcaacctgcctgcctgtctccctcctctgtcaccaccagcctctccaagctcaagtacaaatacagccgggtctcaaaaaaaaaaaaaaaaaaaaaacaaaaaaaagaaaaaaaaaaaagaaaaaaaaaaaaaaaaaaaaaaaagaaaccagaaaacaaaagagaaaccaaacgatgaaaatgaacaaaatcaagaaaacaagacgaggcgcacgccaaaaagaaagacggagagcggaaaaagaaacacag

SEQ ID NO: 302098 - DNA, 494 bp, Homo sapiens
cccaggcaagcagcacctccctgctctcctgcactcctggacacaaccagcagctcctgccatggacaggtggtacctgggcggcagccccaagggggacgtggacccgttctactatgactatgagaccgttcgcaatgggggcctgatcttcgctggactggccttcatcgtggggctcctcatcctcctcagcagaagattccgctgtgggggcaataagaagcgcaggcaaatcaatgaagatgagccgtaacagcagcctcggcggtgccacccactgcactggggccagctgggaagccaagcatggccctgcctctggcgcctccccttcttccctgggctttagacctttgtccccgtcactgccagcgcttgggctgaaggaagctccagactcaatgtgacccccaggtggcatcgccaacgcctgcctcgtgccacctcatgcttataataaagccggcgtcagagaccgctgcttccctcaa

SEQ ID NO: 302099 - DNA, 916 bp, Homo sapiens
ctctcctgccacctcagccttccagagtacccagcccctcttcctgtcggcctcctctctaagaaaatttgcaacttaaaggaggaccctgctttaaccccaaagaaagatagcttgagtggcagaaaggcagcagatagaagctggagagctgagcgttcctcctcggcctcctggcacacacccgccctgagttcaatgcatcttgctagaccgtctgaacttgggcgggaggcagacggcgtccatctggctggggaaggagcaggcccctctggtcagccttcctaggctggatttggggtgagagcccgccaagttcaagtcacactctccaaaggcttcctgtcacaggaactgactcaggcctggaaaccaagaggggcacttgctgacagaggcggcagccccaagggggacgtggacccgttctactatgactatgagaccgttcgcaatgggggcctgatcttcgctggactggccttcatcgtggggctcctcatcctcctcagcagaagattccgctgtgggggcaataagaagcgcaggcaaatcaatgaagatgagccgtaacagcagcctcggcggtgccacccactgcactggggccagctgggaagccaagcatggccctgcctctggcgcctccccttcttccctgggctttagacctttgtccccgtcactgccagcgcttgggctgaaggaagctccagactcaatgtgacccccaggtggcatcgccaacgcctgcctcgtgccacctcatgcttataataaagccggcgtcagagaccgctgcttccctcaaaaaaacaaggggggcaaagtcccgagggccattccgtacccgttttgtgcaaggccaagggcgcttaacgagggcgcggaaccctggaacaccggttgggaa

SEQ ID NO: 302100 - DNA, 855 bp, Homo sapiens
  misc_feature (503)..(503): n is a, c, g, or t
  misc_feature (507)..(507): n is a, c, g, or t
  misc_feature (509)..(509): n is a, c, g, or t
cccaggcaagcagcacctccctgctctcctgcactcctggacacaaccagcagctcctgccatggacaggtggtacctgggcggcagccccaagggggacgtggacccgttctactatgactatgagaccgttcgcaatgggggcctgatcttcgctggactggccttcatcgtggggctcctcatcctcctcagcagaagattccgctgtgggggcaataagaagcgcaggcaaatcaatgaagatgagccgtaacagcagcctcggcggtgccacccactgcactggggccagctgggaagccaagcatggccctgcctctggcgcctccccttcttccctgggctttagacctttgtccccgtcactgccagcgcttgggctgaaggaagctccagactcaatgtgacccccaggtggcatcgccaacgcctgcctcgtgccacctcatgcttataataaagccggcgtcagagaccgctgcttccctcaaaaaaaaaanaaananaaaaaaaaaagggggggggggcaaaagttcccctgggggggcccaggtttatacgcgttccccgggttttgtgtggctcgcagtgggccccatattggggagcgccggatattttataagaccgcatggcgcacgggggcgcgcgctgttttcaccacagcggtctcgtggcgtggggagacaaccctggtgctaccgtgggagagactcttgtggccgaagggggaactcttatctctttggggggggggggccacatatgtggggacaacctttccctttccaagatagatttaacgggctagagcaggacattttacacttttacaagggggataagcggggc

SEQ ID NO: 302101 - DNA, 802 bp, Homo sapiens
  misc_feature (401)..(401): n is a, c, g, or t
  misc_feature (497)..(497): n is a, c, g, or t
  misc_feature (582)..(582): n is a, c, g, or t
cccaggcaagcagcacctccctgctctcctgcactcctggacacaaccagcagctcctgccatggacaggtggtacctgggcggcagccccaagggggacgtggacccgttctactatgactatgagaccgttcgcaatgggggcctgatcttcgctggactggccttcatcgtggggctcctcatcctcctcatccttccttcaggcagaaggatttccggctggtggtggggccattaaggaaggcggccgaggccaattccatggaaggattgaagccgcgttaaccagccgagcctctcggcgcggttgcacacccacatgtgacatcgtggtggcccagctcgtgggaaagcccagagactagtggtcctcttgctcttcgtggcgctcctccccntttcttcctcgtggggtctttaagacctctttggtcccgcgtgtcacgttgccgatgcgggctttggggcgttgaaggggaatgcctccgagacgntcaagttgttggaccccccatggggttgggcatttccgcccaatctcgcttgtccctccgttgccaacccttcgaattgcttatnaaattaaaaggcccgggcggttccaggagaacccgggctggtgctttcccttcaaaaaagacagacacatatagacatagacacgaagacagacagacagacacaaacacagagaagaagagagagagaagagaagaacacagagagagagacagaacaacgaagagcgcgggcgcgcgcgcgcgcgcgcactacagaagagtgatgtataccccgcgca

SEQ ID NO: 302102 - DNA, 1288 bp, Homo sapiens
cggcaatgcctgaaacataacaatgcctaaaacatgatagtcctccaataaaagcataatgaataaataagctaggaacttgaggacatcccaaagccatcttctctcactcaccccgtatttaattggcactaagtcctaatgactctatctctacttcctctttgccatccctatggccactgcctttaagtattcaatctcctccaattttatgttcctctaattcatcctctatatctttagtgcctggaagaagtttccacaggaatgatatcttgcttatcattatatcccaatgcctggattaaaacagttaataaaactagctggataaacaaatgaaatattcatgggaaaagggatggatgaatgaacaaataaacgagtggtacataattttagattctcagactgctacattaaatttaacaggtgtttaaaagattctcacttaaaattagaagaaagtttatggatccatttaagctagcccaatttcactcttatgcaaagctgtactttattgcacaaaaatcaaaaaggcttgagaacttcttgcaggaagaggggagtggaggcagcccattcacctggggaaatgactgggttgtcgatggacggtggcggcagccccaagggggacgtggacccgttctactatgactatgagaccgttcgcaatgggggcctgatcttcgctggactggccttcatcgtggggctcctcatcctcctcagcagaagattccgctgtgggggcaataagaagcgcaggcaaatcaatgaagatgagccgtaacagcagcctcggcggtgccacccactgcactggggccagctgggaagccaagcatggccctgcctctggcgcctccccttcttccctgggctttagacctttgtccccgtcactgccagcgcttgggctgaaggaagctccagactcaatgtgacccccaggtggcatcgccaacgcctgcctcgtgccacctcatgcttataataaagccggcgtcagagaccgctgcttccctcaacctgcctgcctgtctccctcctctgtcaccaccagcctctccaagctcaagtacaaatacagccgggtctcaaaaaaaaaaaaaaaaaaaaaacaaaaaaaagaaaaaaaaaaaagaaaaaaaaaaaaaaaaaaaaaaaagaaaccagaaaacaaaagagaaaccaaacgatgaaaatgaacaaaatcaagaaaacaagacgaggcgcacgccaaaaagaaagacggagagcggaaaaagaaacacag

SEQ ID NO: 302103 - DNA, 869 bp, Homo sapiens
  misc_feature (2)..(3): n is a, c, g, or t
  misc_feature (517)..(517): n is a, c, g, or t
  misc_feature (521)..(521): n is a, c, g, or t
  misc_feature (523)..(523): n is a, c, g, or t
gnnagacactctccaaaaagcagagacagcaggaagaggggagtggaggcagcccattcacctggggaaatgactgggttgtcgatggacggtggcggcagccccaagggggacgtggacccgttctactatgactatgagaccgttcgcaatgggggcctgatcttcgctggactggccttcatcgtggggctcctcatcctcctcagcagaagattccgctgtgggggcaataagaagcgcaggcaaatcaatgaagatgagccgtaacagcagcctcggcggtgccacccactgcactggggccagctgggaagccaagcatggccctgcctctggcgcctccccttcttccctgggctttagacctttgtccccgtcactgccagcgcttgggctgaaggaagctccagactcaatgtgacccccaggtggcatcgccaacgcctgcctcgtgccacctcatgcttataataaagccggcgtcagagaccgctgcttccctcaaaaaaaaaanaaananaaaaaaaaaagggggggggggcaaaagttcccctgggggggcccaggtttatacgcgttccccgggttttgtgtggctcgcagtgggccccatattggggagcgccggatattttataagaccgcatggcgcacgggggcgcgcgctgttttcaccacagcggtctcgtggcgtggggagacaaccctggtgctaccgtgggagagactcttgtggccgaagggggaactcttatctctttggggggggggggccacatatgtggggacaacctttccctttccaagatagatttaacgggctagagcaggacattttacacttttacaagggggataagcggggc

SEQ ID NO: 302104 - DNA, 965 bp, Homo sapiens
cggcaatgcctgaaacataacaatgcctaaaacatgatagtcctccaataaaagcataatgaataaataagctaggaacttgaggacatcccaaagccatcttctctcactcaccccgtatttaattggcactaagtcctaatgactctatctctacttcctctttgccatccctatggccactgcctttaagtattcaatctcctccaattttatgttcctctaattcatcctctatatctttagtgcctggaagaagtttccacaggaatgatatcttgcttatcattatatcccaatgcctggattaaaacagttaataaaactagctggataaacaaatgaaatattcatgggaaaagggatggatgaatgaacaaataaacgagtggtacataattttagattctcagactgctacattaaatttaacaggtgtttaaaagattctcacttaaaattagaagaaagtttatggatccatttaagctagcccaatttcactcttatgcaaagctgtactttattgcacaaaaatcaaaaaggcttgagaacttcttgcaggaagaggggagtggaggcagcccattcacctggggaaatgactgggttgtcgatggacggtggcggcagccccaagggggacgtggacccgttctactatggcagaagattccgctgtgggggcaataagaagcgcaggcaaatcaatgaagatgagccgtaacagcagcctcggcggtgccacccactgcactggggccagctgggaagccaagcatggccctgcctctggcgcctccccttcttccctgggctttagacctttgtccccgtcactgccagcgcttgggctgaaggaagctccagactcaatgtgacccccaggtggcatcgccaacgcctgcctcgtgccacctcatgcttataataaagccggcgtcagagaccgctgcttccctcaa

SEQ ID NO: 302105 - DNA, 335 bp, Homo sapiens
gagatcacagaggagccctggagaaaagtgagatggacaagggggaagtaaaaccccaacctctgctgcctcccacccaaccccatcctgcctttgtcttctcagcctcggcggtgccacccactgcactggggccagctgggaagccaagcatggccctgcctctggcgcctccccttcttccctgggctttagacctttgtccccgtcactgccagcgcttgggctgaaggaagctccagactcaatgtgacccccaggtggcatcgccaacgcctgcctcgtgccacctcatgcttataataaagccggcgtcagagaccgctgcttccctc

SEQ ID NO: 302106 - DNA, 508 bp, Homo sapiens
  misc_feature (2)..(3): n is a, c, g, or t
gnnagacactctccaaaaagcagagacagcaggaagaggggagtggaggcagcccattcacctggggaaatgactgggttgtcgatggacggtggcggcagccccaagggggacgtggacccgttctactatgactatgagaccgttcgcaatgggggcctgatcttcgctggactggccttcatcgtggggctcctcatcctcctcagcagaagattccgctgtgggggcaataagaagcgcaggcaaatcaatgaagatgagccgtaacagcagcctcggcggtgccacccactgcactggggccagctgggaagccaagcatggccctgcctctggcgcctccccttcttccctgggctttagacctttgtccccgtcactgccagcgcttgggctgaaggaagctccagactcaatgtgacccccaggtggcatcgccaacgcctgcctcgtgccacctcatgcttataataaagccggcgtcagagaccgctgcttccctcaa

SEQ ID NO: 302107 - DNA, 442 bp, Homo sapiens
gctgcggagagagacagctgctgggagagaccacccatcccgctcctcttgccctctctttccggagactatgagaccgttcgcaatgggggcctgatcttcgctggactggccttcatcgtggggctcctcatcctcctcagcagaagattccgctgtgggggcaataagaagcgcaggcaaatcaatgaagatgagccgtaacagcagcctcggcggtgccacccactgcactggggccagctgggaagccaagcatggccctgcctctggcgcctccccttcttccctgggctttagacctttgtccccgtcactgccagcgcttgggctgaaggaagctccagactcaatgtgacccccaggtggcatcgccaacgcctgcctcgtgccacctcatgcttataataaagccggcgtcagagaccgctgcttccctcaa

SEQ ID NO: 302108 - DNA, 542 bp, Homo sapiens
ggcaaacagcaacctttcgctgttctcaacttgcacttcacgtgtgacactaaccgagtcagcatcctgccgatgaggaggtggtgtgtaccgtgcgagcggctgtccccaatggggagtacgtgtcaatctcggattactacttatgactactgatgacgcgtttctggaaatgggtgagccgtgttactctatcagacgtaggtacatggccttcatcgtggggctcctcatcctcctcagcagaagattccgctgtgggggcaataagaagcgcaggcaaatcaatgaagatgagccgtaacagcagcctcggcggtgccacccactgcactggggccagctgggaagccaagcatggccctgcctctggcgcctccccttcttccctgggctttagacctttgtccccgtcactgccagcgcttgggctgaaggaagctccagactcaatgtgacccccaggtggcatcgccaacgcctgcctcgtgccacctcatgcttataataaagccggcgtcagagaccgctgcttccctcaa

SEQ ID NO: 302109 - DNA, 684 bp, Homo sapiens
  misc_feature (2)..(3): n is a, c, g, or t
gnnagacactctccaaaaagcagagacagcaggaagaggggagtggaggcagcccattcacctggggaaatgactgggttgtcgatggacggtggcggcagccccaagggggacgtggacccgttctactatgactatgagaccgttcgcaatgggggcctgatcttcgctggactggccttcatcgtggggctcctcatcctcctcagcagaagattccgctgtgggggcaataagaagcgcaggcaaatcaatgaagatgagccgtaacagcagcctcggcggtgccacccactgcactggggccagctgggaagccaagcatggccctgcctctggcgcctccccttcttccctgggctttagacctttgtccccgtcactgccagcgcttgggctgaaggaagctccagactcaatgtgacccccaggtggcatcgccaacgcctgcctcgtgccacctcatgcttataataaagccggcgtcagagaccgctgcttccctcaaaaaaaaaaaaaaaaaaaaaaacaaaaaaaagaaaaaaaaaaaagaaaaaaaaaaaaaaaaaaaaaaaagaaaccagaaaacaaaagagaaaccaaacgatgaaaatgaacaaaatcaagaaaacaagacgaggcgcacgccaaaaagaaagacggagagcggaaaaagaaacacag

SEQ ID NO: 302110 - DNA, 3385 bp, Homo sapiens
ggtttactcttacgccactgacgtaacgtcatcgtgcgggacgtggacggaagaaaaaagagagtgagcgagcgccggaatcagcccggcgtggagtgcggacccgcggtagtgccagggggcgaaggcggcggtggtgaggaagatactttggttagtgaccacatcgcagcatgttgagtcaagtttaccgctgtgggttccagcccttcaaccaacatcttctgccctgggtcaagtgtacaaccgtcttcagatctcattgtatccagccttcagtcatcagacatgttcgttcttggagcaacatcccgtttatcactgtacccctcagtcgtacacatggcaagtccttcgcccaccgcagtgagctgaagcatgccaagagaatcgtggtgaagctcggcagtgccgtggtgacccgaggggatgaatgtggcctggccctggggcgcttggcatctattgttgagcaggtatcagtgctgcagaatcagggcagagagatgatgctggtgaccagtggagccgtagcctttggcaaacaacgcttgcgccatgagatccttctgtctcagagcgtgcggcaggccctccactcggggcagaaccagctgaaagaaatggcaattccagtcttagaggcacgagcctgtgcagctgccggacagagtgggctgatggccttgtatgaggctatgtttacccagtacagcatctgtgctgcccagattttggtgaccaatttggatttccatgatgagcagaagcgccggaacctcaatggaacacttcatgaactccttagaatgaacattgtccccattgtcaacacaaatgatgctgttgtccccccagctgagcccaacagtgacctgcagggggtaaatgttattagtgttaaagataatgatagcctggctgcccgactggctgtggaaatgaaaactgatctcttgattgttctttcagatgtagaaggcctttttgacagccccccaggttcagatgatgcaaagcttattgatatattttatcccggagatcagcagtctgtgacatttggaaccaagtctagagtgggaatgggtggcatggaagccaaggtgaaagcagccctctgggctttgcaaggtggcacttctgttgttattgccaatggaacccacccaaaggtgtctgggcacgtcatcacagacattgtggaggggaagaaagttggtaccttcttttcagaagtaaagcctgcaggccctactgttgagcagcagggagaaatggcgcgatctggaggaaggatgttggccaccttggaacctgagcagagagcagaaattatccatcatctggctgatctgttgacggaccagcgtgatgagatcctgttagccaacaaaaaagacttggaggaggcagaggggagacttgcagctcctctgctgaaacgtttaagcctctccacatccaaattgaacagcctggccatcggtctgcgacagatcgcagcctcctcccaggacagcgtgggacgtgttttgcgccgcacccgaatcgccaaaaacttggaactggaacaagtgactgtcccaattggagttctgctggtgatctttgaatctcgtcctgactgtctaccccaggtggcagctttggctatcgcaagtggcaatggcttgttactcaaaggagggaaggaggctgcacacagcaaccggattctccacctcctgacccaggaggctctctcaatccatggagtcaaggaggccgtgcaactggtgaataccagagaagaagttgaagatctttgccgcctagacaaaatgatagatctgatcattccacgtggctcttcccagctggtcagagacatccagaaagctgctaaggggattccagtgatggggcacagcgaagggatctgtcacatgtatgtggattccgaggccagtgttgataaggtcaccaggctagtcagagactctaaatgtgaatatccagctgcctgtaatgctttggagactttgttaatccaccgggatctgctcaggacaccattatttgaccagatcattgatatgctgagagtggaacaggtaaaaattcatgcaggccccaaatttgcctcctatctgaccttcagcccctccgaagtgaagtcactccgaactgagtatggggacctggaattatgcattgaagtagtggacaacgttcaggatgccattgaccacatccacaagtatggcagctcccacacggatgtcatcgtcacagaggacgaaaacacagcggagttcttcctgcagcacgtagacagtgcctgtgtgttctggaatgccagcactcgcttttctgatggttaccgctttggactgggagctgaagtgggaatcagtacatcgagaatccacgcccggggaccagtaggacttgagggactgcttactactaagtggctgctgcgagggaaggaccacgtggtctcagatttctcagagcatggaagtttaaaatatcttcatgagaacctccctattcctcagagaaacaccaactgaaaagagccaggaaaacccgggaattttccaaaaggtcttcacgttaaacttgtcttatctcaggagagagcccgctcttgtctcccagttcctggtagggtctgcctgttggaaagtgtacctggatgcttctgggctccgtttggcaatagcagtcttggctgatgtgcacagtctggctcccagctcaccctttttttttaaagtaagaaaatagttgctaccgatagggactttgccaagtccaattatcttctaggattgaaaggtgcattttccccataaaaaaggcgaggaaaacccatggctgctttgtgtcacctcagtgacttacagtcccccttggcatttagttggtactagagccagtcatccttaacaaatcttttcacattttatttctttcacatgtagtcatcttcaaaaaggaaagatttggaattttagaaaaggggcaactcttctttttagcattctcatcagaaagtcacaaaaatcgatggaatcatttccactgggaagattgaccttttgtatttatttgtggggtaaattaataagcattccagatgcttgcagcttcctgcatccaggagatgctgtgttccccgtgatgcagctggaacccaagctgcagcaggagatgcaagtttcaggatgttccccactgagctggaggaatatctacagcagtgatgcttgaaatttttgtatgaattattttgtcgtcctacccttttcctccaaaacaaaaattagaggattattttaatactttggattcttcccccttttttgagaaataaagttttttatgaaaagcc

SEQ ID NO: 302111 - DNA, 633 bp, Homo sapiens
atgctggagacactaacaccatgctatgctgcatgcactaacaccagaagtttggcataaacaagatggaaaagttgtgagagaaacttgtcatggagcagtgactgcataagctcttctgaactcgtggttgcattcaacagggtgaggtgctatagtcactgaagatggtgcgatgagcatggcttgtatatttcagtggctagaagactgcatgtttggaaaaaggattgccagtagacagtgtgttctgcagacagaaggggcctgcaagagccgtcatctacatatttgggttcattggttttgcctgatcctagcttggttttgcctgagcttggctgtgttcttccatgaatttctttttggactgcttagctcactcacttatgactttttaatctgcattctaggttattagtgttaaagataatgatagcctggctgcccgactggctgtggaaatgaaaactgatctcttgattgttctttcagatgtagaaggtacaaagtaatgcttttttcctttatctgccctttgttttaaatgctacatatgtgagcacatgagtttccctctttctttgagtccctctgatgttttttgctatagatcattagccatatgttctg

SEQ ID NO: 302112 - DNA, 3664 bp, Homo sapiens
ggtttactcttacgccactgacgtaacgtcatcgtgcgggacgtggacggaagaaaaaagagagtgagcgagcgccggaatcagcccggcgtggagtgcggacccgcggtagtgccagggggcgaaggcggcggtggtgaggaagatactttggttagtgaccacatcgcagcatgttgagtcaagtttaccgctgtgggttccagcccttcaaccaacatcttctgccctgggtcaagtgtacaaccgtcttcagatctcattgtatccagccttcagtcatcagacatgttcgttcttggagcaacatcccgtttatcactgtacccctcagtcgtacacatggcaagtccttcgcccaccgcagtgagctgaagcatgccaagagaatcgtggtgaagctcggcagtgccgtggtgacccgaggggatgaatgtggcctggccctggggcgcttggcatctattgttgagcaggtatcagtgctgcagaatcagggcagagagatgatgctggtgaccagtggagccgtagcctttggcaaacaacgcttgcgccatgagatccttctgtctcagagcgtgcggcaggccctccactcggggcagaaccagctgaaagaaatggcaattccagtcttagaggcacgagcctgtgcagctgccggacagagtgggctgatggccttgtatgaggctatgtttacccagtacagcatctgtgctgcccagattttggtgaccaatttggatttccatgatgagcagaagcgccggaacctcaatggaacacttcatgaactccttagaatgaacattgtccccattgtcaacacaaatgatgctgttgtccccccagctgagcccaacagtgacctgcagggggtaaatgttattagtgttaaagataatgatagcctggctgcccgactggctgtggaaatgaaaactgatctcttgattgttctttcagatgtagaaggcctttttgacagccccccaggttcagatgatgcaaagcttattgatatattttatcccggagatcagcagtctgtgacatttggaaccaagtctagagtgggaatgggtggcatggaagccaaggtgaaagcagccctctgggctttgcaaggtggcacttctgttgttattgccaatggaacccacccaaaggtgtctgggcacgtcatcacagacattgtggaggggaagaaagttggtaccttcttttcagaagtaaagcctgcaggccctactgttgagcagcagggagaaatggcgcgatctggaggaaggatgttggccaccttggaacctgagcagagagcagaaattatccatcatctggctgatctgttgacggaccagcgtgatgagatcctgttagccaacaaaaaagacttggaggaggcagaggggagacttgcagctcctctgctgaaacgtttaagcctctccacatccaaattgaacagcctggccatcggtctgcgacagatcgcagcctcctcccaggacagcgtgggacgtgttttgcgccgcacccgaatcgccaaaaacttggaactggaacaagtgactgtcccaattggagttctgctggtgatctttgaatctcgtcctgactgtctaccccaggtggcagctttggctatcgcaagtggcaatggcttgttactcaaaggagggaaggaggctgcacacagcaaccggattctccacctcctgacccaggaggctctctcaatccatggagtcaaggaggccgtgcaactggtgaataccagagaagaagttgaagatctttgccgcctagacaaaatgatagatctgatcattccacgtggctcttcccagctggtcagagacatccagaaagctgctaaggggattccagtgatggggcacagcgaagggatctgtcacatgtatgtggattccgaggccagtgttgataaggtcaccaggctagtcagagactctaaatgtgaatatccagctgcctgtaatgctttggagactttgttaatccaccgggatctgctcaggacaccattatttgaccagatcattgatatgctgagagtggaacaggtaaaaattcatgcaggccccaaatttgcctcctatctgaccttcagcccctccgaagtgaagtcactccgaactgagtatggggacctggaattatgcattgaagtagtggacaacgttcaggatgccattgaccacatccacaagtatggcagctcccacacggatgtcatcgtcacagaggacgaaaacacagcggagttcttcctgcagcacgtagacagtgcctgtgtgttctggaatgccagcactcgcttttctgatggttaccgctttggactgggagctgaagtgggaatcagtacatcgagaatccacgcccggggaccagtaggacttgagggactgcttactactaagtggctgctgcgagggaaggaccacgtggtctcagatttctcagagcatggaagtttaaaatatcttcatgagaacctccctattcctcagagaaacaccaactgaaaagagccaggaaaacccgggaattttccaaaaggtcttcacgttaaacttgtcttatctcaggagagagcccgctcttgtctcccagttcctggtagggtctgcctgttggaaagtgtacctggatgcttctgggctccgtttggcaatagcagtcttggctgatgtgcacagtctggctcccagctcaccctttttttttaaagtaagaaaatagttgctaccgatagggactttgccaagtccaattatcttctaggattgaaaggtgcattttccccataaaaaaggcgaggaaaacccatggctgctttgtgtcacctcagtgacttacagtcccccttggcatttagttggtactagagccagtcatccttaacaaatcttttcacattttatttctttcacatgtagtcatcttcaaaaaggaaagatttggaattttagaaaaggggcaactcttctttttagcattctcatcagaaagtcacaaaaatcgatggaatcatttccactgggaagattgaccttttgtatttatttgtggggtaaattaataagcattccagatgcttgcagcttcctgcatccaggagatgctgtgttccccgtgatgcagctggaacccaagctgcagcaggagatgcaagtttcaggatgttccccactgagctggaggaatatctacagcagtgatgcttgaaatttttgtatgaattattttgtcgtcctacccttttcctccaaaacaaaaattagaggattattttaatactttggattcttcccccttttttgagaaataaagttttttatgaaaagccaaaaaaaaaaaaaaaaaaaaaaaaaaaaaaaaaaaaaaaaaaaaaaaaaaaaaaaaaaaaaaaaaaaaaaaaaaaaaaaaaaaaaaaaaaaaaaaaaaaacaaaaaaaaaaaaaaaaaaaaaaaaaaaaaaaaaaacttgtggcccccttggccccaacgctttttaaatttcgaaaagttttttttggggccccgaattggggctcctttggcaaattccccctattggggggccaattaaaatacatgggcctgtttttaaaaaccggtggatcgga

SEQ ID NO: 302113 - DNA, 3331 bp, Homo sapiens
ggtttactcttacgccactgacgtaacgtcatcgtgcgggacgtggacggaagaaaaaagagagtgagcgagcgccggaatcagcccggcgtggagtgcggacccgcggtagtgccagggggcgaaggcggcggtggtgaggaagatactttggttagtgaccacatcgcagcatgttgagtcaagtttaccgctgtgggttccagcccttcaaccaacatcttctgccctgggtcaagtgtacaaccgtcttcagatctcattgtatccagccttcagtcatcagacatgttcgttcttggagcaacatcccgtttatcactgtacccctcagtcgtacacatggcaagtccttcgcccaccgcagtgagctgaagcatgccaagagaatcgtggtgaagctcggcagtgccgtggtgacccgaggggatgaatgtggcctggccctggggcgcttggcatctattgttgagcaggtatcagtgctgcagaatcagggcagagagatgatgctggtgaccagtggagccgtagcctttggcaaacaacgcttgcgccatgagatccttctgtctcagagcgtgcggcaggccctccactcggggcagaaccagctgaaagaaatggcaattccagtcttagaggcacgagcctgtgcagctgccggacagagtgggctgatggccttgtatgaggctatgtttacccagtacagcatctgtgctgcccagattttggtgaccaatttggatttccatgatgagcagaagcgccggaacctcaatggaacacttcatgaactccttagaatgaacattgtccccattgtcaacacaaatgatgctgttgtccccccagctgagcccaacagtgacctgcagggggtaaatgttattagtgttaaagataatgatagcctggctgcccgactggctgtggaaatgaaaactgatctcttgattgttctttcagatgtagaaggcctttttgacagccccccaggttcagatgatgcaaagcttattgatatattttatcccggagatcagcagtctgtgacatttggaaccaagtctagagtgggaatgggtggcatggaagccaaggtgaaagcagccctctgggctttgcaaggtggcacttctgttgttattgccaatggaacccacccaaaggtgtctgggcacgtcatcacagacattgtggaggggaagaaagttggtaccttcttttcagaagtaaagcctgcaggccctactgttgagcagcagggagaaatggcgcgatctggaggaaggatgttggccaccttggaacctgagcagagagcagaaattatccatcatctggctgatctgttgacggaccagcgtgatgagatcctgttagccaacaaaaaagacttggaggaggcagaggggagacttgcagctcctctgctgaaacgtttaagcctctccacatccaaattgaacagcctggccatcggtctgcgacagatcgcagcctcctcccaggacagcgtgggacgtgttttgcgccgcacccgaatcgccattgaatctcgtcctgactgtctaccccaggtggcagctttggctatcgcaagtggcaatggcttgttactcaaaggagggaaggaggctgcacacagcaaccggattctccacctcctgacccaggaggctctctcaatccatggagtcaaggaggccgtgcaactggtgaataccagagaagaagttgaagatctttgccgcctagacaaaatgatagatctgatcattccacgtggctcttcccagctggtcagagacatccagaaagctgctaaggggattccagtgatggggcacagcgaagggatctgtcacatgtatgtggattccgaggccagtgttgataaggtcaccaggctagtcagagactctaaatgtgaatatccagctgcctgtaatgctttggagactttgttaatccaccgggatctgctcaggacaccattatttgaccagatcattgatatgctgagagtggaacaggtaaaaattcatgcaggccccaaatttgcctcctatctgaccttcagcccctccgaagtgaagtcactccgaactgagtatggggacctggaattatgcattgaagtagtggacaacgttcaggatgccattgaccacatccacaagtatggcagctcccacacggatgtcatcgtcacagaggacgaaaacacagcggagttcttcctgcagcacgtagacagtgcctgtgtgttctggaatgccagcactcgcttttctgatggttaccgctttggactgggagctgaagtgggaatcagtacatcgagaatccacgcccggggaccagtaggacttgagggactgcttactactaagtggctgctgcgagggaaggaccacgtggtctcagatttctcagagcatggaagtttaaaatatcttcatgagaacctccctattcctcagagaaacaccaactgaaaagagccaggaaaacccgggaattttccaaaaggtcttcacgttaaacttgtcttatctcaggagagagcccgctcttgtctcccagttcctggtagggtctgcctgttggaaagtgtacctggatgcttctgggctccgtttggcaatagcagtcttggctgatgtgcacagtctggctcccagctcaccctttttttttaaagtaagaaaatagttgctaccgatagggactttgccaagtccaattatcttctaggattgaaaggtgcattttccccataaaaaaggcgaggaaaacccatggctgctttgtgtcacctcagtgacttacagtcccccttggcatttagttggtactagagccagtcatccttaacaaatcttttcacattttatttctttcacatgtagtcatcttcaaaaaggaaagatttggaattttagaaaaggggcaactcttctttttagcattctcatcagaaagtcacaaaaatcgatggaatcatttccactgggaagattgaccttttgtatttatttgtggggtaaattaataagcattccagatgcttgcagcttcctgcatccaggagatgctgtgttccccgtgatgcagctggaacccaagctgcagcaggagatgcaagtttcaggatgttccccactgagctggaggaatatctacagcagtgatgcttgaaatttttgtatgaattattttgtcgtcctacccttttcctccaaaacaaaaattagaggattattttaatactttggattcttcccccttttttgagaaataaagttttttatgaaaagcc

SEQ ID NO: 302114 - DNA, 3591 bp, Homo sapiens
ggtttactcttacgccactgacgtaacgtcatcgtgcgggacgtggacggaagaaaaaagagagtgagcgagcgccggaatcagcccggcgtggagtgcggacccgcggtagtgccagggggcgaaggcggcggtggtgaggaagatactttggttagtgaccacatcgcagcatgttgagtcaagtttaccgctgtgggttccagcccttcaaccaacatcttctgccctgggtcaagtgtacaaccgtcttcagatctcattgtatccagccttcagtcatcagacatgttcgttcttggagcaacatcccgtttatcactgtacccctcagtcgtacacatggcaagtccttcgcccaccgcagtgagctgaagcatgccaagagaatcgtggtgaagctcggcagtgccgtggtgacccgaggggatgaatgtggcctggccctggggcgcttggcatctattgttgagcaggtatcagtgctgcagaatcagggcagagagatgatgctggtgaccagtggagccgtagcctttggcaaacaacgcttgcgccatgagatccttctgtctcagagcgtgcggcaggccctccactcggggcagaaccagctgaaagaaatggcaattccagtcttagaggcacgagcctgtgcagctgccggacagagtgggctgatggccttgtatgaggctatgtttacccagtacagcatctgtgctgcccagattttggtgaccaatttggatttccatgatgagcagaagcgccggaacctcaatggaacacttcatgaactccttagaatgaacattgtccccattgtcaacacaaatgatgctgttgtccccccagctgagcccaacagtgacctgcagggggtaaatgttattagtgttaaagataatgatagcctggctgcccgactggctgtggaaatgaaaactgatctcttgattgttctttcagatgtagaaggcctttttgacagccccccaggttcagatgatgcaaagcttattgatatattttatcccggagatcagcagtctgtgacatttggaaccaagtctagagtgggaatgggtggcatggaagccaaggtgaaagcagccctctgggctttgcaaggtggcacttctgttgttattgccaatggaacccacccaaaggtgtctgggcacgtcatcacagacattgtggaggggaagaaagttggtaccttcttttcagaagtaaagcctgcaggccctactgttgagcagcagggagaaatggcgcgatctggaggaaggatgttggccaccttggaacctgagcagagagcagaaattatccatcatctggctgatctgttgacggaccagcgtgatgagatcctgttagccaacaaaaaagacttggaggaggcagaggggagacttgcagctcctctgctgaaacgtttaagcctctccacatccaaattgaacagcctggccatcggtctgcgacagatcgcagcctcctcccaggacagcgtgggacgtgttttgcgccgcacccgaatcgccaaaaacttggaactggaacaagtgactgtcccaattggagttctgctggtgatctttgaatctcgtcctgactgtctaccccaggtggcagctttggctatcgcaagtggcaatggcttgttactcaaaggagggaaggaggctgcacacagcaaccggattctccacctcctgacccaggaggctctctcaatccatggagtcaaggaggccgtgcaactggtgaataccagagaagaagttgaagatctttgccgcctagacaaaatgatagatctgatcattccacgtggctcttcccagctggtcagagacatccagaaagctgctaaggggattccagtgatggggcacagcgaagggatctgtcacatgtatgtggattccgaggccagtgttgataaggtcaccaggctagtcagagactctaaatgtgaatatccagctgcctgtaatgctttggagactttgttaatccaccgggatctgctcaggacaccattatttgaccagatcattgatatgctgagagtggaacaggtaaaaattcatgcaggccccaaatttgcctcctatctgaccttcagcccctccgaagtgaagtcactccgaactgagtatggggacctggaattatgcattgaagtagtggacaacgttcaggatgccattgaccacatccacaagtatggcagctcccacacggatgtcatcgtcacagaggacgaaaacacagcggagttcttcctgcagcacgtagacagtgcctgtgtgttctggaatgccagcactcgcttttctgatggttaccgctttggactgggagctgaagtgggaatcagtacatcgagaatccacgcccggggaccagtaggacttgagggactgcttactactaagtggctgctgcgagggaaggaccacgtggtctcagatttctcagagcatggaagtttaaaatatcttcatgagaacctccctattcctcagagaaacaccaactgaaaagagccaggaaaacccgggaattttccaaaaggtcttcacgttaaacttgtcttatctcaggagagagcccgctcttgtctcccagttcctggtagggtctgcctgttggaaagtgtacctggatgcttctgggctccgtttggcaatagcagtcttggctgatgtgcacagtctggctcccagctcaccctttttttttaaagtaagaaaatagttgctaccgatagggactttgccaagtccaattatcttctaggattgaaaggtgcattttccccataaaaaaggcgaggaaaacccatggctgctttgtgtcacctcagtgacttacagtcccccttggcatttagttggtactagagccagtcatccttaacaaatcttttcacattttatttctttcacatgtagtcatcttcaaaaaggaaagatttggaattttagaaaaggggcaactcttctttttagcattctcatcagaaagtcacaaaaatcgatggaatcatttccactgggaagattgaccttttgtatttatttgtggggtaaattaataagcattccagatgcttgcagcttcctgcatccaggagatgctgtgttccccgtgatgcagctggaacccaagctgcagcaggagatgcaagtttcaggatgttccccactgagctggaggaatatctacagcagtgatgcttgaaatttttgtatgaattattttgtcgtcctacccttttcctccaaaacaaaaattagaggattattttaatactttggattcttcccccttttttgagaaataaagttttttatgaaaagccaaaaaaaaaaaaaaaaaaaaaaaaaaacaaaaaaaaaaaaaaaaaaaaaaaaaaaaaaaaaaacttgtggcccccttggccccaacgctttttaaatttcgaaaagttttttttggggccccgaattggggctcctttggcaaattccccctattggggggccaattaaaatacatgggcctgtttttaaaaaccggtggatcgga

SEQ ID NO: 302115 - DNA, 3536 bp, Homo sapiens
ggtttactcttacgccactgacgtaacgtcatcgtgcgggacgtggacggaagaaaaaagagagtgagcgagcgccggaatcagcccggcgtggagtgcggacccgcggtagtgccagggggcgaaggcggcggtggtgaggaaggtacgcggcgagcggcggggatggctaggcgcccgcgtctctgcggaagctgttgcgcgcccaggctcaagcgcgaggggcgtgagcgccgggccgctggagcggggacgctgccggagcaggtgccggggcccggggatctggcccatggatactttggttagtgaccacatcgcagcatgttgagtcaagtttaccgctgtgggttccagcccttcaaccaacatcttctgccctgggtcaagtgtacaaccgtcttcagatctcattgtatccagccttcagtcatcagacatgttcgttcttggagcaacatcccgtttatcactgtacccctcagtcgtacacatggcaagtccttcgcccaccgcagtgagctgaagcatgccaagagaatcgtggtgaagctcggcagtgccgtggtgacccgaggggatgaatgtggcctggccctggggcgcttggcatctattgttgagcaggtatcagtgctgcagaatcagggcagagagatgatgctggtgaccagtggagccgtagcctttggcaaacaacgcttgcgccatgagatccttctgtctcagagcgtgcggcaggccctccactcggggcagaaccagctgaaagaaatggcaattccagtcttagaggcacgagcctgtgcagctgccggacagagtgggctgatggccttgtatgaggctatgtttacccagtacagcatctgtgctgcccagattttggtgaccaatttggatttccatgatgagcagaagcgccggaacctcaatggaacacttcatgaactccttagaatgaacattgtccccattgtcaacacaaatgatgctgttgtccccccagctgagcccaacagtgacctgcagggggtaaatgttattagtgttaaagataatgatagcctggctgcccgactggctgtggaaatgaaaactgatctcttgattgttctttcagatgtagaaggcctttttgacagccccccaggttcagatgatgcaaagcttattgatatattttatcccggagatcagcagtctgtgacatttggaaccaagtctagagtgggaatgggtggcatggaagccaaggtgaaagcagccctctgggctttgcaaggtggcacttctgttgttattgccaatggaacccacccaaaggtgtctgggcacgtcatcacagacattgtggaggggaagaaagttggtaccttcttttcagaagtaaagcctgcaggccctactgttgagcagcagggagaaatggcgcgatctggaggaaggatgttggccaccttggaacctgagcagagagcagaaattatccatcatctggctgatctgttgacggaccagcgtgatgagatcctgttagccaacaaaaaagacttggaggaggcagaggggagacttgcagctcctctgctgaaacgtttaagcctctccacatccaaattgaacagcctggccatcggtctgcgacagatcgcagcctcctcccaggacagcgtgggacgtgttttgcgccgcacccgaatcgccaaaaacttggaactggaacaagtgactgtcccaattggagttctgctggtgatctttgaatctcgtcctgactgtctaccccaggtggcagctttggctatcgcaagtggcaatggcttgttactcaaaggagggaaggaggctgcacacagcaaccggattctccacctcctgacccaggaggctctctcaatccatggagtcaaggaggccgtgcaactggtgaataccagagaagaagttgaagatctttgccgcctagacaaaatgatagatctgatcattccacgtggctcttcccagctggtcagagacatccagaaagctgctaaggggattccagtgatggggcacagcgaagggatctgtcacatgtatgtggattccgaggccagtgttgataaggtcaccaggctagtcagagactctaaatgtgaatatccagctgcctgtaatgctttggagactttgttaatccaccgggatctgctcaggacaccattatttgaccagatcattgatatgctgagagtggaacaggtaaaaattcatgcaggccccaaatttgcctcctatctgaccttcagcccctccgaagtgaagtcactccgaactgagtatggggacctggaattatgcattgaagtagtggacaacgttcaggatgccattgaccacatccacaagtatggcagctcccacacggatgtcatcgtcacagaggacgaaaacacagcggagttcttcctgcagcacgtagacagtgcctgtgtgttctggaatgccagcactcgcttttctgatggttaccgctttggactgggagctgaagtgggaatcagtacatcgagaatccacgcccggggaccagtaggacttgagggactgcttactactaagtggctgctgcgagggaaggaccacgtggtctcagatttctcagagcatggaagtttaaaatatcttcatgagaacctccctattcctcagagaaacaccaactgaaaagagccaggaaaacccgggaattttccaaaaggtcttcacgttaaacttgtcttatctcaggagagagcccgctcttgtctcccagttcctggtagggtctgcctgttggaaagtgtacctggatgcttctgggctccgtttggcaatagcagtcttggctgatgtgcacagtctggctcccagctcaccctttttttttaaagtaagaaaatagttgctaccgatagggactttgccaagtccaattatcttctaggattgaaaggtgcattttccccataaaaaaggcgaggaaaacccatggctgctttgtgtcacctcagtgacttacagtcccccttggcatttagttggtactagagccagtcatccttaacaaatcttttcacattttatttctttcacatgtagtcatcttcaaaaaggaaagatttggaattttagaaaaggggcaactcttctttttagcattctcatcagaaagtcacaaaaatcgatggaatcatttccactgggaagattgaccttttgtatttatttgtggggtaaattaataagcattccagatgcttgcagcttcctgcatccaggagatgctgtgttccccgtgatgcagctggaacccaagctgcagcaggagatgcaagtttcaggatgttccccactgagctggaggaatatctacagcagtgatgcttgaaatttttgtatgaattattttgtcgtcctacccttttcctccaaaacaaaaattagaggattattttaatactttggattcttcccccttttttgagaaataaagttttttatgaaaagcc

SEQ ID NO: 302116 - DNA, 3417 bp, Homo sapiens
ggtttactcttacgccactgacgtaacgtcatcgtgcgggacgtggacggaagaaaaaagagagtgagcgagcgccggaatcagcccggcgtggagtgcggacccgcggtagtgccagggggcgaaggcggcggtggtgaggaagatactttggttagtgaccacatcgcagcatgttgagtcaagtttaccgctgtgggttccagcccttcaaccaacatcttctgccctgggtcaagtgtacaaccgtcttcagatctcattgtatccagccttcagtcatcagacatgttcgttcttggagcaacatcccgtttatcactgtacccctcagtcgtacacatggcaagtccttcgcccaccgcagtgagctgaagcatgccaagagaatcgtggtgaagctcggcagtgccgtggtgacccgaggggatgaatgtggcctggccctggggcgcttggcatctattgttgagcaggtatcagtgctgcagaatcagggcagagagatgatgctggtgaccagtggagccgtagcctttggcaaacaacgcttgcgccatgagatccttctgtctcagagcgtgcggcaggccctccactcggggcagaaccagctgaaagaaatggcaattccagtcttagaggcacgagcctgtgcagctgccggacagagtgggctgatggccttgtatgaggctatgtttacccagtacagcatctgtgctgcccagattttggtgaccaatttggatttccatgatgagcagaagcgccggaacctcaatggaacacttcatgaactccttagaatgaacattgtccccattgtcaacacaaatgatgctgttgtccccccagctgagcccaacagtgacctgcagggggtaaatgttattagtgttaaagataatgatagcctggctgcccgactggctgtggaaatgaaaactgatctcttgattgttctttcagatgtagaaggcctttttgacagccccccaggttcagatgatgcaaagcttattgatatattttatcccggagatcagcagtctgtgacatttggaaccaagtctagagtgggaatgggtggcatggaagccaaggtgaaagcagccctctgggctttgcaaggtggcacttctgttgttattgccaatggaacccacccaaaggtgtctgggcacgtcatcacagacattgtggaggggaagaaagttggtaccttcttttcagaagtaaagcctgcaggccctactgttgagcagcagggagaaatggcgcgatctggaggaaggatgttggccaccttggaacctgagcagagagcagaaattatccatcatctggctgatctgttgacggaccagcgtgatgagatcctgttagccaacaaaaaagacttggaggaggcagaggggagacttgcagctcctctgctgaaacgtttaagcctctccacatccaaattgaacagcctggccatcggtctgcgacagatcgcagcctcctcccaggacagcgtgggacgtgttttgcgccgcacccgaatcgccaaaaacttggaactggaacaagtgactgtcccaattggagttctgctggtgatctttgaatctcgtcctgactgtctaccccaggtggcagctttggctatcgcaagtggcaatggcttgttactcaaaggagggaaggaggctgcacacagcaaccggattctccacctcctgacccaggaggctctctcaatccatggagtcaaggaggccgtgcaactggtgaataccagagaagaagttgaagatctttgccgcctagacaaaatgatagatctgatcattccacgtggctcttcccagctggtcagagacatccagaaagctgctaaggggattccagtgatggggcacagcgaagggatctgtcacatgtatgtggattccgaggccagtgttgataaggtcaccaggctagtcagagactctaaatgtgaatatccagctgcctgtaatgctttggagactttgttaatccaccgggatctgctcaggacaccattatttgaccagatcattgatatgctgagagtggaacaggtaaaaattcatgcaggccccaaatttgcctcctatctgaccttcagcccctccgaagtgaagtcactccgaactgagtatggggacctggaattatgcattgaagtagtggacaacgttcaggatgccattgaccacatccacaagtatggcagctcccacacggatgtcatcgtcacagaggacgaaaacacagcggagttcttcctgcagcacgtagacagtgcctgtgtgttctggaatgccagcactcgcttttctgatggttaccgctttggactgggagctgaagtgggaatcagtacatcgagaatccacgcccggggaccagtaggacttgagggactgcttactactaagtggctgctgcgagggaaggaccacgtggtctcagatttctcagagcatggaagtttaaaatatcttcatgagaacctccctattcctcagagaaacaccaactgaaaagagccaggaaaacccgggaattttccaaaaggtcttcacgttaaacttgtcttatctcaggagagagcccgctcttgtctcccagttcctggtagggtctgcctgttggaaagtgtacctggatgcttctgggctccgtttggcaatagcagtcttggctgatgtgcacagtctggctcccagctcaccctttttttttaaagtaagaaaatagttgctaccgatagggactttgccaagtccaattatcttctaggattgaaaggtgcattttccccataaaaaaggcgaggaaaacccatggctgctttgtgtcacctcagtgacttacagtcccccttggcatttagttggtactagagccagtcatccttaacaaatcttttcacattttatttctttcacatgtagtcatcttcaaaaaggaaagatttggaattttagaaaaggggcaactcttctttttagcattctcatcagaaagtcacaaaaatcgatggaatcatttccactgggaagattgaccttttgtatttatttgtggggtaaattaataagcattccagatgcttgcagcttcctgcatccaggagatgctgtgttccccgtgatgcagctggaacccaagctgcagcaggagatgcaagtttcaggatgttccccactgagctggaggaatatctacagcagtgatgcttgaaatttttgtatgaattattttgtcgtcctacccttttcctccaaaacaaaaattagaggattattttaatactttgctacacctccccctcaccaaacacatcaaaacctccttctcgaaacacaccacccaacacaacaaacaagttcgaac

SEQ ID NO: 302117 - DNA, 3110 bp, Homo sapiens
taatttcgagtcgccggggcaggggcttccgtgtattacctggtgccccttgactttagcaacatctatggcaagtccttcgcccaccgcagtgagctgaagcatgccaagagaatcgtggtgaagctcggcagtgccgtggtgacccgaggggatgaatgtggcctggccctggggcgcttggcatctattgttgagcaggtatcagtgctgcagaatcagggcagagagatgatgctggtgaccagtggagccgtagcctttggcaaacaacgcttgcgccatgagatccttctgtctcagagcgtgcggcaggccctccactcggggcagaaccagctgaaagaaatggcaattccagtcttagaggcacgagcctgtgcagctgccggacagagtgggctgatggccttgtatgaggctatgtttacccagtacagcatctgtgctgcccagattttggtgaccaatttggatttccatgatgagcagaagcgccggaacctcaatggaacacttcatgaactccttagaatgaacattgtccccattgtcaacacaaatgatgctgttgtccccccagctgagcccaacagtgacctgcagggggtaaatgttattagtgttaaagataatgatagcctggctgcccgactggctgtggaaatgaaaactgatctcttgattgttctttcagatgtagaaggcctttttgacagccccccaggttcagatgatgcaaagcttattgatatattttatcccggagatcagcagtctgtgacatttggaaccaagtctagagtgggaatgggtggcatggaagccaaggtgaaagcagccctctgggctttgcaaggtggcacttctgttgttattgccaatggaacccacccaaaggtgtctgggcacgtcatcacagacattgtggaggggaagaaagttggtaccttcttttcagaagtaaagcctgcaggccctactgttgagcagcagggagaaatggcgcgatctggaggaaggatgttggccaccttggaacctgagcagagagcagaaattatccatcatctggctgatctgttgacggaccagcgtgatgagatcctgttagccaacaaaaaagacttggaggaggcagaggggagacttgcagctcctctgctgaaacgtttaagcctctccacatccaaattgaacagcctggccatcggtctgcgacagatcgcagcctcctcccaggacagcgtgggacgtgttttgcgccgcacccgaatcgccaaaaacttggaactggaacaagtgactgtcccaattggagttctgctggtgatctttgaatctcgtcctgactgtctaccccaggtggcagctttggctatcgcaagtggcaatggcttgttactcaaaggagggaaggaggctgcacacagcaaccggattctccacctcctgacccaggaggctctctcaatccatggagtcaaggaggccgtgcaactggtgaataccagagaagaagttgaagatctttgccgcctagacaaaatgatagatctgatcattccacgtggctcttcccagctggtcagagacatccagaaagctgctaaggggattccagtgatggggcacagcgaagggatctgtcacatgtatgtggattccgaggccagtgttgataaggtcaccaggctagtcagagactctaaatgtgaatatccagctgcctgtaatgctttggagactttgttaatccaccgggatctgctcaggacaccattatttgaccagatcattgatatgctgagagtggaacaggtaaaaattcatgcaggccccaaatttgcctcctatctgaccttcagcccctccgaagtgaagtcactccgaactgagtatggggacctggaattatgcattgaagtagtggacaacgttcaggatgccattgaccacatccacaagtatggcagctcccacacggatgtcatcgtcacagaggacgaaaacacagcggagttcttcctgcagcacgtagacagtgcctgtgtgttctggaatgccagcactcgcttttctgatggttaccgctttggactgggagctgaagtgggaatcagtacatcgagaatccacgcccggggaccagtaggacttgagggactgcttactactaagtggctgctgcgagggaaggaccacgtggtctcagatttctcagagcatggaagtttaaaatatcttcatgagaacctccctattcctcagagaaacaccaactgaaaagagccaggaaaacccgggaattttccaaaaggtcttcacgttaaacttgtcttatctcaggagagagcccgctcttgtctcccagttcctggtagggtctgcctgttggaaagtgtacctggatgcttctgggctccgtttggcaatagcagtcttggctgatgtgcacagtctggctcccagctcaccctttttttttaaagtaagaaaatagttgctaccgatagggactttgccaagtccaattatcttctaggattgaaaggtgcattttccccataaaaaaggcgaggaaaacccatggctgctttgtgtcacctcagtgacttacagtcccccttggcatttagttggtactagagccagtcatccttaacaaatcttttcacattttatttctttcacatgtagtcatcttcaaaaaggaaagatttggaattttagaaaaggggcaactcttctttttagcattctcatcagaaagtcacaaaaatcgatggaatcatttccactgggaagattgaccttttgtatttatttgtggggtaaattaataagcattccagatgcttgcagcttcctgcatccaggagatgctgtgttccccgtgatgcagctggaacccaagctgcagcaggagatgcaagtttcaggatgttccccactgagctggaggaatatctacagcagtgatgcttgaaatttttgtatgaattattttgtcgtcctacccttttcctccaaaacaaaaattagaggattattttaatactttggattcttcccccttttttgagaaataaagttttttatgaaaagcc

SEQ ID NO: 302118 - DNA, 2681 bp, Homo sapiens
aaaaaacatggcaggacaagcgcggttatttcggacgaaggttgataccatgcatatgcagatccttgcctggaactcaatggaacacttcatgaactccttagaatgaacattgtccccattgtcaacacaaatgatgctgttgtccccccagctgagcccaacagtgacctgcagggggtaaatgttattagtgttaaagataatgatagcctggctgcccgactggctgtggaaatgaaaactgatctcttgattgttctttcagatgtagaaggcctttttgacagccccccaggttcagatgatgcaaagcttattgatatattttatcccggagatcagcagtctgtgacatttggaaccaagtctagagtgggaatgggtggcatggaagccaaggtgaaagcagccctctgggctttgcaaggtggcacttctgttgttattgccaatggaacccacccaaaggtgtctgggcacgtcatcacagacattgtggaggggaagaaagttggtaccttcttttcagaagtaaagcctgcaggccctactgttgagcagcagggagaaatggcgcgatctggaggaaggatgttggccaccttggaacctgagcagagagcagaaattatccatcatctggctgatctgttgacggaccagcgtgatgagatcctgttagccaacaaaaaagacttggaggaggcagaggggagacttgcagctcctctgctgaaacgtttaagcctctccacatccaaattgaacagcctggccatcggtctgcgacagatcgcagcctcctcccaggacagcgtgggacgtgttttgcgccgcacccgaatcgccaaaaacttggaactggaacaagtgactgtcccaattggagttctgctggtgatctttgaatctcgtcctgactgtctaccccaggtggcagctttggctatcgcaagtggcaatggcttgttactcaaaggagggaaggaggctgcacacagcaaccggattctccacctcctgacccaggaggctctctcaatccatggagtcaaggaggccgtgcaactggtgaataccagagaagaagttgaagatctttgccgcctagacaaaatgatagatctgatcattccacgtggctcttcccagctggtcagagacatccagaaagctgctaaggggattccagtgatggggcacagcgaagggatctgtcacatgtatgtggattccgaggccagtgttgataaggtcaccaggctagtcagagactctaaatgtgaatatccagctgcctgtaatgctttggagactttgttaatccaccgggatctgctcaggacaccattatttgaccagatcattgatatgctgagagtggaacaggtaaaaattcatgcaggccccaaatttgcctcctatctgaccttcagcccctccgaagtgaagtcactccgaactgagtatggggacctggaattatgcattgaagtagtggacaacgttcaggatgccattgaccacatccacaagtatggcagctcccacacggatgtcatcgtcacagaggacgaaaacacagcggagttcttcctgcagcacgtagacagtgcctgtgtgttctggaatgccagcactcgcttttctgatggttaccgctttggactgggagctgaagtgggaatcagtacatcgagaatccacgcccggggaccagtaggacttgagggactgcttactactaagtggctgctgcgagggaaggaccacgtggtctcagatttctcagagcatggaagtttaaaatatcttcatgagaacctccctattcctcagagaaacaccaactgaaaagagccaggaaaacccgggaattttccaaaaggtcttcacgttaaacttgtcttatctcaggagagagcccgctcttgtctcccagttcctggtagggtctgcctgttggaaagtgtacctggatgcttctgggctccgtttggcaatagcagtcttggctgatgtgcacagtctggctcccagctcaccctttttttttaaagtaagaaaatagttgctaccgatagggactttgccaagtccaattatcttctaggattgaaaggtgcattttccccataaaaaaggcgaggaaaacccatggctgctttgtgtcacctcagtgacttacagtcccccttggcatttagttggtactagagccagtcatccttaacaaatcttttcacattttatttctttcacatgtagtcatcttcaaaaaggaaagatttggaattttagaaaaggggcaactcttctttttagcattctcatcagaaagtcacaaaaatcgatggaatcatttccactgggaagattgaccttttgtatttatttgtggggtaaattaataagcattccagatgcttgcagcttcctgcatccaggagatgctgtgttccccgtgatgcagctggaacccaagctgcagcaggagatgcaagtttcaggatgttccccactgagctggaggaatatctacagcagtgatgcttgaaatttttgtatgaattattttgtcgtcctacccttttcctccaaaacaaaaattagaggattattttaatactttggattcttcccccttttttgagaaataaagttttttatgaaaagcc

SEQ ID NO: 302119 - DNA, 2908 bp, Homo sapiens
atgctggagacactaacaccatgctatgctgcatgcactaacaccagaagtttggcataaacaagatggaaaagttgtgagagaaacttgtcatggagcagtgactgcataagctcttctgaactcgtggttgcattcaacagggtgaggtgctatagtcactgaagatggtgcgatgagcatggcttgtatatttcagtggctagaagactgcatgtttggaaaaaggattgccagtagacagtgtgttctgcagacagaaggggcctgcaagagccgtcatctacatatttgggttcattggttttgcctgatcctagcttggttttgcctgagcttggctgtgttcttccatgaatttctttttggactgcttagctcactcacttatgactttttaatctgcattctaggttattagtgttaaagataatgatagcctggctgcccgactggctgtggaaatgaaaactgatctcttgattgttctttcagatgtagaaggcctttttgacagccccccaggttcagatgatgcaaagcttattgatatattttatcccggagatcagcagtctgtgacatttggaaccaagtctagagtgggaatgggtggcatggaagccaaggtgaaagcagccctctgggctttgcaaggtggcacttctgttgttattgccaatggaacccacccaaaggtgtctgggcacgtcatcacagacattgtggaggggaagaaagttggtaccttcttttcagaagtaaagcctgcaggccctactgttgagcagcagggagaaatggcgcgatctggaggaaggatgttggccaccttggaacctgagcagagagcagaaattatccatcatctggctgatctgttgacggaccagcgtgatgagatcctgttagccaacaaaaaagacttggaggaggcagaggggagacttgcagctcctctgctgaaacgtttaagcctctccacatccaaattgaacagcctggccatcggtctgcgacagatcgcagcctcctcccaggacagcgtgggacgtgttttgcgccgcacccgaatcgccaaaaacttggaactggaacaagtgactgtcccaattggagttctgctggtgatctttgaatctcgtcctgactgtctaccccaggtggcagctttggctatcgcaagtggcaatggcttgttactcaaaggagggaaggaggctgcacacagcaaccggattctccacctcctgacccaggaggctctctcaatccatggagtcaaggaggccgtgcaactggtgaataccagagaagaagttgaagatctttgccgcctagacaaaatgatagatctgatcattccacgtggctcttcccagctggtcagagacatccagaaagctgctaaggggattccagtgatggggcacagcgaagggatctgtcacatgtatgtggattccgaggccagtgttgataaggtcaccaggctagtcagagactctaaatgtgaatatccagctgcctgtaatgctttggagactttgttaatccaccgggatctgctcaggacaccattatttgaccagatcattgatatgctgagagtggaacaggtaaaaattcatgcaggccccaaatttgcctcctatctgaccttcagcccctccgaagtgaagtcactccgaactgagtatggggacctggaattatgcattgaagtagtggacaacgttcaggatgccattgaccacatccacaagtatggcagctcccacacggatgtcatcgtcacagaggacgaaaacacagcggagttcttcctgcagcacgtagacagtgcctgtgtgttctggaatgccagcactcgcttttctgatggttaccgctttggactgggagctgaagtgggaatcagtacatcgagaatccacgcccggggaccagtaggacttgagggactgcttactactaagtggctgctgcgagggaaggaccacgtggtctcagatttctcagagcatggaagtttaaaatatcttcatgagaacctccctattcctcagagaaacaccaactgaaaagagccaggaaaacccgggaattttccaaaaggtcttcacgttaaacttgtcttatctcaggagagagcccgctcttgtctcccagttcctggtagggtctgcctgttggaaagtgtacctggatgcttctgggctccgtttggcaatagcagtcttggctgatgtgcacagtctggctcccagctcaccctttttttttaaagtaagaaaatagttgctaccgatagggactttgccaagtccaattatcttctaggattgaaaggtgcattttccccataaaaaaggcgaggaaaacccatggctgctttgtgtcacctcagtgacttacagtcccccttggcatttagttggtactagagccagtcatccttaacaaatcttttcacattttatttctttcacatgtagtcatcttcaaaaaggaaagatttggaattttagaaaaggggcaactcttctttttagcattctcatcagaaagtcacaaaaatcgatggaatcatttccactgggaagattgaccttttgtatttatttgtggggtaaattaataagcattccagatgcttgcagcttcctgcatccaggagatgctgtgttccccgtgatgcagctggaacccaagctgcagcaggagatgcaagtttcaggatgttccccactgagctggaggaatatctacagcagtgatgcttgaaatttttgtatgaattattttgtcgtcctacccttttcctccaaaacaaaaattagaggattattttaatactttggattcttcccccttttttgagaaataaagttttttatgaaaagcc

SEQ ID NO: 302120 - DNA, 2577 bp, Homo sapiens
ccttctttttcagttctgtccttaaagcacagcatcataagtagcaatggcagaattaaggacaccttgccaggaatatgggcagggctaataaatgttgtgctgaggatatggccatgatctgatgttgggaaacatttatttattaagccaggttatagaaataatgtaaggcctttttgacagccccccaggttcagatgatgcaaagcttattgatatattttatcccggagatcagcagtctgtgacatttggaaccaagtctagagtgggaatgggtggcatggaagccaaggtgaaagcagccctctgggctttgcaaggtggcacttctgttgttattgccaatggaacccacccaaaggtgtctgggcacgtcatcacagacattgtggaggggaagaaagttggtaccttcttttcagaagtaaagcctgcaggccctactgttgagcagcagggagaaatggcgcgatctggaggaaggatgttggccaccttggaacctgagcagagagcagaaattatccatcatctggctgatctgttgacggaccagcgtgatgagatcctgttagccaacaaaaaagacttggaggaggcagaggggagacttgcagctcctctgctgaaacgtttaagcctctccacatccaaattgaacagcctggccatcggtctgcgacagatcgcagcctcctcccaggacagcgtgggacgtgttttgcgccgcacccgaatcgccaaaaacttggaactggaacaagtgactgtcccaattggagttctgctggtgatctttgaatctcgtcctgactgtctaccccaggtggcagctttggctatcgcaagtggcaatggcttgttactcaaaggagggaaggaggctgcacacagcaaccggattctccacctcctgacccaggaggctctctcaatccatggagtcaaggaggccgtgcaactggtgaataccagagaagaagttgaagatctttgccgcctagacaaaatgatagatctgatcattccacgtggctcttcccagctggtcagagacatccagaaagctgctaaggggattccagtgatggggcacagcgaagggatctgtcacatgtatgtggattccgaggccagtgttgataaggtcaccaggctagtcagagactctaaatgtgaatatccagctgcctgtaatgctttggagactttgttaatccaccgggatctgctcaggacaccattatttgaccagatcattgatatgctgagagtggaacaggtaaaaattcatgcaggccccaaatttgcctcctatctgaccttcagcccctccgaagtgaagtcactccgaactgagtatggggacctggaattatgcattgaagtagtggacaacgttcaggatgccattgaccacatccacaagtatggcagctcccacacggatgtcatcgtcacagaggacgaaaacacagcggagttcttcctgcagcacgtagacagtgcctgtgtgttctggaatgccagcactcgcttttctgatggttaccgctttggactgggagctgaagtgggaatcagtacatcgagaatccacgcccggggaccagtaggacttgagggactgcttactactaagtggctgctgcgagggaaggaccacgtggtctcagatttctcagagcatggaagtttaaaatatcttcatgagaacctccctattcctcagagaaacaccaactgaaaagagccaggaaaacccgggaattttccaaaaggtcttcacgttaaacttgtcttatctcaggagagagcccgctcttgtctcccagttcctggtagggtctgcctgttggaaagtgtacctggatgcttctgggctccgtttggcaatagcagtcttggctgatgtgcacagtctggctcccagctcaccctttttttttaaagtaagaaaatagttgctaccgatagggactttgccaagtccaattatcttctaggattgaaaggtgcattttccccataaaaaaggcgaggaaaacccatggctgctttgtgtcacctcagtgacttacagtcccccttggcatttagttggtactagagccagtcatccttaacaaatcttttcacattttatttctttcacatgtagtcatcttcaaaaaggaaagatttggaattttagaaaaggggcaactcttctttttagcattctcatcagaaagtcacaaaaatcgatggaatcatttccactgggaagattgaccttttgtatttatttgtggggtaaattaataagcattccagatgcttgcagcttcctgcatccaggagatgctgtgttccccgtgatgcagctggaacccaagctgcagcaggagatgcaagtttcaggatgttccccactgagctggaggaatatctacagcagtgatgcttgaaatttttgtatgaattattttgtcgtcctacccttttcctccaaaacaaaaattagaggattattttaatactttggattcttcccccttttttgagaaataaagttttttatgaaaagcc

SEQ ID NO: 302121 - DNA, 3610 bp, Homo sapiens
ggtttactcttacgccactgacgtaacgtcatcgtgcgggacgtggacggaagaaaaaagagagtgagcgagcgccggaatcagcccggcgtggagtgcggacccgcggtagtgccagggggcgaaggcggcggtggtgaggaagatactttggttagtgaccacatcgcagcatgttgagtcaagtttaccgctgtgggttccagcccttcaaccaacatcttctgccctgggtcaagtgtacaaccgtcttcagatctcattgtatccagccttcagtcatcagacatgttcgttcttggagcaacatcccgtttatcactgtacccctcagtcgtacacatggcaagtccttcgcccaccgcagtgagctgaagcatgccaagagaatcgtggtgaagctcggcagtgccgtggtgacccgaggggatgaatgtggcctggccctggggcgcttggcatctattgttgagcaggtatcagtgctgcagaatcagggcagagagatgatgctggtgaccagtggagccgtagcctttggcaaacaacgcttgcgccatgagatccttctgtctcagagcgtgcggcaggccctccactcggggcagaaccagctgaaagaaatggcaattccagtcttagaggcacgagcctgtgcagctgccggacagagtgggctgatggccttgtatgaggctatgtttacccagtacagcatctgtgctgcccagattttggtgaccaatttggatttccatgatgagcagaagcgccggaacctcaatggaacacttcatgaactccttagaatgaacattgtccccattgtcaacacaaatgatgctgttgtccccccagctgagcccaacagtgacctgcagggggtaaatgttattagtgttaaagataatgatagcctggctgcccgactggctgtggaaatgaaaactgatctcttgattgttctttcagatgtagaaggcctttttgacagccccccaggttcagatgatgcaaagcttattgatatattttatcccggagatcagcagtctgtgacatttggaaccaagtctagagtgggaatgggtggcatggaagccaaggtgaaagcagccctctgggctttgcaaggtggcacttctgttgttattgccaatggaacccacccaaaggtgtctgggcacgtcatcacagacattgtggaggggaagaaagttggtaccttcttttcagaagtaaagcctgcaggccctactgttgagcagcagggagaaatggcgcgatctggaggaaggatgttggccaccttggaacctgagcagagagcagaaattatccatcatctggctgatctgttgacggaccagcgtgatgagatcctgttagccaacaaaaaagacttggaggaggcagaggggagacttgcagctcctctgctgaaacgtttaagcctctccacatccaaattgaacagcctggccatcggtctgcgacagatcgcagcctcctcccaggacagcgtgggacgtgttttgcgccgcacccgaatcgccaaaaacttggaactggaacaagtgactgtcccaattggagttctgctggtgatctttgaatctcgtcctgactgtctaccccaggtggcagctttggctatcgcaagtggcaatggcttgttactcaaaggagggaaggaggctgcacacagcaaccggattctccacctcctgacccaggaggctctctcaatccatggagtcaaggaggccgtgcaactggtgaataccagagaagaagttgaagatctttgccgcctagacaaaatgatagatctgatcattccacgtggctcttcccagctggtcagagacatccagaaagctgctaaggggattccagtgatggggcacagcgaagggatctgtcacatgtatgtggattccgaggccagtgttgataaggtcaccaggctagtcagagactctaaatgtgaatatccagctgcctgtaatgctttggagactttgttaatccaccgggatctgctcaggacaccattatttgaccagatcattgatatgctgagagtggaacaggtaaaaattcatgcaggccccaaatttgcctcctatctgaccttcagcccctccgaagtgaagtcactccgaactgagtatggggacctggaattatgcattgaagtagtggacaacgttcaggatgccattgaccacatccacaagtatggcagctcccacacggatgtcatcgtcacagaggacgaaaacacagcggagttcttcctgcagcacgtagacagtgcctgtgtgttctggaatgccagcactcgcttttctgatggttaccgctttggactgggagctgaagtgggaatcagtacatcgagaatccacgcccggggaccagtaggacttgagggactgcttactactaagtggctgctgcgagggaaggaccacgtggtctcagatttctcagagcatggaagtttaaaatatcttcatgagaacctccctattcctcagagaaacaccaactgaaaagagccaggaaaacccgggaattttccaaaaggtcttcacgttaaacttgtcttatctcaggagagagcccgctcttgtctcccagttcctggtagggtctgcctgttggaaagtgtacctggatgcttctgggctccgtttggcaatagcagtcttggctgatgtgcacagtctggctcccagctcaccctttttttttaaagtaagaaaatagttgctaccgatagggactttgccaagtccaattatcttctaggattgaaaggtgcattttccccataaaaaaggcgaggaaaacccatggctgctttgtgtcacctcagtgacttacagtcccccttggcatttagttggtactagagccagtcatccttaacaaatcttttcacattttatttctttcacatgtagtcatcttcaaaaaggaaagatttggaattttagaaaaggggcaactcttctttttagcattctcatcagaaagtcacagggtaaattaataagcattccagatgcttgcagcttcctgcatccaggagatgctgtgttccccgtgatgcagctggaacccaagctgcagcaggagatgcaagtttcaggatgttccccactgagctggaggaatatctacagcagtgatgcttgaaatttttgtatgaattattttgtcgtcctacccttttcctccaaaacaaaaattagaggattattttaatactttggattcttcccccttttttgagaaataaagttttttatgaaaagccaaaaaaaaaaaaaaaaaaaaaaaaaaaaaaaaaaaaaaaaaaaaaaaaaaaaaaaaaaaaaaaaaaaaaaaaaaaaaaaaaaaaaaaaaaaaaaaaaaaacaaaaaaaaaaaaaaaaaaaaaaaaaaaaaaaaaaacttgtggcccccttggccccaacgctttttaaatttcgaaaagttttttttggggccccgaattggggctcctttggcaaattccccctattggggggccaattaaaatacatgggcctgtttttaaaaaccggtggatcgga

SEQ ID NO: 302122 - DNA, 2203 bp, Homo sapiens
gtatcacgcttggtaccttctatgcagaagtcgagaccatggaggtcctacatgtggaggtatgatcgataacttggtgcgatctgaaggaaggatgttggacgagcgttggatctcgtgaggctcgagcagcataaatagtatgatccatttcatctggcgttagtatcgtgctatgattggaccagcgtgatgagatcctgttagccaacaaaaaagacttggaggaggcagaggggagacttgcagctcctctgctgaaacgtttaagcctctccacatccaaattgaacagcctggccatcggtctgcgacagatcgcagcctcctcccaggacagcgtgggacgtgttttgcgccgcacccgaatcgccaaaaacttggaactggaacaagtgactgtcccaattggagttctgctggtgatctttgaatctcgtcctgactgtctaccccaggtggcagctttggctatcgcaagtggcaatggcttgttactcaaaggagggaaggaggctgcacacagcaaccggattctccacctcctgacccaggaggctctctcaatccatggagtcaaggaggccgtgcaactggtgaataccagagaagaagttgaagatctttgccgcctagacaaaatgatagatctgatcattccacgtggctcttcccagctggtcagagacatccagaaagctgctaaggggattccagtgatggggcacagcgaagggatctgtcacatgtatgtggattccgaggccagtgttgataaggtcaccaggctagtcagagactctaaatgtgaatatccagctgcctgtaatgctttggagactttgttaatccaccgggatctgctcaggacaccattatttgaccagatcattgatatgctgagagtggaacaggtaaaaattcatgcaggccccaaatttgcctcctatctgaccttcagcccctccgaagtgaagtcactccgaactgagtatggggacctggaattatgcattgaagtagtggacaacgttcaggatgccattgaccacatccacaagtatggcagctcccacacggatgtcatcgtcacagaggacgaaaacacagcggagttcttcctgcagcacgtagacagtgcctgtgtgttctggaatgccagcactcgcttttctgatggttaccgctttggactgggagctgaagtgggaatcagtacatcgagaatccacgcccggggaccagtaggacttgagggactgcttactactaagtggctgctgcgagggaaggaccacgtggtctcagatttctcagagcatggaagtttaaaatatcttcatgagaacctccctattcctcagagaaacaccaactgaaaagagccaggaaaacccgggaattttccaaaaggtcttcacgttaaacttgtcttatctcaggagagagcccgctcttgtctcccagttcctggtagggtctgcctgttggaaagtgtacctggatgcttctgggctccgtttggcaatagcagtcttggctgatgtgcacagtctggctcccagctcaccctttttttttaaagtaagaaaatagttgctaccgatagggactttgccaagtccaattatcttctaggattgaaaggtgcattttccccataaaaaaggcgaggaaaacccatggctgctttgtgtcacctcagtgacttacagtcccccttggcatttagttggtactagagccagtcatccttaacaaatcttttcacattttatttctttcacatgtagtcatcttcaaaaaggaaagatttggaattttagaaaaggggcaactcttctttttagcattctcatcagaaagtcacaaaaatcgatggaatcatttccactgggaagattgaccttttgtatttatttgtggggtaaattaataagcattccagatgcttgcagcttcctgcatccaggagatgctgtgttccccgtgatgcagctggaacccaagctgcagcaggagatgcaagtttcaggatgttccccactgagctggaggaatatctacagcagtgatgcttgaaatttttgtatgaattattttgtcgtcctacccttttcctccaaaacaaaaattagaggattattttaatactttggattcttcccccttttttgagaaataaagttttttatgaaaagcc

SEQ ID NO: 302123 - DNA, 1828 bp, Homo sapiens
gaaggagtgcttgtgaatgctaacatcactgttgctattactgtttgtctcctttgatccactgctctccctttgatctgcaggtggcagctttggctatcgcaagtggcaatggcttgttactcaaaggagggaaggaggctgcacacagcaaccggattctccacctcctgacccaggaggctctctcaatccatggagtcaaggaggccgtgcaactggtgaataccagagaagaagttgaagatctttgccgcctagacaaaatgatagatctgatcattccacgtggctcttcccagctggtcagagacatccagaaagctgctaaggggattccagtgatggggcacagcgaagggatctgtcacatgtatgtggattccgaggccagtgttgataaggtcaccaggctagtcagagactctaaatgtgaatatccagctgcctgtaatgctttggagactttgttaatccaccgggatctgctcaggacaccattatttgaccagatcattgatatgctgagagtggaacaggtaaaaattcatgcaggccccaaatttgcctcctatctgaccttcagcccctccgaagtgaagtcactccgaactgagtatggggacctggaattatgcattgaagtagtggacaacgttcaggatgccattgaccacatccacaagtatggcagctcccacacggatgtcatcgtcacagaggacgaaaacacagcggagttcttcctgcagcacgtagacagtgcctgtgtgttctggaatgccagcactcgcttttctgatggttaccgctttggactgggagctgaagtgggaatcagtacatcgagaatccacgcccggggaccagtaggacttgagggactgcttactactaagtggctgctgcgagggaaggaccacgtggtctcagatttctcagagcatggaagtttaaaatatcttcatgagaacctccctattcctcagagaaacaccaactgaaaagagccaggaaaacccgggaattttccaaaaggtcttcacgttaaacttgtcttatctcaggagagagcccgctcttgtctcccagttcctggtagggtctgcctgttggaaagtgtacctggatgcttctgggctccgtttggcaatagcagtcttggctgatgtgcacagtctggctcccagctcaccctttttttttaaagtaagaaaatagttgctaccgatagggactttgccaagtccaattatcttctaggattgaaaggtgcattttccccataaaaaaggcgaggaaaacccatggctgctttgtgtcacctcagtgacttacagtcccccttggcatttagttggtactagagccagtcatccttaacaaatcttttcacattttatttctttcacatgtagtcatcttcaaaaaggaaagatttggaattttagaaaaggggcaactcttctttttagcattctcatcagaaagtcacaaaaatcgatggaatcatttccactgggaagattgaccttttgtatttatttgtggggtaaattaataagcattccagatgcttgcagcttcctgcatccaggagatgctgtgttccccgtgatgcagctggaacccaagctgcagcaggagatgcaagtttcaggatgttccccactgagctggaggaatatctacagcagtgatgcttgaaatttttgtatgaattattttgtcgtcctacccttttcctccaaaacaaaaattagaggattattttaatactttggattcttcccccttttttgagaaataaagttttttatgaaaagcc

SEQ ID NO: 302124 - DNA, 1225 bp, Homo sapiens
tccacacactgtttcacgagaaggagtgtatcatgatttgtagtaatcgaagaacatgtttatgggaacagggtgactcagctctcctggggaggatggatgaggagttagcaggaagagagggtaccaagtgaggggaaagcagcagggtgggtctggggcatggacaggaagcagaggctgggaaaagctacatcttttattcatgctttttcacaggagctgaagtgggaatcagtacatcgagaatccacgcccggggaccagtaggacttgagggactgcttactactaagtggctgctgcgagggaaggaccacgtggtctcagatttctcagagcatggaagtttaaaatatcttcatgagaacctccctattcctcagagaaacaccaactgaaaagagccaggaaaacccgggaattttccaaaaggtcttcacgttaaacttgtcttatctcaggagagagcccgctcttgtctcccagttcctggtagggtctgcctgttggaaagtgtacctggatgcttctgggctccgtttggcaatagcagtcttggctgatgtgcacagtctggctcccagctcaccctttttttttaaagtaagaaaatagttgctaccgatagggactttgccaagtccaattatcttctaggattgaaaggtgcattttccccataaaaaaggcgaggaaaacccatggctgctttgtgtcacctcagtgacttacagtcccccttggcatttagttggtactagagccagtcatccttaacaaatcttttcacattttatttctttcacatgtagtcatcttcaaaaaggaaagatttggaattttagaaaaggggcaactcttctttttagcattctcatcagaaagtcacaaaaatcgatggaatcatttccactgggaagattgaccttttgtatttatttgtggggtaaattaataagcattccagatgcttgcagcttcctgcatccaggagatgctgtgttccccgtgatgcagctggaacccaagctgcagcaggagatgcaagtttcaggatgttccccactgagctggaggaatatctacagcagtgatgcttgaaatttttgtatgaattattttgtcgtcctacccttttcctccaaaacaaaaattagaggattattttaatactttggattcttcccccttttttgagaaataaagttttttatgaaaagcc

SEQ ID NO: 302125 - DNA, 941 bp, Homo sapiens
gtgaaggatcccgtctgagcagctgggaaggaccacgtggtctcagatttctcagagcatggaagtttaaaatatcttcatgagaacctccctattcctcagagaaacaccaactgaaaagagccaggaaaacccgggaattttccaaaaggtcttcacgttaaacttgtcttatctcaggagagagcccgctcttgtctcccagttcctggtagggtctgcctgttggaaagtgtacctggatgcttctgggctccgtttggcaatagcagtcttggctgatgtgcacagtctggctcccagctcaccctttttttttaaagtaagaaaatagttgctaccgatagggactttgccaagtccaattatcttctaggattgaaaggtgcattttccccataaaaaaggcgaggaaaacccatggctgctttgtgtcacctcagtgacttacagtcccccttggcatttagttggtactagagccagtcatccttaacaaatcttttcacattttatttctttcacatgtagtcatcttcaaaaaggaaagatttggaattttagaaaaggggcaactcttctttttagcattctcatcagaaagtcacaaaaatcgatggaatcatttccactgggaagattgaccttttgtatttatttgtggggtaaattaataagcattccagatgcttgcagcttcctgcatccaggagatgctgtgttccccgtgatgcagctggaacccaagctgcagcaggagatgcaagtttcaggatgttccccactgagctggaggaatatctacagcagtgatgcttgaaatttttgtatgaattattttgtcgtcctacccttttcctccaaaacaaaaattagaggattattttaatactttggattcttcccccttttttgagaaataaagttttttatgaaaagcc

SEQ ID NO: 302126 - DNA, 756 bp, Homo sapiens
taatcaccgactttactggtatccgtctgcattttacgcatggtgtaccttcgatccttctgcgtgctccgttgtggtcactagcatctcttgttggaaaacttcgtctggctcccagctcaccctttttttttaaagtaagaaaatagttgctaccgatagggactttgccaagtccaattatcttctaggattgaaaggtgcattttccccataaaaaaggcgaggaaaacccatggctgctttgtgtcacctcagtgacttacagtcccccttggcatttagttggtactagagccagtcatccttaacaaatcttttcacattttatttctttcacatgtagtcatcttcaaaaaggaaagatttggaattttagaaaaggggcaactcttctttttagcattctcatcagaaagtcacaaaaatcgatggaatcatttccactgggaagattgaccttttgtatttatttgtggggtaaattaataagcattccagatgcttgcagcttcctgcatccaggagatgctgtgttccccgtgatgcagctggaacccaagctgcagcaggagatgcaagtttcaggatgttccccactgagctggaggaatatctacagcagtgatgcttgaaatttttgtatgaattattttgtcgtcctacccttttcctccaaaacaaaaattagaggattattttaatactttggattcttcccccttttttgagaaataaagttttttatgaaaagcc

SEQ ID NO: 302127 - DNA, 163 bp, Homo sapiens
gaagggatctgtcacatgtatgtggattccgaggccagtgttgataaggtcaccaggctaggtgagctggatggggtcttctctttcacaacggagaaatattacatcctctgcagctctggatcatgtcaatggaaacaattctttgctcatcttctttcag

SEQ ID NO: 302128 - DNA, 1537 bp, Homo sapiens
agcggagcagtccccggtgtcggggcaggaggcacgcgcgcggctgaggcgaggtcgctcggcgcagctgttgcggggccatggcggggaccgcgctcaagaggctgatggccgagtacaaacccttgagaacgtgcagtgagagcttgaggaagaaggcctgacttgctgctgcggaattaggagggaaaagtgtatgcgttaaaaggggaaaggctcgttggtggagctttgaaaggtcagattttggctttccctctaatgaaggaaaagggtttttgaacagtgccacctgtcactcctcctaggtagtgttgaggaaacctcttgagtgctttcctacccggtaaattagatatttctaatgtctgaggagagcgaagggagaaatgagaacctaggaacactcggcattccatcgttttacaccgaatgcccgcttggaagaactgctgcgagaagtcttggaataccattgtgttgaaagcgccaggagcctgagtcgccgatggagacgagatagtagccggctaagagcagggcctgagttcagacccggcctctctgcttgttagctctttgaccttgttcctctctctgtctctgcagtttccttgtcttaaaaggttaaacttgatactgcaggtgaagtgcttagcaaaatacctgatgtgtaacccttaataaagttagctgctgcttttgtaattagattgaggataattttggaagaaagttaagctaaaagaatgaatgtgagaaaaaaaataagtggtgaatatacatgtagcttgatttcgtaaaactattggtgacaccgcccagtaagagttgatgtttggcttaagcagaccaaaacgttgcaaatacaggctcactcacgtatggtcattcttcccttggtatctggaggggattggttccaggccccgctgcagataccagaatcctcggatgctcaagtccctactataaggtggcgtggtatttgcatttaatgtatgcatagcctctcataacttttaaatcatctcaaggttacttatagtacctaatgcaatgtaagtgctgcacaaatagttacactgattttttttacttgtatttttaaatcgtcattttttattgttatttttttcaaatattttgtattcctggttggtcgaatccatggatatgcagccgcagatacacagggcctcctgtaaacgttcaaataacgctcgccacctagtgttctgctaaagcagaacataaaggcacacctcagtttcccgcgcgctttgctttattgagcttcacttcgcagatcttgcattttttacaagtttacaagttttttacaagcaaccctgcatggaagcaagtctgttggcaccatttttgctcgcttcgtgtctctctcttacattttaatctattactgtgatctatgatcagtaatctttgatgttactattgtaattattttggggcatcacaaactatgcccataaaagatggtagtcctaataaatgttgtgtgtgcttcactgac

SEQ ID NO: 302129 - DNA, 2917 bp, Homo sapiens
agcggagcagtccccggtgtcggggcaggaggcacgcgcgcggctgaggcgaggtcgctcggcgcagctgttgcggggccatggcggggaccgcgctcaagaggctgatggccgagtacaaacaattaacactgaatcctccggaaggaattgtagcaggccccatgaatgaagagaacttttttgaatgggaggcattgatcatgggcccagaagacacctgctttgagtttggtgtttttcctgccatcctgagtttcccacttgattacccgttaagtcccccaaagatgagatttacctgtgagatgtttcatcccaacatctaccctgatgggagagtctgcatttccatcctccacgcgccaggcgatgaccccatgggctacgagagcagcgcggagcggtggagtcctgtgcagagtgtggagaagatcctgctgtcggtggtgagcatgctggcagagcccaatgacgaaagtggagctaacgtggatgcgtccaaaatgtggcgcgatgaccgggagcagttctataagattgccaagcagatcgtccagaagtctctgggactgtgagacctggcctcgcacaggcgcacacacaccgccaatcagctcagcattctcccccggcacacttagtgacagtgatgctctgtgctggtaccaaacaaggcagacttgcaagaaccacggcatcttttttttttttcaaacctttcctacttcaaacaggcttctcttctgaaatgatgacttaatgtcgaatattgacagcttactgcagttttacagtattcctcacaaagggcttcaggtagattatcagagctgtcagcactacctctccccgctgaaaccagcagttcatggcttcctgtggattccctccctccctggagtgttgagggggttgtacctgccagacttccaggggacgatggaatacccagaacgctccttctgaagaaatggggccctgtagctgcagcacaggggaagggcccggcaccctttctgggtccttcctggttccctgtgggccccatgaggagtccattacttcctttcttccttcatattttacaggcagatgcttttcttataatctaattacatcttttcatttgttatatattacaaaccatcacacttagaaatacttccaggaaatgcttttttgaagtgtgaattaataagaaatggggtaaatagaaaagaaatttattgctgattggccaggtgcggtggttcgtgcctgtaatcccagctctttgggaggccaaggcaggtagatcacaaggtcaggaaattgagaccatcctggctaatacagtgaaaccccatgtctgctaaaattacaaaaaattagctgggcgtggtggtgcacgcctgtagtctcagctactcaggaggctgaggcaggagaatcgcttgaacccgggaggcagaggtagcagtgagctgaagtcccgccactgcactccagcctgggcaacagagcgagactcagtctcaaaaagaaaaaagaaatttattgctgatcacaaggacagacagttttttcccgaccatactcatcaaagatttacgtttgtatattagtaactagtgcattactagagcaggtgcaggtgaggtctttaaagtttcaatgaaagtttcttctggatctacagaaaaaaattttttttttcaatctaaaaactggaaattctagggtttttgtacattttggatgcactgggaatttattagcacaaaatcattctttgcaactcaaaattcagaagggactctaccatatcttagctcagagcacagaggagtgccttatccccacacttgactgggctgtggaggtgggcatgtgggcccctgggcccaggctggggacagagcccttgttttgtgacttaggattttgatgtggttcccatgttctctaacagggccagctgagcagcacaggccaggaggccacagtgtaagcaataacagatctgccacatgcagaagcaaatatcaggcctgtcgcacacgggcggcatttaaataggaatttctatttttgaaataagggatggtctatgaggcatacagtagatttgatgtgatccttttctccctcccttccataatggatcgtggtctgtgtgactgaacccacacagagtgtcatgggtgacagtttctggttgaagtagctccacgcctggcttctgtggacagcagattcttttccttctcacaaggggctcatttaaaatttggaggctgggtgctgtggctcacgcctgcaatcccagcactttgggagactgaggcgggcggatcatgaggtcaggagatcgcgaccatcctggctaacagtgaaaccctgtctccactaaaaatacaaaaaattagccgggcgtggtggcgggcgcctgtagtcccagctactctgaagactgaggcaggagaatggcgtgaacccaggaggcggagcttgcagtgagctgagatcgcgccactgcactccagcctgggcaacagagtgagactctgtctcaaaaaaaaaaaaaaaaaaaaaatggaacgcagggcaagaactcgtatttggaaggagatgggggaaaggagcggtattatacctaagttgtatttgcaggcaaatgagatggagccctctctgtaaagaagagtcatttgtgcaagtagacggggtctgtgggtgcaggccctggaggggcacacaattgcctggaggcttctgtgagatcgggagagggaggagaggcagtctcttgacaaaataaagtatttttattcatttgtatttattaaatgaaaaaacaatcccatggtgtccctgttgtgtggtggaacctaatgactgttgaaataaagttctgtgttttccctgccctgca

SEQ ID NO: 302130 - DNA, 871 bp, Homo sapiens
tacttagaaatttagtaattgttgtacaaaaatgagagcagtctttttcacttcttgatatttccagagtccatcccttttctagatttaattcttaaataacacatagtactacttatatagttaggcaaatctaattatattcttgattaatcaataaatgaactttgctaattccagttatagtttagtatagctgattttttaagcacctgcaaatataacaagtgaaatcctgtgatatacttaagcaacccttgtaaatcaaataaattttacttataaatgtagtaaatcaccatcctgtttcaaaagacttaaaaacaaagcacacacacaaagtagctgatgaataaaaacttgttgctataccttgaaaaatacaacatacataaattatcaatataatatttgtttcttcagctcaaccaagaagactagaatgtccatctaagcctcactggagcaaatgatattatgcattcagtttacagagtgagactctgtctcaaaaaaaaaaaaaaaaaaaaaatggaacgcagggcaagaactcgtatttggaaggagatgggggaaaggagcggtattatacctaagttgtatttgcaggcaaatgagatggagccctctctgtaaagaagagtcatttgtgcaagtagacggggtctgtgggtgcaggccctggaggggcacacaattgcctggaggcttctgtgagatcgggagagggaggagaggcagtctcttgacaaaataaagtatttttattcatttgtatttattaaatgaaaaaacaatcccatggtgtccctgttgtgtggtggaacctaatgactgttgaaataaagttctgtgttttccctgccctgca

SEQ ID NO: 302131 - DNA, 484 bp, Homo sapiens
agcggagcagtccccggtgtcggggcaggaggcacgcgcgcggctgaggcgaggtcgctcggcgcagctgttgcggggccatggcggggaccgcgctcaagaggctgatggccgagtacaaacccttgagaacgtgcagtgagagcttgaggaagaaggcctgacttgctgctgcggaattaggagggaaaagtgtatgcgttaaaaggggaaaggctcgttggtggagctttgaaagaattaacactgaatcctccggaaggaattgtagcaggccccatgaatgaagagaacttttttgaatgggaggcattgatcatgggcccagaagacacctgctttgagtttggtgtttttcctgccatcctgagtttcccacttgattacccgttaagtcccccaaagatgagatttacctgtgagatgtttcatcccaacagtaagtgcttttggaagtagtttttgtggtaccaggataggtacg

SEQ ID NO: 302132 - DNA, 3059 bp, Homo sapiens
  misc_feature (2936)..(2936): n is a, c, g, or t
  misc_feature (2938)..(2938): n is a, c, g, or t
agcggagcagtccccggtgtcggggcaggaggcacgcgcgcggctgaggcgaggtcgctcggcgcagctgttgcggggccatggcggggaccgcgctcaagaggctgatggccgagtacaaacaattaacactgaatcctccggaaggaattgtagcaggccccatgaatgaagagaacttttttgaatgggaggcattgatcatgggcccagaagacacctgctttgagtttggtgtttttcctgccatcctgagtttcccacttgattacccgttaagtcccccaaagatgagatttacctgtgagatgtttcatcccaacatctaccctgatgggagagtctgcatttccatcctccacgcgccaggcgatgaccccatgggctacgagagcagcgcggagcggtggagtcctgtgcagagtgtggagaagatcctgctgtcggtggtgagcatgctggcagagcccaatgacgaaagtggagctaacgtggatgcgtccaaaatgtggcgcgatgaccgggagcagttctataagattgccaagcagatcgtccagaagtctctgggactgtgagacctggcctcgcacaggcgcacacacaccgccaatcagctcagcattctcccccggcacacttagtgacagtgatgctctgtgctggtaccaaacaaggcagacttgcaagaaccacggcatcttttttttttttcaaacctttcctacttcaaacaggcttctcttctgaaatgatgacttaatgtcgaatattgacagcttactgcagttttacagtattcctcacaaagggcttcaggtagattatcagagctgtcagcactacctctccccgctgaaaccagcagttcatggcttcctgtggattccctccctccctggagtgttgagggggttgtacctgccagacttccaggggacgatggaatacccagaacgctccttctgaagaaatggggccctgtagctgcagcacaggggaagggcccggcaccctttctgggtccttcctggttccctgtgggccccatgaggagtccattacttcctttcttccttcatattttacaggcagatgcttttcttataatctaattacatcttttcatttgttatatattacaaaccatcacacttagaaatacttccaggaaatgcttttttgaagtgtgaattaataagaaatggggtaaatagaaaagaaatttattgctgattggccaggtgcggtggttcgtgcctgtaatcccagctctttgggaggccaaggcaggtagatcacaaggtcaggaaattgagaccatcctggctaatacagtgaaaccccatgtctgctaaaattacaaaaaattagctgggcgtggtggtgcacgcctgtagtctcagctactcaggaggctgaggcaggagaatcgcttgaacccgggaggcagaggtagcagtgagctgaagtcccgccactgcactccagcctgggcaacagagcgagactcagtctcaaaaagaaaaaagaaatttattgctgatcacaaggacagacagttttttcccgaccatactcatcaaagatttacgtttgtatattagtaactagtgcattactagagcaggtgcaggtgaggtctttaaagtttcaatgaaagtttcttctggatctacagaaaaaaattttttttttcaatctaaaaactggaaattctagggtttttgtacattttggatgcactgggaatttattagcacaaaatcattctttgcaactcaaaattcagaagggactctaccatatcttagctcagagcacagaggagtgccttatccccacacttgactgggctgtggaggtgggcatgtgggcccctgggcccaggctggggacagagcccttgttttgtgacttaggattttgatgtggttcccatgttctctaacagggccagctgagcagcacaggccaggaggccacagtgtaagcaataacagatctgccacatgcagaagcaaatatcaggcctgtcgcacacgggcggcatttaaataggaatttctatttttgaaataagggatggtctatgaggcatacagtagatttgatgtgatccttttctccctcccttccataatggatcgtggtctgtgtgactgaacccacacagagtgtcatgggtgacagtttctggttgaagtagctccacgcctggcttctgtggacagcagattcttttccttctcacaaggggctcatttaaaatttggaggctgggtgctgtggctcacgcctgcaatcccagcactttgggagactgaggcgggcggatcatgaggtcaggagatcgcgaccatcctggctaacagtgaaaccctgtctccactaaaaatacaaaaaattagccgggcgtggtggcgggcgcctgtagtcccagctactctgaagactgaggcaggagaatggcgtgaacccaggaggcggagcttgcagtgagctgagatcgcgccactgcactccagcctgggcaacagagtgagactctgtctcaaaaaaaaaaaaaaaaaaaaaatggaacgcagggcaagaactcgtatttggaaggagatgggggaaaggagcggtattatacctaagttgtatttgcaggcaaatgagatggagccctctctgtaaagaagagtcatttgtgcaagtagacggggtctgtgggtgcaggccctggaggggcacacaattgcctggaggcttctgtgagatcgggagagggaggagaggcagtctcttgacaaaataaagtatttttattcatttgtatttattaaatgaaaaaacaatcccatggtgtccctgttgtgtggtggaacctaatgactgttgaaataaagttctgtgttttccctgccctgcaaaaaattaaaaaacaaaantntggttcacttggggggggggccgggtccccaattccccttatggggaggtgtttaacattcaatgggccgtggttttaaaccatcttgaactggaaaaacctggcctttcccaagcttaat

SEQ ID NO: 302133 - DNA, 2852 bp, Homo sapiens
agcggagcagtccccggtgtcggggcaggaggcacgcgcgcggctgaggcgaggtcgctcggcgcagctgttgcggggccatggcggggaccgcgctcaagaggctgatggccgagtacaaacaattaacactgaatcctccggaaggaattgtagcaggccccatgaatgaagagaacttttttgaatgggaggcattgatcatgggcccagaagacacctgctttgagtttggtgtttttcctgccatcctgagtttcccacttgattacccgttaagtcccccaaagatgagatttacctgtgagatgtttcatcccaacatctaccctgatgggagagtctgcatttccatcctccacgcgccaggcgatgaccccatgggctacgagagcagcgcggagcggtggagtcctgtgcagagtgtggagaagatcctgctgtcggtggtgagcatgctggcagagcccaatgacgaaagtggagctaacgtggatgcgtccaaaatgtggcgcgatgaccgggagcagttctataagattgccaagcagatcgtccagaagtctctgggactgtgagacctggcctcgcacaggcgcacacacaccgccaatcagctcagcattctcccccggcacacttagtgacagtgatgctctgtgctggtaccaaacaaggcagacttgcaagaaccacggcatcttttttttttttcaaacctttcctacttcaaacaggcttctcttctgaaatgatgacttaatgtcgaatattgacagcttactgcagttttacagtattcctcacaaagggcttcaggtagattatcagagctgtcagcactacctctccccgctgaaaccagcagttcatggcttcctgtggattccctccctccctggagtgttgagggggttgtacctgccagacttccaggggacgatggaatacccagaacgctccttctgaagaaatggggccctgtagctgcagcacaggggaagggcccggcaccctttctgggtccttcctggttccctgtgggccccatgaggagtccattacttcctttcttccttcatattttacaggcagatgcttttcttataatctaattacatcttttcatttgttatatattacaaaccatcacacttagaaatacttccaggaaatgcttttttgaagtgtgaattaataagaaatggggtaaatagaaaagaaatttattgctgattggccaggtgcggtggttcgtgcctgtaatcccagctctttgggaggccaaggcaggtagatcacaaggtcaggaaattgagaccatcctggctaatacagtgaaaccccatgtctgctaaaattacaaaaaattagctgggcgtggtggtgcacgcctgtagtctcagctactcaggaggctgaggcaggagaatcgcttgaacccgggaggcagaggtagcagtgagctgaagtcccgccactgcactccagcctgggcaacagagcgagactcagtctcaaaaagaaaaaagaaatttattgctgatcacaaggacagacagttttttcccgaccatactcatcaaagatttacgtttgtatattagtaactagtgcattactagagcaggtgcaggtgaggtctttaaagtttcaatgaaagtttcttctggatctacagaaaaaaattttttttttcaatctaaaaactggaaattctagggtttttgtacattttggatgcactgggaatttattagcacaaaatcattctttgcaactcaaaattcagaagggactctaccatatcttagctcagagcacagaggagtgccttatccccacacttgactgggctgtggaggtgggcatgtgggcccctgggcccaggctggggacagagcccttgttttgtgacttaggattttgatgtggttcccatgttctctaacagggccagctgagcagcacaggccaggaggccacagtgtaagcaataacagatctgccacatgcagaagcaaatatcaggcctgtcgcacacgggcggcatttaaataggaatttctatttttgaaataagggatggtctatgaggcatacagtagatttgatgtgatccttttctccctcccttccataatggatcgtggtctgtgtgactgaacccacacagagtgtcatgggtgacagtttctggttgaagtagctccacgcctggcttctgtggacagcagattcttttccttctcacaaggggctcatttaaaatttggaggctgggtgctgtggctcacgcctgcaatcccagcactttgggagactgaggcgggcggatcatgaggtcaggagatcgcgaccatcctggctaacagtgaaaccctgtctccactaaaaatacaaaaaattagccgggcgtggtggcgggcgcctgtagtcccagctactctgaagactgaggcaggagaatggcgtgaacccaggaggcggagcttgcagtgagctgagatcgcgccactgcactccagcctgggcaacagagtgagactctgtctcaaaaaaaggtattatacctaagttgtatttgcaggcaaatgagatggagccctctctgtaaagaagagtcatttgtgcaagtagacggggtctgtgggtgcaggccctggaggggcacacaattgcctggaggcttctgtgagatcgggagagggaggagaggcagtctcttgacaaaataaagtatttttattcatttgtatttattaaatgaaaaaacaatcccatggtgtccctgttgtgtggtggaacctaatgactgttgaaataaagttctgtgttttccctgccctgca

SEQ ID NO: 302134 - DNA, 2473 bp, Homo sapiens
agcggagcagtccccggtgtcggggcaggaggcacgcgcgcggctgaggcgaggtcgctcggcgcagctgttgcggggccatggcggggaccgcgctcaagaggctgatggccgagtacaaacaattaacactgaatcctccggaaggaattgtagcaggccccatgaatgaagagaacttttttgaatgggaggcattgatcatgggcccagaagacacctgctttgagtttggtgtttttcctgccatcctgagtttcccacttgattacccgttaagtcccccaaagatgagatttacctgtgagatgtttcatcccaacatctaccctgatgggagagtctgcatttccatcctccacgcgccaggcgatgaccccatgggctacgagagcagcgcggagcggtggagtcctgtgcagagtgtggagaagatcctgctgtcggtggtgagcatgctggcagagcccaatgacgaaagtggagctaacgtggatgcgtccaaaatgtggcgcgatgaccgggagcagttctataagattgccaagcagatcgtccagaagtctctgggactgtgagacctggcctcgcacaggcgcacacacaccgccaatcagctcagcattctcccccggcacacttagtgacagtgatgctctgtgctggtaccaaacaaggcagacttgcaagaaccacggcatcttttttttttttcaaacctttcctacttcaaacaggcttctcttctgaaatgatgacttaatgtcgaatattgacagcttactgcagttttacagtattcctcacaaagggcttcaggtagattatcagagctgtcagcactacctctccccgctgaaaccagcagttcatggcttcctgtggattccctccctccctggagtgttgagggggttgtacctgccagacttccaggggacgatggaatacccagaacgctccttctgaagaaatggggccctgtagctgcagcacaggggaagggcccggcaccctttctgggtccttcctggttccctgtgggccccatgaggagtccattacttcctttcttccttcatattttacaggcagatgcttttcttataatctaattacatcttttcatttgttatatattacaaaccatcacacttagaaatacttccaggaaatgcttttttgaagtgtgaattaataagaaatggggtaaatagaaaagaaatttattgctgattggccaggtgcggtggttcgtgcctgtaatcccagctctttgggaggccaaggcaggtagatcacaaggtcaggaaattgagaccatcctggctaatacagtgaaaccccatgtctgctaaaattacaaaaaattagctgggcgtggtggtgcacgcctgtagtctcagctactcaggaggctgaggcaggagaatcgcttgaacccgggaggcagaggtagcagtgagctgaagtcccgccactgcactccagcctgggcaacagagcgagactcagtctcaaaaagaaaaaagaaatttattgctgatcacaaggacagacagttttttcccgaccatactcatcaaagatttacgtttgtatattagtaactagtgcattactagagcaggtgcaggtgaggtctttaaagtttcaatgaaagtttcttctggatctacagaaaaaaattttttttttcaatctaaaaactggaaattctagggtttttgtacattttggatgcactgggaatttattagcacaaaatcattctttgcaactcaaaattcagaagggactctaccatatcttagctcagagcacagaggagtgccttatccccacacttgactgggctgtggaggtgggcatgtgggcccctgggcccaggctggggacagagcccttgttttgtgacttaggattttgatgtggttcccatgttctctaacagggccagctgagcagcacaggccaggaggccacagtgtaagcaataacagatctgccacatgcagaagcaaatatcaggcctgtcgcacacgggcggcatttaaataggaatttctatttttgaaataagggatggtctatgaggcatacagtagatttgatgtgatccttttctccctcccttccataatggatcgtggtctgtgtgactgaacccacacagagtgtcatgggtgacagtttctggttgaagtagctccacgcctggcttctgtggacagcagattcttttccttctcacaaggggctcatttaaaatttggaggctggattacaggcttgggccacggcccagccaatgtcctagagagttccgtgatctgaatccttatgtattattgtagctatattcatacaaagtgctttaagtgtgcagagtcattaaccctttctcctaaaatacggattggcagcctcgggaaatcggtccctcggatccaacaacttaccttgcaacaaa

SEQ ID NO: 302135 - DNA, 3032 bp, Homo sapiens
agcggagcagtccccggtgtcggggcaggaggcacgcgcgcggctgaggcgaggtcgctcggcgcagctgttgcggggccatggcggggaccgcgctcaagaggctgatggccgagtacaaacccttgagaacgtgcagtgagagcttgaggaagaaggcctgacttgctgctgcggaattaggagggaaaagtgtatgcgttaaaaggggaaaggctcgttggtggagctttgaaagaattaacactgaatcctccggaaggaattgtagcaggccccatgaatgaagagaacttttttgaatgggaggcattgatcatgggcccagaagacacctgctttgagtttggtgtttttcctgccatcctgagtttcccacttgattacccgttaagtcccccaaagatgagatttacctgtgagatgtttcatcccaacatctaccctgatgggagagtctgcatttccatcctccacgcgccaggcgatgaccccatgggctacgagagcagcgcggagcggtggagtcctgtgcagagtgtggagaagatcctgctgtcggtggtgagcatgctggcagagcccaatgacgaaagtggagctaacgtggatgcgtccaaaatgtggcgcgatgaccgggagcagttctataagattgccaagcagatcgtccagaagtctctgggactgtgagacctggcctcgcacaggcgcacacacaccgccaatcagctcagcattctcccccggcacacttagtgacagtgatgctctgtgctggtaccaaacaaggcagacttgcaagaaccacggcatcttttttttttttcaaacctttcctacttcaaacaggcttctcttctgaaatgatgacttaatgtcgaatattgacagcttactgcagttttacagtattcctcacaaagggcttcaggtagattatcagagctgtcagcactacctctccccgctgaaaccagcagttcatggcttcctgtggattccctccctccctggagtgttgagggggttgtacctgccagacttccaggggacgatggaatacccagaacgctccttctgaagaaatggggccctgtagctgcagcacaggggaagggcccggcaccctttctgggtccttcctggttccctgtgggccccatgaggagtccattacttcctttcttccttcatattttacaggcagatgcttttcttataatctaattacatcttttcatttgttatatattacaaaccatcacacttagaaatacttccaggaaatgcttttttgaagtgtgaattaataagaaatggggtaaatagaaaagaaatttattgctgattggccaggtgcggtggttcgtgcctgtaatcccagctctttgggaggccaaggcaggtagatcacaaggtcaggaaattgagaccatcctggctaatacagtgaaaccccatgtctgctaaaattacaaaaaattagctgggcgtggtggtgcacgcctgtagtctcagctactcaggaggctgaggcaggagaatcgcttgaacccgggaggcagaggtagcagtgagctgaagtcccgccactgcactccagcctgggcaacagagcgagactcagtctcaaaaagaaaaaagaaatttattgctgatcacaaggacagacagttttttcccgaccatactcatcaaagatttacgtttgtatattagtaactagtgcattactagagcaggtgcaggtgaggtctttaaagtttcaatgaaagtttcttctggatctacagaaaaaaattttttttttcaatctaaaaactggaaattctagggtttttgtacattttggatgcactgggaatttattagcacaaaatcattctttgcaactcaaaattcagaagggactctaccatatcttagctcagagcacagaggagtgccttatccccacacttgactgggctgtggaggtgggcatgtgggcccctgggcccaggctggggacagagcccttgttttgtgacttaggattttgatgtggttcccatgttctctaacagggccagctgagcagcacaggccaggaggccacagtgtaagcaataacagatctgccacatgcagaagcaaatatcaggcctgtcgcacacgggcggcatttaaataggaatttctatttttgaaataagggatggtctatgaggcatacagtagatttgatgtgatccttttctccctcccttccataatggatcgtggtctgtgtgactgaacccacacagagtgtcatgggtgacagtttctggttgaagtagctccacgcctggcttctgtggacagcagattcttttccttctcacaaggggctcatttaaaatttggaggctgggtgctgtggctcacgcctgcaatcccagcactttgggagactgaggcgggcggatcatgaggtcaggagatcgcgaccatcctggctaacagtgaaaccctgtctccactaaaaatacaaaaaattagccgggcgtggtggcgggcgcctgtagtcccagctactctgaagactgaggcaggagaatggcgtgaacccaggaggcggagcttgcagtgagctgagatcgcgccactgcactccagcctgggcaacagagtgagactctgtctcaaaaaaaaaaaaaaaaaaaaaatggaacgcagggcaagaactcgtatttggaaggagatgggggaaaggagcggtattatacctaagttgtatttgcaggcaaatgagatggagccctctctgtaaagaagagtcatttgtgcaagtagacggggtctgtgggtgcaggccctggaggggcacacaattgcctggaggcttctgtgagatcgggagagggaggagaggcagtctcttgacaaaataaagtatttttattcatttgtatttattaaatgaaaaaacaatcccatggtgtccctgttgtgtggtggaacctaatgactgttgaaataaagttctgtgttttccctgccctgca

SEQ ID NO: 302136 - DNA, 2835 bp, Homo sapiens
agcggagcagtccccggtgtcggggcaggaggcacgcgcgcggctgaggcgaggtcgctcggcgcagctgttgcggggccatggcggggaccgcgctcaagaggctgatggccgagtacaaacgggcccagaagacacctgctttgagtttggtgtttttcctgccatcctgagtttcccacttgattacccgttaagtcccccaaagatgagatttacctgtgagatgtttcatcccaacatctaccctgatgggagagtctgcatttccatcctccacgcgccaggcgatgaccccatgggctacgagagcagcgcggagcggtggagtcctgtgcagagtgtggagaagatcctgctgtcggtggtgagcatgctggcagagcccaatgacgaaagtggagctaacgtggatgcgtccaaaatgtggcgcgatgaccgggagcagttctataagattgccaagcagatcgtccagaagtctctgggactgtgagacctggcctcgcacaggcgcacacacaccgccaatcagctcagcattctcccccggcacacttagtgacagtgatgctctgtgctggtaccaaacaaggcagacttgcaagaaccacggcatcttttttttttttcaaacctttcctacttcaaacaggcttctcttctgaaatgatgacttaatgtcgaatattgacagcttactgcagttttacagtattcctcacaaagggcttcaggtagattatcagagctgtcagcactacctctccccgctgaaaccagcagttcatggcttcctgtggattccctccctccctggagtgttgagggggttgtacctgccagacttccaggggacgatggaatacccagaacgctccttctgaagaaatggggccctgtagctgcagcacaggggaagggcccggcaccctttctgggtccttcctggttccctgtgggccccatgaggagtccattacttcctttcttccttcatattttacaggcagatgcttttcttataatctaattacatcttttcatttgttatatattacaaaccatcacacttagaaatacttccaggaaatgcttttttgaagtgtgaattaataagaaatggggtaaatagaaaagaaatttattgctgattggccaggtgcggtggttcgtgcctgtaatcccagctctttgggaggccaaggcaggtagatcacaaggtcaggaaattgagaccatcctggctaatacagtgaaaccccatgtctgctaaaattacaaaaaattagctgggcgtggtggtgcacgcctgtagtctcagctactcaggaggctgaggcaggagaatcgcttgaacccgggaggcagaggtagcagtgagctgaagtcccgccactgcactccagcctgggcaacagagcgagactcagtctcaaaaagaaaaaagaaatttattgctgatcacaaggacagacagttttttcccgaccatactcatcaaagatttacgtttgtatattagtaactagtgcattactagagcaggtgcaggtgaggtctttaaagtttcaatgaaagtttcttctggatctacagaaaaaaattttttttttcaatctaaaaactggaaattctagggtttttgtacattttggatgcactgggaatttattagcacaaaatcattctttgcaactcaaaattcagaagggactctaccatatcttagctcagagcacagaggagtgccttatccccacacttgactgggctgtggaggtgggcatgtgggcccctgggcccaggctggggacagagcccttgttttgtgacttaggattttgatgtggttcccatgttctctaacagggccagctgagcagcacaggccaggaggccacagtgtaagcaataacagatctgccacatgcagaagcaaatatcaggcctgtcgcacacgggcggcatttaaataggaatttctatttttgaaataagggatggtctatgaggcatacagtagatttgatgtgatccttttctccctcccttccataatggatcgtggtctgtgtgactgaacccacacagagtgtcatgggtgacagtttctggttgaagtagctccacgcctggcttctgtggacagcagattcttttccttctcacaaggggctcatttaaaatttggaggctgggtgctgtggctcacgcctgcaatcccagcactttgggagactgaggcgggcggatcatgaggtcaggagatcgcgaccatcctggctaacagtgaaaccctgtctccactaaaaatacaaaaaattagccgggcgtggtggcgggcgcctgtagtcccagctactctgaagactgaggcaggagaatggcgtgaacccaggaggcggagcttgcagtgagctgagatcgcgccactgcactccagcctgggcaacagagtgagactctgtctcaaaaaaaaaaaaaaaaaaaaaatggaacgcagggcaagaactcgtatttggaaggagatgggggaaaggagcggtattatacctaagttgtatttgcaggcaaatgagatggagccctctctgtaaagaagagtcatttgtgcaagtagacggggtctgtgggtgcaggccctggaggggcacacaattgcctggaggcttctgtgagatcgggagagggaggagaggcagtctcttgacaaaataaagtatttttattcatttgtatttattaaatgaaaaaacaatcccatggtgtccctgttgtgtggtggaacctaatgactgttgaaataaagttctgtgttttccctgccctgca

SEQ ID NO: 302137 - DNA, 2972 bp, Homo sapiens
aaggaactagctctgaaaagtattgtaaataatcctaatcacattagatattttgataaaatatttgccagataacctttcatttagtctttttgtatatattgcttgaaaaaaattcatatgaaagtggattagactacgacagctgattagaactggctgggtcagcctggagcctgtcagtgagtgagcaggccccaccgggattcctgcagacatgaagcgtgacactcagggccccaggctatgccccagctgtgcaaacagcttggttgctgtgtctgcagtctttgttctcattatctgtggagcctgcccaagcgcggcgatgcctcgggcaccattcctgggctcacttggctgcctctgacccttgcagtctaccctgatgggagagtctgcatttccatcctccacgcgccaggcgatgaccccatgggctacgagagcagcgcggagcggtggagtcctgtgcagagtgtggagaagatcctgctgtcggtggtgagcatgctggcagagcccaatgacgaaagtggagctaacgtggatgcgtccaaaatgtggcgcgatgaccgggagcagttctataagattgccaagcagatcgtccagaagtctctgggactgtgagacctggcctcgcacaggcgcacacacaccgccaatcagctcagcattctcccccggcacacttagtgacagtgatgctctgtgctggtaccaaacaaggcagacttgcaagaaccacggcatcttttttttttttcaaacctttcctacttcaaacaggcttctcttctgaaatgatgacttaatgtcgaatattgacagcttactgcagttttacagtattcctcacaaagggcttcaggtagattatcagagctgtcagcactacctctccccgctgaaaccagcagttcatggcttcctgtggattccctccctccctggagtgttgagggggttgtacctgccagacttccaggggacgatggaatacccagaacgctccttctgaagaaatggggccctgtagctgcagcacaggggaagggcccggcaccctttctgggtccttcctggttccctgtgggccccatgaggagtccattacttcctttcttccttcatattttacaggcagatgcttttcttataatctaattacatcttttcatttgttatatattacaaaccatcacacttagaaatacttccaggaaatgcttttttgaagtgtgaattaataagaaatggggtaaatagaaaagaaatttattgctgattggccaggtgcggtggttcgtgcctgtaatcccagctctttgggaggccaaggcaggtagatcacaaggtcaggaaattgagaccatcctggctaatacagtgaaaccccatgtctgctaaaattacaaaaaattagctgggcgtggtggtgcacgcctgtagtctcagctactcaggaggctgaggcaggagaatcgcttgaacccgggaggcagaggtagcagtgagctgaagtcccgccactgcactccagcctgggcaacagagcgagactcagtctcaaaaagaaaaaagaaatttattgctgatcacaaggacagacagttttttcccgaccatactcatcaaagatttacgtttgtatattagtaactagtgcattactagagcaggtgcaggtgaggtctttaaagtttcaatgaaagtttcttctggatctacagaaaaaaattttttttttcaatctaaaaactggaaattctagggtttttgtacattttggatgcactgggaatttattagcacaaaatcattctttgcaactcaaaattcagaagggactctaccatatcttagctcagagcacagaggagtgccttatccccacacttgactgggctgtggaggtgggcatgtgggcccctgggcccaggctggggacagagcccttgttttgtgacttaggattttgatgtggttcccatgttctctaacagggccagctgagcagcacaggccaggaggccacagtgtaagcaataacagatctgccacatgcagaagcaaatatcaggcctgtcgcacacgggcggcatttaaataggaatttctatttttgaaataagggatggtctatgaggcatacagtagatttgatgtgatccttttctccctcccttccataatggatcgtggtctgtgtgactgaacccacacagagtgtcatgggtgacagtttctggttgaagtagctccacgcctggcttctgtggacagcagattcttttccttctcacaaggggctcatttaaaatttggaggctgggtgctgtggctcacgcctgcaatcccagcactttgggagactgaggcgggcggatcatgaggtcaggagatcgcgaccatcctggctaacagtgaaaccctgtctccactaaaaatacaaaaaattagccgggcgtggtggcgggcgcctgtagtcccagctactctgaagactgaggcaggagaatggcgtgaacccaggaggcggagcttgcagtgagctgagatcgcgccactgcactccagcctgggcaacagagtgagactctgtctcaaaaaaaaaaaaaaaaaaaaaatggaacgcagggcaagaactcgtatttggaaggagatgggggaaaggagcggtattatacctaagttgtatttgcaggcaaatgagatggagccctctctgtaaagaagagtcatttgtgcaagtagacggggtctgtgggtgcaggccctggaggggcacacaattgcctggaggcttctgtgagatcgggagagggaggagaggcagtctcttgacaaaataaagtatttttattcatttgtatttattaaatgaaaaaacaatcccatggtgtccctgttgtgtggtggaacctaatgactgttgaaataaagttctgtgttttccctgccctgca

SEQ ID NO: 302138 - DNA, 3017 bp, Homo sapiens
agcggagcagtccccggtgtcggggcaggaggcacgcgcgcggctgaggcgaggtcgctcggcgcagctgttgcggggccatggcggggaccgcgctcaagaggctgatggccgagtacaaacaattaacactgaatcctccggaaggaattgtagcaggccccatgaatgaagagaacttttttgaatgggaggcattgatcatgggcccagaagacacctgctttgagtttggtgtttttcctgccatcctgagtttcccacttgattacccgttaagtcccccaaagatgagatttacctgtgagatgtttcatcccaacatgtcaccctatgggaccaactcctggagaaggcaacacagaagtgggaaacttcctgattttgtggatgtggatcttaggtggacagcctgatgtccaggtctaccctgatgggagagtctgcatttccatcctccacgcgccaggcgatgaccccatgggctacgagagcagcgcggagcggtggagtcctgtgcagagtgtggagaagatcctgctgtcggtggtgagcatgctggcagagcccaatgacgaaagtggagctaacgtggatgcgtccaaaatgtggcgcgatgaccgggagcagttctataagattgccaagcagatcgtccagaagtctctgggactgtgagacctggcctcgcacaggcgcacacacaccgccaatcagctcagcattctcccccggcacacttagtgacagtgatgctctgtgctggtaccaaacaaggcagacttgcaagaaccacggcatcttttttttttttcaaacctttcctacttcaaacaggcttctcttctgaaatgatgacttaatgtcgaatattgacagcttactgcagttttacagtattcctcacaaagggcttcaggtagattatcagagctgtcagcactacctctccccgctgaaaccagcagttcatggcttcctgtggattccctccctccctggagtgttgagggggttgtacctgccagacttccaggggacgatggaatacccagaacgctccttctgaagaaatggggccctgtagctgcagcacaggggaagggcccggcaccctttctgggtccttcctggttccctgtgggccccatgaggagtccattacttcctttcttccttcatattttacaggcagatgcttttcttataatctaattacatcttttcatttgttatatattacaaaccatcacacttagaaatacttccaggaaatgcttttttgaagtgtgaattaataagaaatggggtaaatagaaaagaaatttattgctgattggccaggtgcggtggttcgtgcctgtaatcccagctctttgggaggccaaggcaggtagatcacaaggtcaggaaattgagaccatcctggctaatacagtgaaaccccatgtctgctaaaattacaaaaaattagctgggcgtggtggtgcacgcctgtagtctcagctactcaggaggctgaggcaggagaatcgcttgaacccgggaggcagaggtagcagtgagctgaagtcccgccactgcactccagcctgggcaacagagcgagactcagtctcaaaaagaaaaaagaaatttattgctgatcacaaggacagacagttttttcccgaccatactcatcaaagatttacgtttgtatattagtaactagtgcattactagagcaggtgcaggtgaggtctttaaagtttcaatgaaagtttcttctggatctacagaaaaaaattttttttttcaatctaaaaactggaaattctagggtttttgtacattttggatgcactgggaatttattagcacaaaatcattctttgcaactcaaaattcagaagggactctaccatatcttagctcagagcacagaggagtgccttatccccacacttgactgggctgtggaggtgggcatgtgggcccctgggcccaggctggggacagagcccttgttttgtgacttaggattttgatgtggttcccatgttctctaacagggccagctgagcagcacaggccaggaggccacagtgtaagcaataacagatctgccacatgcagaagcaaatatcaggcctgtcgcacacgggcggcatttaaataggaatttctatttttgaaataagggatggtctatgaggcatacagtagatttgatgtgatccttttctccctcccttccataatggatcgtggtctgtgtgactgaacccacacagagtgtcatgggtgacagtttctggttgaagtagctccacgcctggcttctgtggacagcagattcttttccttctcacaaggggctcatttaaaatttggaggctgggtgctgtggctcacgcctgcaatcccagcactttgggagactgaggcgggcggatcatgaggtcaggagatcgcgaccatcctggctaacagtgaaaccctgtctccactaaaaatacaaaaaattagccgggcgtggtggcgggcgcctgtagtcccagctactctgaagactgaggcaggagaatggcgtgaacccaggaggcggagcttgcagtgagctgagatcgcgccactgcactccagcctgggcaacagagtgagactctgtctcaaaaaaaaaaaaaaaaaaaaaatggaacgcagggcaagaactcgtatttggaaggagatgggggaaaggagcggtattatacctaagttgtatttgcaggcaaatgagatggagccctctctgtaaagaagagtcatttgtgcaagtagacggggtctgtgggtgcaggccctggaggggcacacaattgcctggaggcttctgtgagatcgggagagggaggagaggcagtctcttgacaaaataaagtatttttattcatttgtatttattaaatgaaaaaacaatcccatggtgtccctgttgtgtggtggaacctaatgactgttgaaataaagttctgtgttttccctgccctgca

SEQ ID NO: 302139 - DNA, 1702 bp, Homo sapiens
  misc_feature (10)..(10): n is a, c, g, or t
  misc_feature (12)..(12): n is a, c, g, or t
  misc_feature (14)..(14): n is a, c, g, or t
  misc_feature (20)..(20): n is a, c, g, or t
aaggctagtngngnctgggngtaatcggccgagggtggttcgtgcctgtaatcccagctctttgggaggccaaggcaggtagatcacaaggtcaggaaattgagaccatcctggctaatacagtgaaaccccatgtctgctaaaattacaaaaaattagctgggcgtggtggtgcacgcctgtagtctcagctactcaggaggctgaggcaggagaatcgcttgaacccgggaggcagaggtagcagtgagctgaagtcccgccactgcactccagcctgggcaacagagcgagactcagtctcaaaaagaaaaaagaaatttattgctgatcacaaggacagacagttttttcccgaccatactcatcaaagatttacgtttgtatattagtaactagtgcattactagagcaggtgcaggtgaggtctttaaagtttcaatgaaagtttcttctggatctacagaaaaaaattttttttttcaatctaaaaactggaaattctagggtttttgtacattttggatgcactgggaatttattagcacaaaatcattctttgcaactcaaaattcagaagggactctaccatatcttagctcagagcacagaggagtgccttatccccacacttgactgggctgtggaggtgggcatgtgggcccctgggcccaggctggggacagagcccttgttttgtgacttaggattttgatgtggttcccatgttctctaacagggccagctgagcagcacaggccaggaggccacagtgtaagcaataacagatctgccacatgcagaagcaaatatcaggcctgtcgcacacgggcggcatttaaataggaatttctatttttgaaataagggatggtctatgaggcatacagtagatttgatgtgatccttttctccctcccttccataatggatcgtggtctgtgtgactgaacccacacagagtgtcatgggtgacagtttctggttgaagtagctccacgcctggcttctgtggacagcagattcttttccttctcacaaggggctcatttaaaatttggaggctgggtgctgtggctcacgcctgcaatcccagcactttgggagactgaggcgggcggatcatgaggtcaggagatcgcgaccatcctggctaacagtgaaaccctgtctccactaaaaatacaaaaaattagccgggcgtggtggcgggcgcctgtagtcccagctactctgaagactgaggcaggagaatggcgtgaacccaggaggcggagcttgcagtgagctgagatcgcgccactgcactccagcctgggcaacagagtgagactctgtctcaaaaaaaaaaaaaaaaaaaaaatggaacgcagggcaagaactcgtatttggaaggagatgggggaaaggagcggtattatacctaagttgtatttgcaggcaaatgagatggagccctctctgtaaagaagagtcatttgtgcaagtagacggggtctgtgggtgcaggccctggaggggcacacaattgcctggaggcttctgtgagatcgggagagggaggagaggcagtctcttgacaaaataaagtatttttattcatttgtatttattaaatgaaaaaacaatcccatggtgtccctgttgtgtggtggaacctaatgactgttgaaataaagttctgtgttttccctgccctgca

SEQ ID NO: 302140 - DNA, 1802 bp, Homo sapiens
ccaagatctttgagcatcaccaccaaatctactgataattaaaagataacaggatattatgataactcggagggacaacaagcttgaaaacttagaaaggacaattccttgaaaatcacattttctaaaatgatataactagaaacagaaaatctggatagtctttgaactttcaaagaaattgaggtcgtatcttgaaatctccataccaaatgtccaagaaaaatattgggcccagacggctttgttgatgaactcttccaaacatttaagttagaaacactacgagccaggcacagtggctgactagcctgtagtccatcattttgggaagccaaggcagatggatagcttgatcccagaagttcaactccagcctgggcaacagagcgagactcagtctcaaaaagaaaaaagaaatttattgctgatcacaaggacagacagttttttcccgaccatactcatcaaagatttacgtttgtatattagtaactagtgcattactagagcaggtgcaggtgaggtctttaaagtttcaatgaaagtttcttctggatctacagaaaaaaattttttttttcaatctaaaaactggaaattctagggtttttgtacattttggatgcactgggaatttattagcacaaaatcattctttgcaactcaaaattcagaagggactctaccatatcttagctcagagcacagaggagtgccttatccccacacttgactgggctgtggaggtgggcatgtgggcccctgggcccaggctggggacagagcccttgttttgtgacttaggattttgatgtggttcccatgttctctaacagggccagctgagcagcacaggccaggaggccacagtgtaagcaataacagatctgccacatgcagaagcaaatatcaggcctgtcgcacacgggcggcatttaaataggaatttctatttttgaaataagggatggtctatgaggcatacagtagatttgatgtgatccttttctccctcccttccataatggatcgtggtctgtgtgactgaacccacacagagtgtcatgggtgacagtttctggttgaagtagctccacgcctggcttctgtggacagcagattcttttccttctcacaaggggctcatttaaaatttggaggctgggtgctgtggctcacgcctgcaatcccagcactttgggagactgaggcgggcggatcatgaggtcaggagatcgcgaccatcctggctaacagtgaaaccctgtctccactaaaaatacaaaaaattagccgggcgtggtggcgggcgcctgtagtcccagctactctgaagactgaggcaggagaatggcgtgaacccaggaggcggagcttgcagtgagctgagatcgcgccactgcactccagcctgggcaacagagtgagactctgtctcaaaaaaaaaaaaaaaaaaaaaatggaacgcagggcaagaactcgtatttggaaggagatgggggaaaggagcggtattatacctaagttgtatttgcaggcaaatgagatggagccctctctgtaaagaagagtcatttgtgcaagtagacggggtctgtgggtgcaggccctggaggggcacacaattgcctggaggcttctgtgagatcgggagagggaggagaggcagtctcttgacaaaataaagtatttttattcatttgtatttattaaatgaaaaaacaatcccatggtgtccctgttgtgtggtggaacctaatgactgttgaaataaagttctgtgttttccctgccctgca

SEQ ID NO: 302141 - DNA, 789 bp, Homo sapiens
agcggagcagtccccggtgtcggggcaggaggcacgcgcgcggctgaggcgaggtcgctcggcgcagctgttgcggggccatggcggggaccgcgctcaagaggctgatggccgagtacaaacaattaacactgaatcctccggaaggaattgtagcaggccccatgaatgaagagaacttttttgaatgggaggcattgatcatgggcccagaagacacctgctttgagtttggtgtttttcctgccatcctgagtttcccacttgattacccgttaagtcccccaaagatgagatttacctgtgagatgtttcatcccaacatctaccctgatgggagagtctgcatttccatcctccacgcgccaggcgatgaccccatgggctacgagagcagcgcggagcggtggagtcctgtgcagagtgtggagaagatcctgctgtcggtggtgagcatgctggcagagcccaatgacgaaagtggagctaacgtggatgcgtccaaaatgtggcgcgatgaccgggagcagttctataagattgccaagcagatcgtccagaagtctctgggactgtgagacctggcctcgcacaggcgcacacacaccgccaatcagctcagcattctcccccggcacacttagtgacagtgatgctctgtgctggtaccaaacaaggcagacaaatgtgtaggttctgtgggttttcattttcttgatggcatcctttgaagcacagaagtttaattttgatgaagttcaatttacccatttggctctgttttcattc

SEQ ID NO: 302142 - DNA, 822 bp, Homo sapiens
agcggagcagtccccggtgtcggggcaggaggcacgcgcgcggctgaggcgaggtcgctcggcgcagctgttgcggggccatggcggggaccgcgctcaagaggctgatggccgagtacaaacaattaacactgaatcctccggaaggaattgtagcaggccccatgaatgaagagaacttttttgaatgggaggcattgatcatgggcccagaagacacctgctttgagtttggtgtttttcctgccatcctgagtttcccacttgattacccgttaagtcccccaaagatgagatttacctgtgagatgtttcatcccaacatgtcaccctatgggaccaactcctggagaaggcaacacagaagtgggaaacttcctgattttgtggatgtggatcttaggtggacagcctgatgtccagggcaagtatgcatctagtttcttccactctccttgaatgagaagttgtggttcagttcctggatagtagagcgttcaccactgaacgttcaccactgaaacaatggatgagtggaaacacataggaccaggtatgaaagacaagactgtttgaaggtaagtgatcgccattcacatttgtgaattttcatgaaattcagagcttattaactcaggtgagttaaataaatgtattttaaaattgctatttctattattataactttaatggctttataattttacagttgagtctatctagatggattactgcatatctgagtatatatggagccatctgagaattcctcccaattttatgtaaaagaggactgattaaatgctgtgaattgaaaattta

SEQ ID NO: 302143 - DNA, 885 bp, Homo sapiens
gaggcacgcgcgcggctgaggcgaggtcgctcggcgcagctgttgcggggccatggcggggaccgcgctcaagaggctgatggccgagtacaaacgtgagtctggggacccgggccgtcagcagcgtcccgcgttcctgctcccgggcccgcgtcgtccggcggggctggggcagggagcctggcgggggagccgggcccggggcctccaccgtgagcccccctgtgggtcccgcggagtgccgcgccctgcgcccgctgcccactctcacgcgtgaagtcgtgaagagaagccttcccagcatcagtaaaggcagcgccggcgccgtgttagttgagagcacacacagttgagtctttgcgggcttgtttttttctcttctattttttcttttcttggcagccttgagaacgtgcagtgagagcttgaggaagaaggcctgacttgctgctgcggaattaggagggaaaagtgtatgcgttaaaaggggaaaggctcgttggtggagctttgaaaggtcagattttggctttccctctaatgaaggaaaagggtttttgaacagtgccacctgtcactcctcctaggtagtgttgaggaaacctcttgagtgctttcctacccggtaaattagatatttctaatgtctgaggagagcgaagggagaaatgagaacctaggaacactcggcattccatcgttttacaccgaatgcccgcttggaagaactgctgcgagaagtcttggaataccattgtgttgaaagcgccaggagcctgagtcgccgatggagacgagatagtagccggctaagagcagggcctgagttcagacccggcctctctgcttgttagctctttgaccttgttcctctctctgtctctg

SEQ ID NO: 302144 - DNA, 714 bp, Homo sapiens
  misc_feature (24)..(24): n is a, c, g, or t
  misc_feature (29)..(29): n is a, c, g, or t
  misc_feature (43)..(43): n is a, c, g, or t
  misc_feature (50)..(50): n is a, c, g, or t
  misc_feature (55)..(55): n is a, c, g, or t
gatacattcacccggaacagtttnccatnttccgattaatccncctcatntaggnaatttgccttcgagccaagattcggcacgaggactttctgtgtgcttaggtgcccgagctactgagggtctaagtccgggcagccgaagagtgtggtaggtaacggtcctcagcgcaagggtcatttcgtcgctgggaagggacggccctcgcccgcggtgatggtggttagcaagatgaacaaagatgcgcagatgagagcagcgattaaccaaaagttgatagaaactggagaaagagaacgcctcaaagagttgctgagagctaaattaattgaatgtggctggaaggatcagttgaaggcacactgtaaagaggtaattaaagaaaaaggactagaacacgttactgttgatgacttggtggctgaaatcactccaaaaggcagagccctggtacctgacagtgtaaagaaggagctcctacaaagaataagaacattccttgctcagcatgccagcctttaagattgaattagattgtgttgttgtggttttatttctgaaagtaaaacttgccataaattagaaaacaatttcccaaaataaaatccttttttgtatgatggtatacagttttcagtaatgatgtatacattgtattgatttttttccctaaatgtgttattttaataaatatctcatgaatgagtttgaagt

SEQ ID NO: 302145 - DNA, 834 bp, Homo sapiens
gtggcgagattccgcggcggaaatcgacgttctagctttctgtgtgcttaggtgcccgagctactgagggtctaagtccgggcagccgaagagtgtggtaggtaacggtcctcagcgcaagggtcatttcgtcgctgggaagggacggccctcgcccgcggtgatggtggtgagctatgcccgtggtcctcagggccgggacccgggcccagcccaggctcctttcgatgtactgtctttcgttagcgtccccgacccgcgctcgcgggcctgtagggctctccgacagggcgtgctaccggagttggcctgaaaccagtcctcgctttgttttctggctcctcctctcccgcctctcccgctgtctccgccctgttctattttccctaagaatgtctgaactgggagggataccctagcgcccttgttttaccagtgagaaaactgaggcctttaagaattaagtgacttgtccaaggtcactatccgtattttaggagccaagacgagatcaagttcaatattccaggagtggtactgactagaccttgtagttattttgaaaatgttagcctccaattacaaaagcaagcatttcctagttctcactcaacttctccttttccctgttcctctcaaaaaagaaaaaaaaaatcaactctggtaactcattgccagtctgaattttcaataggccagatggaagacaacaaaagtaatctcaagttagtgacagattaggtgggaaaacgttagtttacgccaagttttatttaatttaaacttttaagtggctttaacgctttcaaaacctaactttcctcttctttcaac

SEQ ID NO: 302146 - DNA, 386 bp, Homo sapiens
ccaaagtgctgggattacaggtgtgacccactgtgcccggcctggtaattttatttttttactaatagtatttaatctttttttgatgtttagtatgtatgacttctcccaatttttggatgcagtctctgcagaagtgatcggcagttatgttcagttttggagctcctagggtcaaagtacttgagttcaaattttgcctttccactttctatctctgtgcctcagtttcctcatcagtaaaatacagattattttattaatataaatatgtaacaatacgttctgggaattaaatgtgattgtttaataaagagtaatgatattattaacacacttgaaatgtatcaccccttcagttaatagaatggtaaacatgttaggat

SEQ ID NO: 302147 - DNA, 288 bp, Homo sapiens
ggttagcaagatgaacaaagatgcgcagatgagagcagcgattaaccaaaagttgatagaaactggagaaagagaacgcctcaaagagttgctgagagctaaattaattgaatgtggctggaaggatcagttgaaggcacactgtaaagaggtaattaaagaaaaaggactagaacacgtcactgtcaggtaccaggctctgccttttggagtgatttcagccaccaagtcatcaacagtaacggtcgagcggccgcgaatttagtagtagtagtcgtcggcggccgc

SEQ ID NO: 302148 - DNA, 2997 bp, Homo sapiens
  misc_feature (24)..(24): n is a, c, g, or t
  misc_feature (29)..(29): n is a, c, g, or t
  misc_feature (43)..(43): n is a, c, g, or t
  misc_feature (50)..(50): n is a, c, g, or t
  misc_feature (55)..(55): n is a, c, g, or t
gatacattcacccggaacagtttnccatnttccgattaatccncctcatntaggnaatttgccttcgagccaagattcggcacgaggactttctgtgtgcttaggtgcccgagctactgagggtctaagtccgggcagccgaagagtgtggtaggtaacggtcctcagcgcaagggtcatttcgtcgctgggaagggacggccctcgcccgcggtgatggtggttagcaagatgaacaaagatgcgcagatgagagcagcgattaaccaaaagttgatagaaactggagaaagagaacgcctcaaagagttgctgagagctaaattaattgaatgtggctggaaggatcagttgaaggcacactgtaaagaggtaattaaagaaaaaggactagaacacgttactgttgatgacttggtggctgaaatcactccaaaaggcagagccctggtacctgacagtgtaaagaaggagctcctacaaagaataagaacattccttgctcagcatgccagcctttaagattgaattagattgtgttgttgtggttttatttctgaaagtaaaacttgccataaattagaaaacaatttcccaaaataaaatccttttttgtatgatggtatacagttttcagtaatgatgtatacattgtattgatttttttccctaaatgtgttattttaataaatatctcatgaatgagtttgaagtttgcttggattttgaaatgaatgggactttgtctttattactaattcaccaaatttgttgagcgcaaaagcaattaatgtagtttaagtatttagtatgtacagttctctgtgttaacagctgagaagtaagcaaccttttctgactgcatatggtgtattcctcttttgagtccccataatattttataaattgtaatgccccatcttgtactacagttgtcttattcgtattgtttataaactttgagggttaggactgggtcttactcatctttatgtgccttccttatgcttcaaagaatttaccatctaatggaagagaacatttgcaagttggctccataccaagctccttccacatactctactcatctgaactttgaatgcagaatctttaaattgcaaccccacatactaaggtcaagaaagaacttaatgggaattaatctccacccattagctttaccctgacatcaggattgccaaatccaatggactcttgtctattcttacgtgacttctgctggaaaatgcgaatgttgaccatcctgccacttggaactctcttcccactcctcacattgcttttgctaccactggaagttccttctgtttcttgtggagtaccttttgctgtctgggacttgtagataatggtgtttcctagggctccctccagggccctctgcctcactaactggatatacttttcctgagcaaatcccaggaaacttgcgtcagaccgtgacttcaaatacaggttgataaatgctaaactgtctccaaaccagacttcatcctagcctccacacccagacacccaactgctatggatcaactttttagaatatcctcacttcaaactgaccttacctaaaataatgactttttcccccaataattgcccctgctatattccttatttctgaatggtacctcctagctatatagattatctgaggagcttactgaaatgctgattctgaagataaggggcatggctttaagattctgtatttctggcgagtacccaactggtgctcatgctgctgattgagaaccacttctgaatatagcaaggctgtaaattatccactacgtgccctcgtaattgtcttagttcaagcccagattattgtagtagacttagtatttctttgccttagttgatctgtgacccctccaatatctattccacactgttgcctaagtggccttagtaaaattcaagtctggttattttattcccctgcttggaatttctcaatgtagaatgaaactcattcagcattaacacataggcccttcttgatctgacatcgtgtttctctagttagactaaagaatccccactatgaagttgtttcatccgtaagtacctttgaacccagaagccccctttctcatatgtttctcattcctgtttgcccttcagagttcagctttagttgctaaaacattcagacatccctctgacttagatcccccactactgtttttctgtgagaagcagctatgcataattcctcttcaacacagtagttcttgaaattttgcaggcctctcctggaaaggaggaaatgacttctctgactttgtatgatgcttatttgtggatgaatgggcaagggaaaaaatgaaggaacaagtgaatgaacagtatgggagtatgagaaaaggtataaattgggtatagttgagaaaaggattcaaattgatctttggttcgagagacaatttcatctttctgatgaatttaaagtgtagtctttgaaccagctgggcttaattatgtaaagttttgagcctgagataagcacacaatcacaaaacctacccaaacaagttttttgtttcacttcatctcttataaaacaatgttctaaagtaagtgatagggatgctcatcattctgctacctattatcacaatgaaaacaatcataaatagtacacaggaaaggtgagaaatagcggatagttcttatttcatagtactgtatatggaaataaaccaaatttgctcatagagatactattttattacctcaaaaatatataaaaatgaaaacgttatgaaaatattttaaaatgggatttaaaaataattgagaacatcacagcaatttagaatactaaagagcatagctttaaaatgatagtgctgagaactccccacctctaccccaccacctgtaggcttctttgacaacttacaaatgttctctagtttgtatctagaatcacttatatctttcaaataaaccaactttgtgaacaaa

SEQ ID NO: 302149 - DNA, 589 bp, Homo sapiens
gtggcgagattccgcggcggaaatcgacgttctagctttctgtgtgcttaggtgcccgagctactgagggtctaagtccgggcagccgaagagtgtggttagcaagatgaacaaagatgcgcagatgagagcagcgattaaccaaaagttgatagaaactggagaaagagaacgcctcaaagagttgctgagagctaaattaattgaatgtggctggaaggatcagttgaaggcacactgtaaagaggtaattaaagaaaaaggactagaacacgttactgttgatgacttggtggctgaaatcactccaaaaggcagagccctggtacctgacagtgtaaagaaggagctcctacaaagaataagaacattccttgctcagcatgccagcctttaagattgaattagattgtgttgttgtggttttatttctgaaagtaaaacttgccataaattagaaaacaatttcccaaaataaaatccttttttgtatgatggtatacagttttcagtaatgatgtatacattgtattgatttttttccctaaatgtgttattttaataaatatctcatgaatgagtttgaagt

SEQ ID NO: 302150 - DNA, 2814 bp, Homo sapiens
cttttggggtctttgctttatactaaccaaattattattcaagtatgaaggtaaaagaaagatgaaatggatgtgcaatgactcaaaaagttgatagaaactggagaaagagaacgcctcaaagagttgctgagagctaaattaattgaatgtggctggaaggatcagttgaaggcacactgtaaagaggtaattaaagaaaaaggactagaacacgttactgttgatgacttggtggctgaaatcactccaaaaggcagagccctggtacctgacagtgtaaagaaggagctcctacaaagaataagaacattccttgctcagcatgccagcctttaagattgaattagattgtgttgttgtggttttatttctgaaagtaaaacttgccataaattagaaaacaatttcccaaaataaaatccttttttgtatgatggtatacagttttcagtaatgatgtatacattgtattgatttttttccctaaatgtgttattttaataaatatctcatgaatgagtttgaagtttgcttggattttgaaatgaatgggactttgtctttattactaattcaccaaatttgttgagcgcaaaagcaattaatgtagtttaagtatttagtatgtacagttctctgtgttaacagctgagaagtaagcaaccttttctgactgcatatggtgtattcctcttttgagtccccataatattttataaattgtaatgccccatcttgtactacagttgtcttattcgtattgtttataaactttgagggttaggactgggtcttactcatctttatgtgccttccttatgcttcaaagaatttaccatctaatggaagagaacatttgcaagttggctccataccaagctccttccacatactctactcatctgaactttgaatgcagaatctttaaattgcaaccccacatactaaggtcaagaaagaacttaatgggaattaatctccacccattagctttaccctgacatcaggattgccaaatccaatggactcttgtctattcttacgtgacttctgctggaaaatgcgaatgttgaccatcctgccacttggaactctcttcccactcctcacattgcttttgctaccactggaagttccttctgtttcttgtggagtaccttttgctgtctgggacttgtagataatggtgtttcctagggctccctccagggccctctgcctcactaactggatatacttttcctgagcaaatcccaggaaacttgcgtcagaccgtgacttcaaatacaggttgataaatgctaaactgtctccaaaccagacttcatcctagcctccacacccagacacccaactgctatggatcaactttttagaatatcctcacttcaaactgaccttacctaaaataatgactttttcccccaataattgcccctgctatattccttatttctgaatggtacctcctagctatatagattatctgaggagcttactgaaatgctgattctgaagataaggggcatggctttaagattctgtatttctggcgagtacccaactggtgctcatgctgctgattgagaaccacttctgaatatagcaaggctgtaaattatccactacgtgccctcgtaattgtcttagttcaagcccagattattgtagtagacttagtatttctttgccttagttgatctgtgacccctccaatatctattccacactgttgcctaagtggccttagtaaaattcaagtctggttattttattcccctgcttggaatttctcaatgtagaatgaaactcattcagcattaacacataggcccttcttgatctgacatcgtgtttctctagttagactaaagaatccccactatgaagttgtttcatccgtaagtacctttgaacccagaagccccctttctcatatgtttctcattcctgtttgcccttcagagttcagctttagttgctaaaacattcagacatccctctgacttagatcccccactactgtttttctgtgagaagcagctatgcataattcctcttcaacacagtagttcttgaaattttgcaggcctctcctggaaaggaggaaatgacttctctgactttgtatgatgcttatttgtggatgaatgggcaagggaaaaaatgaaggaacaagtgaatgaacagtatgggagtatgagaaaaggtataaattgggtatagttgagaaaaggattcaaattgatctttggttcgagagacaatttcatctttctgatgaatttaaagtgtagtctttgaaccagctgggcttaattatgtaaagttttgagcctgagataagcacacaatcacaaaacctacccaaacaagttttttgtttcacttcatctcttataaaacaatgttctaaagtaagtgatagggatgctcatcattctgctacctattatcacaatgaaaacaatcataaatagtacacaggaaaggtgagaaatagcggatagttcttatttcatagtactgtatatggaaataaaccaaatttgctcatagagatactattttattacctcaaaaatatataaaaatgaaaacgttatgaaaatattttaaaatgggatttaaaaataattgagaacatcacagcaatttagaatactaaagagcatagctttaaaatgatagtgctgagaactccccacctctaccccaccacctgtaggcttctttgacaacttacaaatgttctctagtttgtatctagaatcacttatatctttcaaataaaccaactttgtgaacaaa

SEQ ID NO: 302151 - DNA, 2951 bp, Homo sapiens
  misc_feature (24)..(24): n is a, c, g, or t
  misc_feature (29)..(29): n is a, c, g, or t
  misc_feature (43)..(43): n is a, c, g, or t
  misc_feature (50)..(50): n is a, c, g, or t
  misc_feature (55)..(55): n is a, c, g, or t
gatacattcacccggaacagtttnccatnttccgattaatccncctcatntaggnaatttgccttcgagccaagattcggcacgaggactttctgtgtgcttaggtgcccgagctactgagggtctaagtccgggcagccgaagagtgtggtaggtaacggtcctcagcgcaagggtcatttcgtcgctgggaagggacggccctcgcccgcggtgatggtggttagcaagatgaacaaagatgcgcagatgagagcagcgattaaccaaaagttgatagaaactggagaaagagaacgcctcaaagagttgctgagagctaaattaattgaatgtggctggaaggatcagttgaaggcacactgtaaagaggtaattaaagaaaaaggactagaacacgttactgttgatgacttggtggctgaaatcactccaaaaggcagagaacattccttgctcagcatgccagcctttaagattgaattagattgtgttgttgtggttttatttctgaaagtaaaacttgccataaattagaaaacaatttcccaaaataaaatccttttttgtatgatggtatacagttttcagtaatgatgtatacattgtattgatttttttccctaaatgtgttattttaataaatatctcatgaatgagtttgaagtttgcttggattttgaaatgaatgggactttgtctttattactaattcaccaaatttgttgagcgcaaaagcaattaatgtagtttaagtatttagtatgtacagttctctgtgttaacagctgagaagtaagcaaccttttctgactgcatatggtgtattcctcttttgagtccccataatattttataaattgtaatgccccatcttgtactacagttgtcttattcgtattgtttataaactttgagggttaggactgggtcttactcatctttatgtgccttccttatgcttcaaagaatttaccatctaatggaagagaacatttgcaagttggctccataccaagctccttccacatactctactcatctgaactttgaatgcagaatctttaaattgcaaccccacatactaaggtcaagaaagaacttaatgggaattaatctccacccattagctttaccctgacatcaggattgccaaatccaatggactcttgtctattcttacgtgacttctgctggaaaatgcgaatgttgaccatcctgccacttggaactctcttcccactcctcacattgcttttgctaccactggaagttccttctgtttcttgtggagtaccttttgctgtctgggacttgtagataatggtgtttcctagggctccctccagggccctctgcctcactaactggatatacttttcctgagcaaatcccaggaaacttgcgtcagaccgtgacttcaaatacaggttgataaatgctaaactgtctccaaaccagacttcatcctagcctccacacccagacacccaactgctatggatcaactttttagaatatcctcacttcaaactgaccttacctaaaataatgactttttcccccaataattgcccctgctatattccttatttctgaatggtacctcctagctatatagattatctgaggagcttactgaaatgctgattctgaagataaggggcatggctttaagattctgtatttctggcgagtacccaactggtgctcatgctgctgattgagaaccacttctgaatatagcaaggctgtaaattatccactacgtgccctcgtaattgtcttagttcaagcccagattattgtagtagacttagtatttctttgccttagttgatctgtgacccctccaatatctattccacactgttgcctaagtggccttagtaaaattcaagtctggttattttattcccctgcttggaatttctcaatgtagaatgaaactcattcagcattaacacataggcccttcttgatctgacatcgtgtttctctagttagactaaagaatccccactatgaagttgtttcatccgtaagtacctttgaacccagaagccccctttctcatatgtttctcattcctgtttgcccttcagagttcagctttagttgctaaaacattcagacatccctctgacttagatcccccactactgtttttctgtgagaagcagctatgcataattcctcttcaacacagtagttcttgaaattttgcaggcctctcctggaaaggaggaaatgacttctctgactttgtatgatgcttatttgtggatgaatgggcaagggaaaaaatgaaggaacaagtgaatgaacagtatgggagtatgagaaaaggtataaattgggtatagttgagaaaaggattcaaattgatctttggttcgagagacaatttcatctttctgatgaatttaaagtgtagtctttgaaccagctgggcttaattatgtaaagttttgagcctgagataagcacacaatcacaaaacctacccaaacaagttttttgtttcacttcatctcttataaaacaatgttctaaagtaagtgatagggatgctcatcattctgctacctattatcacaatgaaaacaatcataaatagtacacaggaaaggtgagaaatagcggatagttcttatttcatagtactgtatatggaaataaaccaaatttgctcatagagatactattttattacctcaaaaatatataaaaatgaaaacgttatgaaaatattttaaaatgggatttaaaaataattgagaacatcacagcaatttagaatactaaagagcatagctttaaaatgatagtgctgagaactccccacctctaccccaccacctgtaggcttctttgacaacttacaaatgttctctagtttgtatctagaatcacttatatctttcaaataaaccaactttgtgaacaaa

SEQ ID NO: 302152 - DNA, 3042 bp, Homo sapiens
  misc_feature (24)..(24): n is a, c, g, or t
  misc_feature (29)..(29): n is a, c, g, or t
  misc_feature (43)..(43): n is a, c, g, or t
  misc_feature (50)..(50): n is a, c, g, or t
  misc_feature (55)..(55): n is a, c, g, or t
gatacattcacccggaacagtttnccatnttccgattaatccncctcatntaggnaatttgccttcgagccaagattcggcacgaggactttctgtgtgcttaggtgcccgagctactgagggtctaagtccgggcagccgaagagtgtggtaggtaacggtcctcagcgcaagggtcatttcgtcgctgggaagggacggccctcgcccgcggtgatggtggttagcaagatgaacaaagatgcgcagatgagagcagcgattaaccaaaagttgatagaaactggagaaagagaacgcctcaaagagttgctgagagctaaattaattgaatgtggctggaaggatcagttgaaggcacactgtaaagataatgattttaaatgatatgatttgttttttgcttttgcataagaggtaattaaagaaaaaggactagaacacgttactgttgatgacttggtggctgaaatcactccaaaaggcagagccctggtacctgacagtgtaaagaaggagctcctacaaagaataagaacattccttgctcagcatgccagcctttaagattgaattagattgtgttgttgtggttttatttctgaaagtaaaacttgccataaattagaaaacaatttcccaaaataaaatccttttttgtatgatggtatacagttttcagtaatgatgtatacattgtattgatttttttccctaaatgtgttattttaataaatatctcatgaatgagtttgaagtttgcttggattttgaaatgaatgggactttgtctttattactaattcaccaaatttgttgagcgcaaaagcaattaatgtagtttaagtatttagtatgtacagttctctgtgttaacagctgagaagtaagcaaccttttctgactgcatatggtgtattcctcttttgagtccccataatattttataaattgtaatgccccatcttgtactacagttgtcttattcgtattgtttataaactttgagggttaggactgggtcttactcatctttatgtgccttccttatgcttcaaagaatttaccatctaatggaagagaacatttgcaagttggctccataccaagctccttccacatactctactcatctgaactttgaatgcagaatctttaaattgcaaccccacatactaaggtcaagaaagaacttaatgggaattaatctccacccattagctttaccctgacatcaggattgccaaatccaatggactcttgtctattcttacgtgacttctgctggaaaatgcgaatgttgaccatcctgccacttggaactctcttcccactcctcacattgcttttgctaccactggaagttccttctgtttcttgtggagtaccttttgctgtctgggacttgtagataatggtgtttcctagggctccctccagggccctctgcctcactaactggatatacttttcctgagcaaatcccaggaaacttgcgtcagaccgtgacttcaaatacaggttgataaatgctaaactgtctccaaaccagacttcatcctagcctccacacccagacacccaactgctatggatcaactttttagaatatcctcacttcaaactgaccttacctaaaataatgactttttcccccaataattgcccctgctatattccttatttctgaatggtacctcctagctatatagattatctgaggagcttactgaaatgctgattctgaagataaggggcatggctttaagattctgtatttctggcgagtacccaactggtgctcatgctgctgattgagaaccacttctgaatatagcaaggctgtaaattatccactacgtgccctcgtaattgtcttagttcaagcccagattattgtagtagacttagtatttctttgccttagttgatctgtgacccctccaatatctattccacactgttgcctaagtggccttagtaaaattcaagtctggttattttattcccctgcttggaatttctcaatgtagaatgaaactcattcagcattaacacataggcccttcttgatctgacatcgtgtttctctagttagactaaagaatccccactatgaagttgtttcatccgtaagtacctttgaacccagaagccccctttctcatatgtttctcattcctgtttgcccttcagagttcagctttagttgctaaaacattcagacatccctctgacttagatcccccactactgtttttctgtgagaagcagctatgcataattcctcttcaacacagtagttcttgaaattttgcaggcctctcctggaaaggaggaaatgacttctctgactttgtatgatgcttatttgtggatgaatgggcaagggaaaaaatgaaggaacaagtgaatgaacagtatgggagtatgagaaaaggtataaattgggtatagttgagaaaaggattcaaattgatctttggttcgagagacaatttcatctttctgatgaatttaaagtgtagtctttgaaccagctgggcttaattatgtaaagttttgagcctgagataagcacacaatcacaaaacctacccaaacaagttttttgtttcacttcatctcttataaaacaatgttctaaagtaagtgatagggatgctcatcattctgctacctattatcacaatgaaaacaatcataaatagtacacaggaaaggtgagaaatagcggatagttcttatttcatagtactgtatatggaaataaaccaaatttgctcatagagatactattttattacctcaaaaatatataaaaatgaaaacgttatgaaaatattttaaaatgggatttaaaaataattgagaacatcacagcaatttagaatactaaagagcatagctttaaaatgatagtgctgagaactccccacctctaccccaccacctgtaggcttctttgacaacttacaaatgttctctagtttgtatctagaatcacttatatctttcaaataaaccaactttgtgaacaaa

SEQ ID NO: 302153 - DNA, 743 bp, Homo sapiens
  misc_feature (24)..(24): n is a, c, g, or t
  misc_feature (29)..(29): n is a, c, g, or t
  misc_feature (43)..(43): n is a, c, g, or t
  misc_feature (50)..(50): n is a, c, g, or t
  misc_feature (55)..(55): n is a, c, g, or t
gatacattcacccggaacagtttnccatnttccgattaatccncctcatntaggnaatttgccttcgagccaagattcggcacgaggactttctgtgtgcttaggtgcccgagctactgagggtctaagtccgggcagccgaagagtgtggtaggtaacggtcctcagcgcaagggtcatttcgtcgctgggaagggacggccctcgcccgcggtgatggtggttagcaagatgaacaaagatgcgcagatgagagcagcgattaaccaaaagttgatagaaactggagaaagagaacgcctcaaagagttgctgagagctaaattaattgaatgtggctggaaggatcagttgaaggcacactgtaaagaggtaattaaagaaaaaggactagaacacgttactgttgatgacttggtggctgaaatcactccaaaaggcagagccctggtacctgacagtgtaaagaaggagctcctacaaagaataagaacattccttgctcagcatgccagcctttaagattgaattagattgtgttgttgtggttttatttctgaaagtaaaacttgccataaattagaaaacaatttcccaaaataaaatccttttttgtatgatggtatacagttttcagtaatgatgtatacattgtattgatttttttccctaaatgtgttattttaataaatatctcatgaatgagtttgaagtaaccaaaagaacgcgaccacacgcgcaac

SEQ ID NO: 302154 - DNA, 881 bp, Homo sapiens
  misc_feature (24)..(24): n is a, c, g, or t
  misc_feature (29)..(29): n is a, c, g, or t
  misc_feature (43)..(43): n is a, c, g, or t
  misc_feature (50)..(50): n is a, c, g, or t
  misc_feature (55)..(55): n is a, c, g, or t
gatacattcacccggaacagtttnccatnttccgattaatccncctcatntaggnaatttgccttcgagccaagattcggcacgaggactttctgtgtgcttaggtgcccgagctactgagggtctaagtccgggcagccgaagagtgtggtaggtaacggtcctcagcgcaagggtcatttcgtcgctgggaagggacggccctcgcccgcggtgatggtggttagcaagatgaacaaagatgcgcagatgagagcagcgattaaccaaaagttgatagaaactggagaaagagaacgcctcaaagagttgctgagagctaaattaattgaatgtggctggaaggatcagttgaaggcacactgtaaagaggtaattaaagaaaaaggactagaacacgttactgttgatgacttggtggctgaaatcactccaaaaggcagagccctggtacctgacagtgtaaagaaggagctcctacaaagaataagaacattccttgctcagcatgccagcctttaagattgaattagattgtgttgttgtggttttatttctgaaagtaaaacttgccataaattagaaaacaatttcccaaaataaaatccttttttgtatgatggtatacagttttcagtaatgatgtatacattgtattgatttttttccctaaatgtgttattttaataaatatctcatgaatgagtttgaagtgagaaaaaaaaaaaaaaaaaaaaaaaaatttccggggcttttttttccggggccgggaaaaaggggtttaaatggggcagtgggcttagcgttcctggcccgttttttgtcacgggggaaatccggggtcccaaaaggggcgataatcataagccgacgagttggag

SEQ ID NO: 302155 - DNA, 1151 bp, Homo sapiens
  misc_feature (24)..(24): n is a, c, g, or t
  misc_feature (29)..(29): n is a, c, g, or t
  misc_feature (43)..(43): n is a, c, g, or t
  misc_feature (50)..(50): n is a, c, g, or t
  misc_feature (55)..(55): n is a, c, g, or t
  misc_feature (720)..(720): n is a, c, g, or t
  misc_feature (921)..(921): n is a, c, g, or t
gatacattcacccggaacagtttnccatnttccgattaatccncctcatntaggnaatttgccttcgagccaagattcggcacgaggactttctgtgtgcttaggtgcccgagctactgagggtctaagtccgggcagccgaagagtgtggtaggtaacggtcctcagcgcaagggtcatttcgtcgctgggaagggacggccctcgcccgcggtgatggtggttagcaagatgaacaaagatgcgcagatgagagcagcgattaaccaaaagttgatagaaactggagaaagagaacgcctcaaagagttgctgagagctaaattaattgaatgtggctggaaggatcagttgaaggcacactgtaaagaggtaattaaagaaaaaggactagaacacgttactgttgatgacttggtggctgaaatcactccaaaaggcagagccctggtacctgacagtgtaaagaaggagctcctacaaagaataagaacattccttgctcagcatgccagcctttaagattgaattagattgtgttgttgtggttttatttctgaaagtaaaacttgccataaattagaaaacaatttcccaaaataaaatccttttttgtatgatggtatacagttttcagtaatgatgtatacattgtattgatttttttccctaaatgtgttattttaataaatatctcatgaatgagtttgaagtaaaaanaaacaacaaaaaactccggggcaccaatgtccgggggcggcgcaacgcagctcctgaacggccccatggccatagcggtcccagacccagctttctggtccacccgcggacatctgccggtccccccctataaggggagtccgcaatcacatccgaataaggcccaggtttaccctggccattaagaactctcgcgaaaancccgggaaaccaccaggccagcacgagcgccaagcggcacccaggcaccccccctgcaccaccacacgcaacgcacgcaccaacgactccgacatccacgaccccaaccacacccaccagcaccgcacgacgcacagcacaaccccccccaccaccacgccccagcacgcacagccgccccacgacgcagcacatcatccgccacacgcgcacctcaacacgatccgcgg

SEQ ID NO: 302156 - DNA, 531 bp, Homo sapiens
cttttggggtctttgctttatactaaccaaattattattcaagtatgaaggtaaaagaaagatgaaatggatgtgcaatgactcaaaaagttgatagaaactggagaaagagaacgcctcaaagagttgctgagagctaaattaattgaatgtggctggaaggatcagttgaaggcacactgtaaagaggtaattaaagaaaaaggactagaacacgttactgttgatgacttggtggctgaaatcactccaaaaggcagagccctggtacctgacagtgtaaagaaggagctcctacaaagaataagaacattccttgctcagcatgccagcctttaagattgaattagattgtgttgttgtggttttatttctgaaagtaaaacttgccataaattagaaaacaatttcccaaaataaaatccttttttgtatgatggtatacagttttcagtaatgatgtatacattgtattgatttttttccctaaatgtgttattttaataaatatctcatgaatgagtttgaagt

SEQ ID NO: 302157 - DNA, 1026 bp, Homo sapiens
  misc_feature (595)..(595): n is a, c, g, or t
  misc_feature (796)..(796): n is a, c, g, or t
gtggcgagattccgcggcggaaatcgacgttctagctttctgtgtgcttaggtgcccgagctactgagggtctaagtccgggcagccgaagagtgtggttagcaagatgaacaaagatgcgcagatgagagcagcgattaaccaaaagttgatagaaactggagaaagagaacgcctcaaagagttgctgagagctaaattaattgaatgtggctggaaggatcagttgaaggcacactgtaaagaggtaattaaagaaaaaggactagaacacgttactgttgatgacttggtggctgaaatcactccaaaaggcagagccctggtacctgacagtgtaaagaaggagctcctacaaagaataagaacattccttgctcagcatgccagcctttaagattgaattagattgtgttgttgtggttttatttctgaaagtaaaacttgccataaattagaaaacaatttcccaaaataaaatccttttttgtatgatggtatacagttttcagtaatgatgtatacattgtattgatttttttccctaaatgtgttattttaataaatatctcatgaatgagtttgaagtaaaaanaaacaacaaaaaactccggggcaccaatgtccgggggcggcgcaacgcagctcctgaacggccccatggccatagcggtcccagacccagctttctggtccacccgcggacatctgccggtccccccctataaggggagtccgcaatcacatccgaataaggcccaggtttaccctggccattaagaactctcgcgaaaancccgggaaaccaccaggccagcacgagcgccaagcggcacccaggcaccccccctgcaccaccacacgcaacgcacgcaccaacgactccgacatccacgaccccaaccacacccaccagcaccgcacgacgcacagcacaaccccccccaccaccacgccccagcacgcacagccgccccacgacgcagcacatcatccgccacacgcgcacctcaacacgatccgcgg

SEQ ID NO: 302158 - DNA, 664 bp, Homo sapiens
  misc_feature (24)..(24): n is a, c, g, or t
  misc_feature (29)..(29): n is a, c, g, or t
  misc_feature (43)..(43): n is a, c, g, or t
  misc_feature (50)..(50): n is a, c, g, or t
  misc_feature (55)..(55): n is a, c, g, or t
gatacattcacccggaacagtttnccatnttccgattaatccncctcatntaggnaatttgccttcgagccaagattcggcacgaggactttctgtgtgcttaggtgcccgagctactgagggtctaagtccgggcagccgaagagtgtggtaggtaacggtcctcagcgcaagggtcatttcgtcgctgggaagggacggccctcgcccgcggtgatggtggttagcaagatgaacaaagatgcgcagatgagagcagcgattaaccaaaagttgatagaaactggagaaagagaacgcctcaaagagttgctgagagctaaattaattgaatgtggctggaaggatcagttgaaggcacactgtaaagaggtaattaaagaaaaaggactagaacacgttactgttgatgacttggtggctgaaatcactccaaaaggcagagccctggtacctgacagtgtaaagaaggagctcctacaaagaataagaacattccttgctcagcatgccagcctttaagattgaattagattgtgttgttgtggttttatttctgaaagtaaaacttgccataaattagaaaataatgatgtatacattgtattgatttttttccctaaatgtgttattttaataaatatctcatgaatgagtttgaagt

SEQ ID NO: 302159 - DNA, 539 bp, Homo sapiens
gtggcgagattccgcggcggaaatcgacgttctagctttctgtgtgcttaggtgcccgagctactgagggtctaagtccgggcagccgaagagtgtggttagcaagatgaacaaagatgcgcagatgagagcagcgattaaccaaaagttgatagaaactggagaaagagaacgcctcaaagagttgctgagagctaaattaattgaatgtggctggaaggatcagttgaaggcacactgtaaagaggtaattaaagaaaaaggactagaacacgttactgttgatgacttggtggctgaaatcactccaaaaggcagagccctggtacctgacagtgtaaagaaggagctcctacaaagaataagaacattccttgctcagcatgccagcctttaagattgaattagattgtgttgttgtggttttatttctgaaagtaaaacttgccataaattagaaaataatgatgtatacattgtattgatttttttccctaaatgtgttattttaataaatatctcatgaatgagtttgaagt

SEQ ID NO: 302160 - DNA, 490 bp, Homo sapiens
tagtatttaatctttttttgatgtttagtatgtatgacttctcccaatttttggatgcagtctctgcagaagtgatcggcagttatgttcagttttggagctcctagggtcaaagtacttgagttcaaattttgcctttccactttctatctctgtgcctcagtttcctcatcagtaaaatacagattattttattaatataaatatgtaacaatacgttctgggaattaaatgtgatgtttaaaaaaaagcaaacccacactgcattagcccagtgccaagcacataagtgtttaataaagagtaatgatattattaacacacttgaaatgtatcaccccttcagttaatagaatggtaaacatgttaggatgcctgcctagaggatttagcagaaaatgctttgtaaatgttctatatctgaaagtacatgttgatgtccaggttagcaagatgaacaaagatgcgcagatgagagcagcgattaacc

SEQ ID NO: 302161 - DNA, 507 bp, Homo sapiens
aagaattttctcacgttttcttctcatcaacatgcagtgcatttaggcattggatagttcatttaaaatgatgaattgcaagaagacacttttctttgtcagataactttaccttttttttaattgaacatgagggttatttatgaaattcttatgttgtttaccctgagcaaaatgtcagatcttaaattctcatgtattaattggtaccttcttactcttatttttttatttttgtttttcagccctggtacctgacagtgtaaagaaggagctcctacaaagaataagaacattccttgctcagcatgccagcctttaagattgaattagattgtgttgttgtggttttatttctgaaagtaaaacttgccataaattagaaaacaatttcccaaaataaaatccttttttgtatgatggtatacagttttcagtaatgatgtatacattgtattgatttttttccctaaatgtgttattttaataaatatctcatgaatgagt

SEQ ID NO: 302162 - DNA, 952 bp, Homo sapiens
cggccgctccttggtcgcggtcactccaggctgcctcgctgcgccgctggcggtgggcgtggcgctgccggcggctaggcgcggacgccggaggaggtgtccccgggtttaggggtgttcggccaggggcggggctgccgggcccgggcgactgccggagctgcggaagtcgtggaagcgtcggcgacgcatcgcgcgatggcgcgggcgggacaggtgagcgaagcgcggcttgtagccttttccctctctcggggggacgagtggggcaccacctccgcgcggggctccccgctgggccaccccttcgccagcgcccagccccgtgcggcctgtcggatcaggcagggcagagtcggtctcggcgctgtccccgcccctggggtcggaagcgaccggggctggccgggcctggtctctggtgtctccggccgggcctcggttcccctcctcccccggcttcccccggccgggccgagctcccctcgcgcgcccattgtgaggtcacgtcctgcaggcgcgccctggcacccgggccaagacgcccggagcggctgctgcagccagtagcggccccttcaccggctgccccgctcagacctagtcgggaggggtgcgaggcatgcagctgggggcccagctccggtgccgcaccccgtaaagggctgatcttccacctcgccacctcagccacgggacgccaagaccgcatccaattcagacttcttttgggtaaagggccaagagggaagggcgaggcggggaggaagcagctcgggccgccttccctccgtggcctccaggacatccgccggggatagattatgcgtttccattggttacccaccttgagcgagccgtttgatagaaaccaagagcttgaaacgtgcattaggccattgtggactcccagtgggaggcgagtgaatgaattattcatagttaaaaaaat

SEQ ID NO: 302163 - DNA, 4307 bp, Homo sapiens
cggccgctccttggtcgcggtcactccaggctgcctcgctgcgccgctggcggtgggcgtggcgctgccggcggctaggcgcggacgccggaggaggtgtccccgggtttaggggtgttcggccaggggcggggctgccgggcccgggcgactgccggagctgcggaagtcgtggaagcgtcggcgacgcatcgcgcgatggcgcgggcgggacagtgcttgtgaaactgaacacaacaaaagtatggatatgggaaaccaacatccttctattagtaggcttcaggaaatccaaaaggaagtaaaaagtgtagaacagcaagttatcggcttcagtggtctgtcagatgacaagaattacaagaaactggagaggattctaacaaaacagctttttgaaatagactctgtagatactgaaggaaaaggagatattcagcaagctaggaagcgggcagcacaggagacagaacgtcttctcaaagagttggagcagaatgcaaaccacccacaccggattgaaatacagaacatttttgaggaagcccagtccctcgtgagagagaaaattgtgccattttataatggaggcaactgcgtaactgatgagtttgaagaaggcatccaagatatcattctgaggctgacacatgttaaaactggaggaaaaatctccttgcggaaagcaaggtatcacactttaaccaaaatctgtgcggtgcaagagataatcgaagactgcatgaaaaagcagccttccctgccgctttccgaggatgcacatccttccgttgccaaaatcaacttcgtgatgtgtgaggtgaacaaggcccgaggggtcctgattgcacttctgatgggtgtgaacaacaatgagacctgcaggcacttatcctgtgtgctctcggggctgatcgctgacctggatgctctagatgtgtgcggccggacagaaatcagaaattatcggagggaggtagtagaagatatcaacaaattattgaaatatctggatttggaagaggaagcagacacaactaaagcatttgacctgagacagaatcattccattttaaaaatagaaaaggtcctcaagagaatgagagaaataaaaaatgaacttctccaagcacaaaacccttctgaattgtacctgagctccaaaacagaattgcagggtttaattggacagttggatgaggtaagtcttgaaaaaaacccctgcatccgggaagccaggagaagagcagtgatcgaggtgcaaactctgatcacatatattgacttgaaggaggcccttgagaaaagaaagctgtttgcttgtgaggagcacccatcccataaagccgtctggaacgtccttggaaacttgtctgagatccagggagaagttctttcatttgatggaaatcgaaccgataagaactacatccggctggaagagctgctcaccaagcagctgctagccctggatgctgttgatccgcagggagaagagaagtgtaaggctgccaggaaacaagctgtgaggcttgcgcagaatattctcagctatctcgacctgaaatctgatgaatgggagtactgaaataccagagatctcacttttgatactgttttgcacttcatatgtgcttctatgtatagagagctttcagttcattgatttatacgtgcatatttcagtctcagtatttatgattgaagcaaattctattcagtatctgctgcttttgatgttgcaagacaaatatcattacagcacgttaacttttccattcggatcattatctgtatgatgtggtgtggtttgtttggtttgtccttttttttgcgtttttaatcagaaaacaaaatagaggcagcttttgtagattttaaatgggttgtgcaagcattaaaatgcaggtctttcagaatctagaactaggcataaccttacataatactaggaaaattatgagaaaggggaaatttttggttaaataagagtaaggttcaaacacaagcagtacatgttctgtttcattatgctcgatagaaggcttttttttcacttataaggcctgattggtcctacccagcttaacggggtggggtttttttgtttgttcagacagtctgttcttttgtaaacatttttagttggaaaaacagcatctgcattttccccatcctctacgttttagagaggaatcttgtttttgtgtgcaacataagaaaattatgaaaactaatagccaaaaaacctttgagattgcattaaagagaagggataaaggaccagcaataataccttgtaagttgcttttgtttgtaaaatctgagcttatagttttccttagtgagtaaattcataaggatgggaacatttaaattaagttaatgggcctttaaaaaaaaaaaaggaaacactcatacctgtagttggaggatgaatactggagacgggttaccaatgtcaggttatactaaaactaaatcagaaagtctgaatgtagcacataatggttctcttctgttgtccaaggctgtaaaatggacagccttgtcacacctccccggtgctgttttacaacgtgagggtagacgctgtcagtaacccagagggaccaggccttcctaggttttctaggcagtcagctgttaaccactcacttagtaaatgtcataactacacctgctccaggaccaatcagtgaaacctgctcggaattaaaggcttcctctgggtgcctgctgaacaactgagctcatgtcatgggcatgtggtggtttctctgttgcctgaaagagccattaaagtcagtcgtgcgtgaagcatctctcttctaaaggatgtgtatttccataaatgctttctgaggatccggtacaaaatgatttcccaaagttctgaagtgccttgagaacatgtgggtccgagtgttataacagactcctcccccgggtcaccttttgcctggtcatcctgttagagtacatctttggaaatccagggtaatattctctttcagagatgctcattgtgtaactctgtgtagggagatagtcactttaaacagctcaaagtagctagctaaaggagtagccttaaatacctaaaagatgacagaagcatagcccttaacaaatcttcagcttgtctctcagtatttcccaatcatgaaaatcccttgctatgtctttcctactagaaatgttctagaatcgctggacggtggggtcagagggcagtcggtatttaggccgtgagcttcccatactactgcaggtccaactcctggcaaccgcgggctcaaggcaggtcattggaatccacgttttggccacagtagttgtaggattgcttttctgtatcataattttagaatgctcttaaaatcttgaggaagagtttttattttttatttatttttgagatggagtctctgttgcccaggctgcagtgcagtggtgccatctcagctcactgcaacctccacctcccaggttcaagcgattctcctgcctcagccacctgagtagctgggagtacaggcatgtggcaccatgcctggctaatttttgtatttttaatagagttgagatttcaccatgatggtcaggctggtctcgaactcctgacctcgtgatccgcccgcctcggccccccaaagtgctgggattaacgggtgtgagccacggcgcccagcccaggaagagtttttaaattagagctctgtttaattataccactgggaaatcatggttacgcttcaggcatattcttccccagagtactacttacattttaaatttcattttgtaaagttaaatgtcagcattccctttaaaagtgtccattgttctttgaaagtagacgtttcagtcattcttttcaaacaagtgtttgtgtaccttttgccaagctgtgggcatcgtgtgtgagtacagggtgctcagctcttccaccgtcattttgaattgttcacatgggtaattggtcatggaaatgatcagattgaccttgattgactgtcaggcatggctttgtttctggtttcaatctgttctcgttccttgtaccggattattctactcctgcaatgaaccctgttgacaccggatttagctcttgtcggccttcgtggggagctgtttgtgttaatatgagctactgcatgtaattcttaaactgggcttgtcacattgtattgtatttttgtgatctgtaatgaaaagaatctgtactgcaagtaaaacctactccccaaaaatgtgtggctttgggtctgcattaaacgctgtagtccatgttcatgcca

SEQ ID NO: 302164 - DNA, 4823 bp, Homo sapiens
cggccgctccttggtcgcggtcactccaggctgcctcgctgcgccgctggcggtgggcgtggcgctgccggcggctaggcgcggacgccggaggaggtgtccccgggtttaggggtgttcggccaggggcggggctgccgggcccgggcgactgccggagctgcggaagtcgtggaagcgtcggcgacgcatcgcgcgatggcgcgggcgggacaggtgagcgaagcgcggcttgtagccttttccctctctcggggggacgagtggggcaccacctccgcgcggggctccccgctgggccaccccttcgccagcgcccagccccgtgcggcctgtcggatcaggcagggcagagtcggtctcggcgctgtccccgcccctggggtcggaagcgaccggggctggccgggcctggtctctggtgtctccggccgggcctcggttcccctcctcccccggcttcccccggccgggccgagctcccctcgcgcgcccattgtgaggtcacgtcctgcaggcgcgccctggcacccgggccaagacgcccggagcggctgctgcagccagtagcggccccttcaccggctgccccgctcagacctagtcgggaggggtgcgaggcatgcagctgggggcccagctccggtgccgcaccccgtaaagggctgatcttccacctcgccacctcagccacgggacgccaagaccgcatccaattcagacttcttttggtgcttgtgaaactgaacacaacaaaagtatggatatgggaaaccaacatccttctattagtaggcttcaggaaatccaaaaggaagtaaaaagtgtagaacagcaagttatcggcttcagtggtctgtcagatgacaagaattacaagaaactggagaggattctaacaaaacagctttttgaaatagactctgtagatactgaaggaaaaggagatattcagcaagctaggaagcgggcagcacaggagacagaacgtcttctcaaagagttggagcagaatgcaaaccacccacaccggattgaaatacagaacatttttgaggaagcccagtccctcgtgagagagaaaattgtgccattttataatggaggcaactgcgtaactgatgagtttgaagaaggcatccaagatatcattctgaggctgacacatgttaaaactggaggaaaaatctccttgcggaaagcaaggtatcacactttaaccaaaatctgtgcggtgcaagagataatcgaagactgcatgaaaaagcagccttccctgccgctttccgaggatgcacatccttccgttgccaaaatcaacttcgtgatgtgtgaggtgaacaaggcccgaggggtcctgattgcacttctgatgggtgtgaacaacaatgagacctgcaggcacttatcctgtgtgctctcggggctgatcgctgacctggatgctctagatgtgtgcggccggacagaaatcagaaattatcggagggaggtagtagaagatatcaacaaattattgaaatatctggatttggaagaggaagcagacacaactaaagcatttgacctgagacagaatcattccattttaaaaatagaaaaggtcctcaagagaatgagagaaataaaaaatgaacttctccaagcacaaaacccttctgaattgtacctgagctccaaaacagaattgcagggtttaattggacagttggatgaggtaagtcttgaaaaaaacccctgcatccgggaagccaggagaagagcagtgatcgaggtgcaaactctgatcacatatattgacttgaaggaggcccttgagaaaagaaagctgtttgcttgtgaggagcacccatcccataaagccgtctggaacgtccttggaaacttgtctgagatccagggagaagttctttcatttgatggaaatcgaaccgataagaactacatccggctggaagagctgctcaccaagcagctgctagccctggatgctgttgatccgcagggagaagagaagtgtaaggctgccaggaaacaagctgtgaggcttgcgcagaatattctcagctatctcgacctgaaatctgatgaatgggagtactgaaataccagagatctcacttttgatactgttttgcacttcatatgtgcttctatgtatagagagctttcagttcattgatttatacgtgcatatttcagtctcagtatttatgattgaagcaaattctattcagtatctgctgcttttgatgttgcaagacaaatatcattacagcacgttaacttttccattcggatcattatctgtatgatgtggtgtggtttgtttggtttgtccttttttttgcgtttttaatcagaaaacaaaatagaggcagcttttgtagattttaaatgggttgtgcaagcattaaaatgcaggtctttcagaatctagaactaggcataaccttacataatactaggaaaattatgagaaaggggaaatttttggttaaataagagtaaggttcaaacacaagcagtacatgttctgtttcattatgctcgatagaaggcttttttttcacttataaggcctgattggtcctacccagcttaacggggtggggtttttttgtttgttcagacagtctgttcttttgtaaacatttttagttggaaaaacagcatctgcattttccccatcctctacgttttagagaggaatcttgtttttgtgtgcaacataagaaaattatgaaaactaatagccaaaaaacctttgagattgcattaaagagaagggataaaggaccagcaataataccttgtaagttgcttttgtttgtaaaatctgagcttatagttttccttagtgagtaaattcataaggatgggaacatttaaattaagttaatgggcctttaaaaaaaaaaaaggaaacactcatacctgtagttggaggatgaatactggagacgggttaccaatgtcaggttatactaaaactaaatcagaaagtctgaatgtagcacataatggttctcttctgttgtccaaggctgtaaaatggacagccttgtcacacctccccggtgctgttttacaacgtgagggtagacgctgtcagtaacccagagggaccaggccttcctaggttttctaggcagtcagctgttaaccactcacttagtaaatgtcataactacacctgctccaggaccaatcagtgaaacctgctcggaattaaaggcttcctctgggtgcctgctgaacaactgagctcatgtcatgggcatgtggtggtttctctgttgcctgaaagagccattaaagtcagtcgtgcgtgaagcatctctcttctaaaggatgtgtatttccataaatgctttctgaggatccggtacaaaatgatttcccaaagttctgaagtgccttgagaacatgtgggtccgagtgttataacagactcctcccccgggtcaccttttgcctggtcatcctgttagagtacatctttggaaatccagggtaatattctctttcagagatgctcattgtgtaactctgtgtagggagatagtcactttaaacagctcaaagtagctagctaaaggagtagccttaaatacctaaaagatgacagaagcatagcccttaacaaatcttcagcttgtctctcagtatttcccaatcatgaaaatcccttgctatgtctttcctactagaaatgttctagaatcgctggacggtggggtcagagggcagtcggtatttaggccgtgagcttcccatactactgcaggtccaactcctggcaaccgcgggctcaaggcaggtcattggaatccacgttttggccacagtagttgtaggattgcttttctgtatcataattttagaatgctcttaaaatcttgaggaagagtttttattttttatttatttttgagatggagtctctgttgcccaggctgcagtgcagtggtgccatctcagctcactgcaacctccacctcccaggttcaagcgattctcctgcctcagccacctgagtagctgggagtacaggcatgtggcaccatgcctggctaatttttgtatttttaatagagttgagatttcaccatgatggtcaggctggtctcgaactcctgacctcgtgatccgcccgcctcggccccccaaagtgctgggattaacgggtgtgagccacggcgcccagcccaggaagagtttttaaattagagctctgtttaattataccactgggaaatcatggttacgcttcaggcatattcttccccagagtactacttacattttaaatttcattttgtaaagttaaatgtcagcattccctttaaaagtgtccattgttctttgaaagtagacgtttcagtcattcttttcaaacaagtgtttgtgtaccttttgccaagctgtgggcatcgtgtgtgagtacagggtgctcagctcttccaccgtcattttgaattgttcacatgggtaattggtcatggaaatgatcagattgaccttgattgactgtcaggcatggctttgtttctggtttcaatctgttctcgttccttgtaccggattattctactcctgcaatgaaccctgttgacaccggatttagctcttgtcggccttcgtggggagctgtttgtgttaatatgagctactgcatgtaattcttaaactgggcttgtcacattgtattgtatttttgtgatctgtaatgaaaagaatctgtactgcaagtaaaacctactccccaaaaatgtgtggctttgggtctgcattaaacgctgtagtccatgttcatgcca

SEQ ID NO: 302165 - DNA, 5010 bp, Homo sapiens
cggccgctccttggtcgcggtcactccaggctgcctcgctgcgccgctggcggtgggcgtggcgctgccggcggctaggcgcggacgccggaggaggtgtccccgggtttaggggtgttcggccaggggcggggctgccgggcccgggcgactgccggagctgcggaagtcgtggaagcgtcggcgacgcatcgcgcgatggcgcgggcgggacaggtgagcgaagcgcggcttgtagccttttccctctctcggggggacgagtggggcaccacctccgcgcggggctccccgctgggccaccccttcgccagcgcccagccccgtgcggcctgtcggatcaggcagggcagagtcggtctcggcgctgtccccgcccctggggtcggaagcgaccggggctggccgggcctggtctctggtgtctccggccgggcctcggttcccctcctcccccggcttcccccggccgggccgagctcccctcgcgcgcccattgtgaggtcacgtcctgcaggcgcgccctggcacccgggccaagacgcccggagcggctgctgcagccagtagcggccccttcaccggctgccccgctcagacctagtcgggaggggtgcgaggcatgcagctgggggcccagctccggtgccgcaccccgtaaagggctgatcttccacctcgccacctcagccacgggacgccaagaccgcatccaattcagacttcttttgggtaaagggccaagagggaagggcgaggcggggaggaagcagctcgggccgccttccctccgtggcctccaggacatccgccggggatagattatgcgtttccattggttacccaccttgagcgagccgtttgatagaaaccaagagcttgaaacgtgcattaggccattgtggactcccagtgggagtgcttgtgaaactgaacacaacaaaagtatggatatgggaaaccaacatccttctattagtaggcttcaggaaatccaaaaggaagtaaaaagtgtagaacagcaagttatcggcttcagtggtctgtcagatgacaagaattacaagaaactggagaggattctaacaaaacagctttttgaaatagactctgtagatactgaaggaaaaggagatattcagcaagctaggaagcgggcagcacaggagacagaacgtcttctcaaagagttggagcagaatgcaaaccacccacaccggattgaaatacagaacatttttgaggaagcccagtccctcgtgagagagaaaattgtgccattttataatggaggcaactgcgtaactgatgagtttgaagaaggcatccaagatatcattctgaggctgacacatgttaaaactggaggaaaaatctccttgcggaaagcaaggtatcacactttaaccaaaatctgtgcggtgcaagagataatcgaagactgcatgaaaaagcagccttccctgccgctttccgaggatgcacatccttccgttgccaaaatcaacttcgtgatgtgtgaggtgaacaaggcccgaggggtcctgattgcacttctgatgggtgtgaacaacaatgagacctgcaggcacttatcctgtgtgctctcggggctgatcgctgacctggatgctctagatgtgtgcggccggacagaaatcagaaattatcggagggaggtagtagaagatatcaacaaattattgaaatatctggatttggaagaggaagcagacacaactaaagcatttgacctgagacagaatcattccattttaaaaatagaaaaggtcctcaagagaatgagagaaataaaaaatgaacttctccaagcacaaaacccttctgaattgtacctgagctccaaaacagaattgcagggtttaattggacagttggatgaggtaagtcttgaaaaaaacccctgcatccgggaagccaggagaagagcagtgatcgaggtgcaaactctgatcacatatattgacttgaaggaggcccttgagaaaagaaagctgtttgcttgtgaggagcacccatcccataaagccgtctggaacgtccttggaaacttgtctgagatccagggagaagttctttcatttgatggaaatcgaaccgataagaactacatccggctggaagagctgctcaccaagcagctgctagccctggatgctgttgatccgcagggagaagagaagtgtaaggctgccaggaaacaagctgtgaggcttgcgcagaatattctcagctatctcgacctgaaatctgatgaatgggagtactgaaataccagagatctcacttttgatactgttttgcacttcatatgtgcttctatgtatagagagctttcagttcattgatttatacgtgcatatttcagtctcagtatttatgattgaagcaaattctattcagtatctgctgcttttgatgttgcaagacaaatatcattacagcacgttaacttttccattcggatcattatctgtatgatgtggtgtggtttgtttggtttgtccttttttttgcgtttttaatcagaaaacaaaatagaggcagcttttgtagattttaaatgggttgtgcaagcattaaaatgcaggtctttcagaatctagaactaggcataaccttacataatactaggaaaattatgagaaaggggaaatttttggttaaataagagtaaggttcaaacacaagcagtacatgttctgtttcattatgctcgatagaaggcttttttttcacttataaggcctgattggtcctacccagcttaacggggtggggtttttttgtttgttcagacagtctgttcttttgtaaacatttttagttggaaaaacagcatctgcattttccccatcctctacgttttagagaggaatcttgtttttgtgtgcaacataagaaaattatgaaaactaatagccaaaaaacctttgagattgcattaaagagaagggataaaggaccagcaataataccttgtaagttgcttttgtttgtaaaatctgagcttatagttttccttagtgagtaaattcataaggatgggaacatttaaattaagttaatgggcctttaaaaaaaaaaaaggaaacactcatacctgtagttggaggatgaatactggagacgggttaccaatgtcaggttatactaaaactaaatcagaaagtctgaatgtagcacataatggttctcttctgttgtccaaggctgtaaaatggacagccttgtcacacctccccggtgctgttttacaacgtgagggtagacgctgtcagtaacccagagggaccaggccttcctaggttttctaggcagtcagctgttaaccactcacttagtaaatgtcataactacacctgctccaggaccaatcagtgaaacctgctcggaattaaaggcttcctctgggtgcctgctgaacaactgagctcatgtcatgggcatgtggtggtttctctgttgcctgaaagagccattaaagtcagtcgtgcgtgaagcatctctcttctaaaggatgtgtatttccataaatgctttctgaggatccggtacaaaatgatttcccaaagttctgaagtgccttgagaacatgtgggtccgagtgttataacagactcctcccccgggtcaccttttgcctggtcatcctgttagagtacatctttggaaatccagggtaatattctctttcagagatgctcattgtgtaactctgtgtagggagatagtcactttaaacagctcaaagtagctagctaaaggagtagccttaaatacctaaaagatgacagaagcatagcccttaacaaatcttcagcttgtctctcagtatttcccaatcatgaaaatcccttgctatgtctttcctactagaaatgttctagaatcgctggacggtggggtcagagggcagtcggtatttaggccgtgagcttcccatactactgcaggtccaactcctggcaaccgcgggctcaaggcaggtcattggaatccacgttttggccacagtagttgtaggattgcttttctgtatcataattttagaatgctcttaaaatcttgaggaagagtttttattttttatttatttttgagatggagtctctgttgcccaggctgcagtgcagtggtgccatctcagctcactgcaacctccacctcccaggttcaagcgattctcctgcctcagccacctgagtagctgggagtacaggcatgtggcaccatgcctggctaatttttgtatttttaatagagttgagatttcaccatgatggtcaggctggtctcgaactcctgacctcgtgatccgcccgcctcggccccccaaagtgctgggattaacgggtgtgagccacggcgcccagcccaggaagagtttttaaattagagctctgtttaattataccactgggaaatcatggttacgcttcaggcatattcttccccagagtactacttacattttaaatttcattttgtaaagttaaatgtcagcattccctttaaaagtgtccattgttctttgaaagtagacgtttcagtcattcttttcaaacaagtgtttgtgtaccttttgccaagctgtgggcatcgtgtgtgagtacagggtgctcagctcttccaccgtcattttgaattgttcacatgggtaattggtcatggaaatgatcagattgaccttgattgactgtcaggcatggctttgtttctggtttcaatctgttctcgttccttgtaccggattattctactcctgcaatgaaccctgttgacaccggatttagctcttgtcggccttcgtggggagctgtttgtgttaatatgagctactgcatgtaattcttaaactgggcttgtcacattgtattgtatttttgtgatctgtaatgaaaagaatctgtactgcaagtaaaacctactccccaaaaatgtgtggctttgggtctgcattaaacgctgtagtccatgttcatgcca

SEQ ID NO: 302166 - DNA, 4170 bp, Homo sapiens
  misc_feature (65)..(65): n is a, c, g, or t
  misc_feature (67)..(67): n is a, c, g, or t
  misc_feature (74)..(75): n is a, c, g, or t
tcatagccgactccagaggatacaccctggtcccgcctaacaatcgtcgtcgcatctggcgatgncncgggcgnnacagtgcttgtgaaactgaacacaacaaaagtatggatatgggaaaccaacatccttctattagtaggcttcaggaaatccaaaaggaagtaaaaagtgtagaacagcaagttatcggcttcagtggtctgtcagatgacaagaattacaagaaactggagaggattctaacaaaacagctttttgaaatagactctgtagatactgaaggaaaaggagatattcagcaagctaggaagcgggcagcacaggagacagaacgtcttctcaaagagttggagcagaatgcaaaccacccacaccggattgaaatacagaacatttttgaggaagcccagtccctcgtgagagagaaaattgtgccattttataatggaggcaactgcgtaactgatgagtttgaagaaggcatccaagatatcattctgaggctgacacatgttaaaactggaggaaaaatctccttgcggaaagcaaggtatcacactttaaccaaaatctgtgcggtgcaagagataatcgaagactgcatgaaaaagcagccttccctgccgctttccgaggatgcacatccttccgttgccaaaatcaacttcgtgatgtgtgaggtgaacaaggcccgaggggtcctgattgcacttctgatgggtgtgaacaacaatgagacctgcaggcacttatcctgtgtgctctcggggctgatcgctgacctggatgctctagatgtgtgcggccggacagaaatcagaaattatcggagggaggtagtagaagatatcaacaaattattgaaatatctggatttggaagaggaagcagacacaactaaagcatttgacctgagacagaatcattccattttaaaaatagaaaaggtcctcaagagaatgagagaaataaaaaatgaacttctccaagcacaaaacccttctgaattgtacctgagctccaaaacagaattgcagggtttaattggacagttggatgaggtaagtcttgaaaaaaacccctgcatccgggaagccaggagaagagcagtgatcgaggtgcaaactctgatcacatatattgacttgaaggaggcccttgagaaaagaaagctgtttgcttgtgaggagcacccatcccataaagccgtctggaacgtccttggaaacttgtctgagatccagggagaagttctttcatttgatggaaatcgaaccgataagaactacatccggctggaagagctgctcaccaagcagctgctagccctggatgctgttgatccgcagggagaagagaagtgtaaggctgccaggaaacaagctgtgaggcttgcgcagaatattctcagctatctcgacctgaaatctgatgaatgggagtactgaaataccagagatctcacttttgatactgttttgcacttcatatgtgcttctatgtatagagagctttcagttcattgatttatacgtgcatatttcagtctcagtatttatgattgaagcaaattctattcagtatctgctgcttttgatgttgcaagacaaatatcattacagcacgttaacttttccattcggatcattatctgtatgatgtggtgtggtttgtttggtttgtccttttttttgcgtttttaatcagaaaacaaaatagaggcagcttttgtagattttaaatgggttgtgcaagcattaaaatgcaggtctttcagaatctagaactaggcataaccttacataatactaggaaaattatgagaaaggggaaatttttggttaaataagagtaaggttcaaacacaagcagtacatgttctgtttcattatgctcgatagaaggcttttttttcacttataaggcctgattggtcctacccagcttaacggggtggggtttttttgtttgttcagacagtctgttcttttgtaaacatttttagttggaaaaacagcatctgcattttccccatcctctacgttttagagaggaatcttgtttttgtgtgcaacataagaaaattatgaaaactaatagccaaaaaacctttgagattgcattaaagagaagggataaaggaccagcaataataccttgtaagttgcttttgtttgtaaaatctgagcttatagttttccttagtgagtaaattcataaggatgggaacatttaaattaagttaatgggcctttaaaaaaaaaaaaggaaacactcatacctgtagttggaggatgaatactggagacgggttaccaatgtcaggttatactaaaactaaatcagaaagtctgaatgtagcacataatggttctcttctgttgtccaaggctgtaaaatggacagccttgtcacacctccccggtgctgttttacaacgtgagggtagacgctgtcagtaacccagagggaccaggccttcctaggttttctaggcagtcagctgttaaccactcacttagtaaatgtcataactacacctgctccaggaccaatcagtgaaacctgctcggaattaaaggcttcctctgggtgcctgctgaacaactgagctcatgtcatgggcatgtggtggtttctctgttgcctgaaagagccattaaagtcagtcgtgcgtgaagcatctctcttctaaaggatgtgtatttccataaatgctttctgaggatccggtacaaaatgatttcccaaagttctgaagtgccttgagaacatgtgggtccgagtgttataacagactcctcccccgggtcaccttttgcctggtcatcctgttagagtacatctttggaaatccagggtaatattctctttcagagatgctcattgtgtaactctgtgtagggagatagtcactttaaacagctcaaagtagctagctaaaggagtagccttaaatacctaaaagatgacagaagcatagcccttaacaaatcttcagcttgtctctcagtatttcccaatcatgaaaatcccttgctatgtctttcctactagaaatgttctagaatcgctggacggtggggtcagagggcagtcggtatttaggccgtgagcttcccatactactgcaggtccaactcctggcaaccgcgggctcaaggcaggtcattggaatccacgttttggccacagtagttgtaggattgcttttctgtatcataattttagaatgctcttaaaatcttgaggaagagtttttattttttatttatttttgagatggagtctctgttgcccaggctgcagtgcagtggtgccatctcagctcactgcaacctccacctcccaggttcaagcgattctcctgcctcagccacctgagtagctgggagtacaggcatgtggcaccatgcctggctaatttttgtatttttaatagagttgagatttcaccatgatggtcaggctggtctcgaactcctgacctcgtgatccgcccgcctcggccccccaaagtgctgggattaacgggtgtgagccacggcgcccagcccaggaagagtttttaaattagagctctgtttaattataccactgggaaatcatggttacgcttcaggcatattcttccccagagtactacttacattttaaatttcattttgtaaagttaaatgtcagcattccctttaaaagtgtccattgttctttgaaagtagacgtttcagtcattcttttcaaacaagtgtttgtgtaccttttgccaagctgtgggcatcgtgtgtgagtacagggtgctcagctcttccaccgtcattttgaattgttcacatgggtaattggtcatggaaatgatcagattgaccttgattgactgtcaggcatggctttgtttctggtttcaatctgttctcgttccttgtaccggattattctactcctgcaatgaaccctgttgacaccggatttagctcttgtcggccttcgtggggagctgtttgtgttaatatgagctactgcatgtaattcttaaactgggcttgtcacattgtattgtatttttgtgatctgtaatgaaaagaatctgtactgcaagtaaaacctactccccaaaaatgtgtggctttgggtctgcattaaacgctgtagtccatgttcatgcca

SEQ ID NO: 302167 - DNA, 5510 bp, Homo sapiens
cggccgctccttggtcgcggtcactccaggctgcctcgctgcgccgctggcggtgggcgtggcgctgccggcggctaggcgcggacgccggaggaggtgtccccgggtttaggggtgttcggccaggggcggggctgccgggcccgggcgactgccggagctgcggaagtcgtggaagcgtcggcgacgcatcgcgcgatggcgcgggcgggacaggtgagcgaagcgcggcttgtagccttttccctctctcggggggacgagtggggcaccacctccgcgcggggctccccgctgggccaccccttcgccagcgcccagccccgtgcggcctgtcggatcaggcagggcagagtcggtctcggcgctgtccccgcccctggggtcggaagcgaccggggctggccgggcctggtctctggtgtctccggccgggcctcggttcccctcctcccccggcttcccccggccgggccgagctcccctcgcgcgcccattgtgaggtcacgtcctgcaggcgcgccctggcacccgggccaagacgcccggagcggctgctgcagccagtagcggccccttcaccggctgccccgctcagacctagtcgggaggggtgcgaggcatgcagctgggggcccagctccggtgccgcaccccgtaaagggctgatcttccacctcgccacctcagccacgggacgccaagaccgcatccaattcagacttcttttggtgcttgtgaaactgaacacaacaaaagtatggatatgggaaaccaacatccttctattagtaggcttcaggaaatccaaaaggaagtaaaaagtgtagaacagcaagttatcggcttcagtggtctgtcagatgacaagaattacaagaaactggagaggattctaacaaaacagctttttgaaatagactctgtagatactgaaggaaaaggagatattcagcaagctaggaagcgggcagcacaggagacagaacgtcttctcaaagagttggagcagaatgcaaaccacccacaccggattgaaatacagaacatttttgaggaagcccagtccctcgtgagagagaaaattgtgccattttataatggaggcaactgcgtaactgatgagtttgaagaaggcatccaagatatcattctgaggctgacacatgttaaaactggaggaaaaatctccttgcggaaagcaaggtatcacactttaaccaaaatctgtgcggtgcaagagataatcgaagactgcatgaaaaagcagccttccctgccgctttccgaggatgcacatccttccgttgccaaaatcaacttcgtgatgtgtgaggtgaacaaggcccgaggggtcctgattgcacttctgatgggtgtgaacaacaatgagacctgcaggcacttatcctgtgtgctctcggggctgatcgctgacctggatgctctagatgtgtgcggccggacagaaatcagaaattatcggagggaggtagtagaagatatcaacaaattattgaaatatctggatttggaagaggaagcagacacaactaaagcatttgacctgagacagaatcattccattttaaaaatagaaaaggtcctcaagagaatgagagaaataaaaaatgaacttctccaagcacaaaacccttctgaattgtacctgagctccaaaacagaattgcagggtttaattggacagttggatgaggtaagtcttgaaaaaaacccctgcatccgggaagccaggagaagagcagtgatcgaggtgcaaactctgatcacatatattgacttgaaggaggcccttgagaaaagaaagctgtttgcttgtgaggagcacccatcccataaagccgtctggaacgtccttggaaacttgtctgagatccagggagaagttctttcatttgatggaaatcgaaccgataagaactacatccggctggaagagctgctcaccaagcagctgctagccctggatgctgttgatccgcagggagaagagaagtgtaaggctgccaggaaacaagctgtgaggcttgcgcagaatattctcagctatctcgacctgaaatctgatgaatgggagtactgaaataccagagatctcacttttgatactgttttgcacttcatatgtgcttctatgtatagagagctttcagttcattgatttatacgtgcatatttcagtctcagtatttatgattgaagcaaattctattcagtatctgctgcttttgatgttgcaagacaaatatcattacagcacgttaacttttccattcggatcattatctgtatgatgtggtgtggtttgtttggtttgtccttttttttgcgtttttaatcagaaaacaaaatagaggcagcttttgtagattttaaatgggttgtgcaagcattaaaatgcaggtctttcagaatctagaactaggcataaccttacataatactaggaaaattatgagaaaggggaaatttttggttaaataagagtaaggttcaaacacaagcagtacatgttctgtttcattatgctcgatagaaggcttttttttcacttataaggcctgattggtcctacccagcttaacggggtggggtttttttgtttgttcagacagtctgttcttttgtaaacatttttagttggaaaaacagcatctgcattttccccatcctctacgttttagagaggaatcttgtttttgtgtgcaacataagaaaattatgaaaactaatagccaaaaaacctttgagattgcattaaagagaagggataaaggaccagcaataataccttgtaagttgcttttgtttgtaaaatctgagcttatagttttccttagtgagtaaattcataaggatgggaacatttaaattaagttaatgggcctttaaaaaaaaaaaaggaaacactcatacctgtagttggaggatgaatactggagacgggttaccaatgtcaggttatactaaaactaaatcagaaagtctgaatgtagcacataatggttctcttctgttgtccaaggctgtaaaatggacagccttgtcacacctccccggtgctgttttacaacgtgagggtagacgctgtcagtaacccagagggaccaggccttcctaggttttctaggcagtcagctgttaaccactcacttagtaaatgtcataactacacctgctccaggaccaatcagtgaaacctgctcggaattaaaggcttcctctgggtgcctgctgaacaactgagctcatgtcatgggcatgtggtggtttctctgttgcctgaaagagccattaaagtcagtcgtgcgtgaagcatctctcttctaaaggatgtgtatttccataaatgctttctgaggatccggtacaaaatgatttcccaaagttctgaagtgccttgagaacatgtgggtccgagtgttataacagactcctcccccgggtcaccttttgcctggtcatcctgttagagtacatctttggaaatccagggtaatattctctttcagagatgctcattgtgtaactctgtgtagggagatagtcactttaaacagctcaaagtagctagctaaaggagtagccttaaatacctaaaagatgacagaagcatagcccttaacaaatcttcagcttgtctctcagtatttcccaatcatgaaaatcccttgctatgtctttcctactagaaatgttctagaatcgctggacggtggggtcagagggcagtcggtatttaggccgtgagcttcccatactactgcaggtccaactcctggcaaccgcgggctcaaggcaggtcattggaatccacgttttggccacagtagttgtaggattgcttttctgtatcataattttagaatgctcttaaaatcttgaggaagagtttttattttttatttatttttgagatggagtctctgttgcccaggctgcagtgcagtggtgccatctcagctcactgcaacctccacctcccaggttcaagcgattctcctgcctcagccacctgagtagctgggagtacaggcatgtggcaccatgcctggctaatttttgtatttttaatagagttgagatttcaccatgatggtcaggctggtctcgaactcctgacctcgtgatccgcccgcctcggccccccaaagtgctgggattaacgggtgtgagccacggcgcccagcccaggaagagtttttaaattagagctctgtttaattataccactgggaaatcatggttacgcttcaggcatattcttccccagagtactacttacattttaaatttcattttgtaaagttaaatgtcagcattccctttaaaagtgtccattgttctttgaaagtagacgtttcagtcattcttttcaaacaagtgtttgtgtaccttttgccaagctgtgggcatcgtgtgtgagtacagggtgctcagctcttccaccgtcattttgaattgttcacatgggtaattggtcatggaaatgatcagattgaccttgattgactgtcaggcatggctttgtttctggtttcaatctgttctcgttccttgtaccggattattctactcctgcaatgaaccctgttgacaccggatttagctcttgtcggccttcgtggggagctgtttgtgttaatatgagctactgcatgtaattcttaaactgggcttgtcacattgtattgtatttttgtgatctgtaatgaaaagaatctgtactgcaagtaaaacctactccccaaaaatgtgtggctttgggtctgcattaaacgctgtagtccatgttcatgccaaaaatggctgggaacgtttgctttatttacattcagtcagcgttgctttcagatcacactttatccacacaggaaagccagtcagcctataatgaagtagttattaaaataaatgtaatgaatatgtctacaaagtatagtttagtggtttattttgctaaaatgcacatatatttgatataatttagtttgagaagttcagctagtttttctcctttgtttgactttgtcaatttctatctggtttttaagggtctgagcttagcttgtgcatgcaaggttttgggtttttttattttttttttgagcacagcttttcaccttttaatttgttgggtatttttctcttaataagagaaatattggccatcgatttttacatataatacaagtgtgtttttccagtacattggttcctgtcccctctctgtgaactgtttgagtattggaacagtatgtcttcaataattcaatgttactttgagatacatgtgttaatatacccttagttattcttgaaataaaaccagtctcttacgcttgcagtggagaaaggctgtgagtctgaggtgtgtgttctctatatattatcaccttcatgaactgtctgacctgggtgcggagcccttttttttttttttttttgagacggagtctggctctgtcacccaggttggagtgcaatag

SEQ ID NO: 302168 - DNA, 4218 bp, Homo sapiens
cggccgctccttggtcgcggtcactccaggctgcctcgctgcgccgctggcggtgggcgtggcgctgccggcggctaggcgcggacgccggaggaggtgtccccgggtttaggggtgttcggccaggggcggggctgccgggcccgggcgactgccggagctgcggaagtcgtggaagcgtcggcgacgcatcgcgcgatggcgcgggcgggacagtgcttgtgaaactgaacacaacaaaagtatggatatgggaaaccaacatccttctattagtaggcttcaggaaatccaaaaggaagtaaaaagtgtagaacagcaagttatcggcttcagtggtctgtcagatgacaagaattacaagaaactggagaggattctaacaaaacagctttttgaaatagactctgtagatactgaaggaaaaggagatattcagcaagctaggaagcgggcagcacaggagaagagcagtgatcgaggtgcaaactctgatcacatatattgacttgaaggaggcccttgagaaaagaaagctgtttgcttgtgaggagcacccatcccataaagccgtctggaacgtccttggaaacttgtctgagatccagggagaagttctttcatttgatggaaatcgaaccgataagaactacatccggctggaagagctgctcaccaagcagctgctagccctggatgctgttgatccgcagggagaagagaagtgtaaggctgccaggaaacaagctgtgaggcttgcgcagaatattctcagctatctcgacctgaaatctgatgaatgggagtactgaaataccagagatctcacttttgatactgttttgcacttcatatgtgcttctatgtatagagagctttcagttcattgatttatacgtgcatatttcagtctcagtatttatgattgaagcaaattctattcagtatctgctgcttttgatgttgcaagacaaatatcattacagcacgttaacttttccattcggatcattatctgtatgatgtggtgtggtttgtttggtttgtccttttttttgcgtttttaatcagaaaacaaaatagaggcagcttttgtagattttaaatgggttgtgcaagcattaaaatgcaggtctttcagaatctagaactaggcataaccttacataatactaggaaaattatgagaaaggggaaatttttggttaaataagagtaaggttcaaacacaagcagtacatgttctgtttcattatgctcgatagaaggcttttttttcacttataaggcctgattggtcctacccagcttaacggggtggggtttttttgtttgttcagacagtctgttcttttgtaaacatttttagttggaaaaacagcatctgcattttccccatcctctacgttttagagaggaatcttgtttttgtgtgcaacataagaaaattatgaaaactaatagccaaaaaacctttgagattgcattaaagagaagggataaaggaccagcaataataccttgtaagttgcttttgtttgtaaaatctgagcttatagttttccttagtgagtaaattcataaggatgggaacatttaaattaagttaatgggcctttaaaaaaaaaaaaggaaacactcatacctgtagttggaggatgaatactggagacgggttaccaatgtcaggttatactaaaactaaatcagaaagtctgaatgtagcacataatggttctcttctgttgtccaaggctgtaaaatggacagccttgtcacacctccccggtgctgttttacaacgtgagggtagacgctgtcagtaacccagagggaccaggccttcctaggttttctaggcagtcagctgttaaccactcacttagtaaatgtcataactacacctgctccaggaccaatcagtgaaacctgctcggaattaaaggcttcctctgggtgcctgctgaacaactgagctcatgtcatgggcatgtggtggtttctctgttgcctgaaagagccattaaagtcagtcgtgcgtgaagcatctctcttctaaaggatgtgtatttccataaatgctttctgaggatccggtacaaaatgatttcccaaagttctgaagtgccttgagaacatgtgggtccgagtgttataacagactcctcccccgggtcaccttttgcctggtcatcctgttagagtacatctttggaaatccagggtaatattctctttcagagatgctcattgtgtaactctgtgtagggagatagtcactttaaacagctcaaagtagctagctaaaggagtagccttaaatacctaaaagatgacagaagcatagcccttaacaaatcttcagcttgtctctcagtatttcccaatcatgaaaatcccttgctatgtctttcctactagaaatgttctagaatcgctggacggtggggtcagagggcagtcggtatttaggccgtgagcttcccatactactgcaggtccaactcctggcaaccgcgggctcaaggcaggtcattggaatccacgttttggccacagtagttgtaggattgcttttctgtatcataattttagaatgctcttaaaatcttgaggaagagtttttattttttatttatttttgagatggagtctctgttgcccaggctgcagtgcagtggtgccatctcagctcactgcaacctccacctcccaggttcaagcgattctcctgcctcagccacctgagtagctgggagtacaggcatgtggcaccatgcctggctaatttttgtatttttaatagagttgagatttcaccatgatggtcaggctggtctcgaactcctgacctcgtgatccgcccgcctcggccccccaaagtgctgggattaacgggtgtgagccacggcgcccagcccaggaagagtttttaaattagagctctgtttaattataccactgggaaatcatggttacgcttcaggcatattcttccccagagtactacttacattttaaatttcattttgtaaagttaaatgtcagcattccctttaaaagtgtccattgttctttgaaagtagacgtttcagtcattcttttcaaacaagtgtttgtgtaccttttgccaagctgtgggcatcgtgtgtgagtacagggtgctcagctcttccaccgtcattttgaattgttcacatgggtaattggtcatggaaatgatcagattgaccttgattgactgtcaggcatggctttgtttctggtttcaatctgttctcgttccttgtaccggattattctactcctgcaatgaaccctgttgacaccggatttagctcttgtcggccttcgtggggagctgtttgtgttaatatgagctactgcatgtaattcttaaactgggcttgtcacattgtattgtatttttgtgatctgtaatgaaaagaatctgtactgcaagtaaaacctactccccaaaaatgtgtggctttgggtctgcattaaacgctgtagtccatgttcatgccaaaaatggctgggaacgtttgctttatttacattcagtcagcgttgctttcagatcacactttatccacacaggaaagccagtcagcctataatgaagtagttattaaaataaatgtaatgaatatgtctacaaagtatagtttagtggtttattttgctaaaatgcacatatatttgatataatttagtttgagaagttcagctagtttttctcctttgtttgactttgtcaatttctatctggtttttaagggtctgagcttagcttgtgcatgcaaggttttgggtttttttattttttttttgagcacagcttttcaccttttaatttgttgggtatttttctcttaataagagaaatattggccatcgatttttacatataatacaagtgtgtttttccagtacattggttcctgtcccctctctgtgaactgtttgagtattggaacagtatgtcttcaataattcaatgttactttgagatacatgtgttaatatacccttagttattcttgaaataaaaccagtctcttacgcttgcagtggagaaaggctgtgagtctgaggtgtgtgttctctatatattatcaccttcatgaactgtctgacctgggtgcggagcccttttttttttttttttttgagacggagtctggctctgtcacccaggttggagtgcaatag

SEQ ID NO: 302169 - DNA, 4104 bp, Homo sapiens
cggccgctccttggtcgcggtcactccaggctgcctcgctgcgccgctggcggtgggcgtggcgctgccggcggctaggcgcggacgccggaggaggtgtccccgggtttaggggtgttcggccaggggcggggctgccgggcccgggcgactgccggagctgcggaagtcgtggaagcgtcggcgacgcatcgcgcgatggcgcgggcgggacaggtgagcgaagcgcggcttgtagccttttccctctctcggggggacgagtggggcaccacctccgcgcggggctccccgctgggccaccccttcgccagcgcccagccccgtgcggcctgtcggatcaggcagggcagagtcggtctcggcgctgtccccgcccctggggtcggaagcgaccggggctggccgggcctggtctctggtgtctccggccgggcctcggttcccctcctcccccggcttcccccggccgggccgagctcccctcgcgcgcccattgtgaggtcacgtcctgcaggcgcgccctggcacccgggccaagacgcccggagcggctgctgcagccagtagcggccccttcaccggctgccccgctcagacctagtcgggaggggtgcgaggcatgcagctgggggcccagctccggtgccgcaccccgtaaagggctgatcttccacctcgccacctcagccacgggacgccaagaccgcatccaattcagacttcttttggtgcttgtgaaactgaacacaacaaaagtatggatatgggaaaccaacatccttctattagtaggcttcaggaaatccaaaaggaagtaaaaagtgtagaacagcaagttatcggcttcagtggtctgtcagatgacaagaattacaagaaactggagaggattctaacaaaacagctttttgaaatagactctgtagatactgaaggaaaaggagatattcagcaagctaggaagcgggcagcacaggagacagaacgtcttctcaaagagttggagcagaatgcaaaccacccacaccggattgaaatacagaacatttttgaggaagcccagtccctcgtgagagagaaaattgtgccattttataatggaggcaactgcgtaactgatgagtttgaagaaggcatccaagatatcattctgaggctgacacatgttaaaactggaggaaaaatctccttgcggaaagcaaggtatcacactttaaccaaaatctgtgcggtgcaagagataatcgaagactgcatgaaaaagcagccttccctgccgctttccgaggatgcacatccttccgttgccaaaatcaacttcgtgatgtgtgaggtgaacaaggcccgaggggtcctgattgcacttctgatgggtgtgaacaacaatgagacctgcaggcacttatcctgtgtgctctcggggctgatcgctgacctggatgctctagatgtgtgcggccggacagaaatcagaaattatcggagggaggtagtagaagatatcaacaaattattgaaatatctggatttggaagaggaagcagacacaactaaagcatttgacctgagacagaatcattccattttaaaaatagaaaaggtcctcaagagaatgagagaaataaaaaatgaacttctccaagcacaaaacccttctgaattgtacctgagctccaaaacagaattgcagggtttaattggacagttggatgaggtaagtcttgaaaaaaacccctgcatccgggaagccaggagaagagcagtgatcgaggtgcaaactctgatcacatatattgacttgaaggaggcccttgagaaaagaaagctgtttgcttgtgaggagcacccatcccataaagccgtctggaacgtccttggaaacttgtctgagatccagggagaagttctttcatttgatggaaatcgaaccgataagaactacatccggctggaagagctgctcaccaagcagctgctagccctggatgctgttgatccgcagggagaagagaagtgtaaggctgccaggaaacaagctgtgaggcttgcgcagaatattctcagctatctcgacctgaaatctgatgaatgggagtactgaaataccagagatctcacttttgatactgttttgcacttcatatgtgcttctatgtatagagagctttcagttcattgatttatacgtgcatatttcagtctcagtatttatgattgaagcaaattctattcagtatctgctgcttttgatgttgcaagacaaatatcattacagcacgttaacttttccattcggatcattatctgtatgatgtggtgtggtttgtttggtttgtccttttttttgcgtttttaatcagaaaacaaaatagaggcagcttttgtagattttaaatgggttgtgcaagcattaaaatgcaggtctttcagaatctagaactaggcataaccttacataatactaggaaaattatgagaaaggggaaatttttggttaaataagagtaaggttcaaacacaagcagtacatgttctgtttcattatgctcgatagaaggcttttttttcacttataaggcctgattggtcctacccagcttaacggggtggggtttttttgtttgttcagacagtctgttcttttgtaaacatttttagttggaaaaacagcatctgcattttccccatcctctacgttttagagaggaatcttgtttttgtgtgcaacataagaaaattatgaaaactaatagccaaaaaacctttgagattgcattaaagagaagggataaaggaccagcaataataccttgtaagttgcttttgtttgtaaaatctgagcttatagttttccttagtgagtaaattcataaggatgggaacatttaaattaagttaatgggcctttaaaaaaaaaaaaggaaacactcatacctgtagttggaggatgaatactggagacgggttaccaatgtcaggttatactaaaactaaatcagaaagtctgaatgtagcacataatggttctcttctgttgtccaaggctgtaaaatggacagccttgtcacacctccccggtgctgttttacaacgtgagggtagacgctgtcagtaacccagagggaccaggccttcctaggttttctaggcagtcagctgttaaccactcacttagtaaatgtcataactacacctgctccaggaccaatcagtgaaacctgctcggaattaaaggcttcctctgggtgcctgctgaacaactgagctcatgtcatgggcatgtggtggtttctctgttgcctgaaagagccattaaagtcagtcgtgcgtgaagcatctctcttctaaaggatgtgtatttccataaatgctttctgaggatccggtacaaaatgatttcccaaagttctgaagtgccttgagaacatgtgggtccgagtgttataacagactcctcccccgggtcaccttttgcctggtcatcctgttagagtacatctttggaaatccagggtaatattctctttcagagatgctcattgtgtaactctgtgtagggagatagtcactttaaacagctcaaagtagctagctaaaggagtagccttaaatacctaaaagatgacagaagcatagcccttaacaaatcttcagcttgtctctcagtatttcccaatcatgaaaatcccttgctatgtctttcctactagaaatgttctagaatcgctggacggtggggtcagagggcagtcggtatttaggccgtgagcttcccatactactgcaggtccaactcctggcaaccgcgggctcaaggcaggtcattggaatccacgttttggccacagtagttgtaggattgcttttctgtatcataattttagaatgctcttaaaatcttgaggaagagtttttattttttatttatttttgagatggagtctctgttgcccaggctgcagtgcagtggtgccatctcagctcactgcaacctccacctcccaggttcaagcgattctcctgcctcagctactcgggaggctgaggccgagattgcaccattgcgctccagcctgggcaacaagagtgaaactccatctc

SEQ ID NO: 302170 - DNA, 2912 bp, Homo sapiens
cggccgctccttggtcgcggtcactccaggctgcctcgctgcgccgctggcggtgggcgtggcgctgccggcggctaggcgcggacgccggaggaggtgtccccgggtttaggggtgttcggccaggggcggggctgccgggcccgggcgactgccggagctgcggaagtcgtggaagcgtcggcgacgcatcgcgcgatggcgcgggcgggacaggtgagcgaagcgcggcttgtagccttttccctctctcggggggacgagtggggcaccacctccgcgcggggctccccgctgggccaccccttcgccagcgcccagccccgtgcggcctgtcggatcaggcagggcagagtcggtctcggcgctgtccccgcccctggggtcggaagcgaccggggctggccgggcctggtctctggtgtctccggccgggcctcggttcccctcctcccccggcttcccccggccgggccgagctcccctcgcgcgcccattgtgaggtcacgtcctgcaggcgcgccctggcacccgggccaagacgcccggagcggctgctgcagccagtagcggccccttcaccggctgccccgctcagacctagtcgggaggggtgcgaggcatgcagctgggggcccagctccggtgccgcaccccgtaaagggctgatcttccacctcgccacctcagccacgggacgccaagaccgcatccaattcagacttcttttggtgcttgtgaaactgaacacaacaaaagtatggatatgggaaaccaacatccttctattagtaggcttcaggaaatccaaaaggaagtaaaaagtgtagaacagcaagttatcggcttcagtggtctgtcagatgacaagaattacaagaaactggagaggattctaacaaaacagctttttgaaatagactctgtagatactgaaggaaaaggagatattcagcaagctaggaagcgggcagcacaggagacagaacgtcttctcaaagagttggagcagaatgcaaaccacccacaccggattgaaatacagaacatttttgaggaagcccagtccctcgtgagagagaaaattgtgccattttataatggaggcaactgcgtaactgatgagtttgaagaaggcatccaagatatcattctgaggctgacacatgttaaaactggaggaaaaatctccttgcggaaagcaaggtatcacactttaaccaaaatctgtgcggtgcaagagataatcgaagactgcatgaaaaagcagccttccctgccgctttccgaggatgcacatccttccgttgccaaaatcaacttcgtgatgtgtgaggtgaacaaggcccgaggggtcctgattgcacttctgatgggtgtgaacaacaatgagacctgcaggcacttatcctgtgtgctctcggggctgatcgctgacctggatgctctagatgtgtgcggccggacagaaatcagaaattatcggagggaggtagtagaagatatcaacaaattattgaaatatctggatttggaagaggaagcagacacaactaaagcatttgacctgagacagaatcattccattttaaaaatagaaaaggtcctcaagagaatgagagaaataaaaaatgaacttctccaagcacaaaacccttctgaattgtacctgagctccaaaacagaattgcagggtttaattggacagttggatgaggtaagtcttgaaaaaaacccctgcatccgggaagccaggagaagagcagtgatcgaggtgcaaactctgatcacatatattgacttgaaggaggcccttgagaaaagaaagctgtttgcttgtgaggagcacccatcccataaagccgtctggaacgtccttggaaacttgtctgagatccagggagaagttctttcatttgatggaaatcgaaccgataagaactacatccggctggaagagctgctcaccaagcagctgctagccctggatgctgttgatccgcagggagaagagaagtgtaaggctgccaggaaacaagctgtgaggcttgcgcagaatattctcagctatctcgacctgaaatctgatgaatgggagtactgaaataccagagatctcacttttgatactgttttgcacttcatatgtgcttctatgtatagagagctttcagttcattgatttatacgtgcatatttcagtctcagtatttatgattgaagcaaattctattcagtatctgctgcttttgatgttgcaagacaaatatcattacagcacgttaacttttccattcggatcattatctgtatgatgtggtgtggtttgtttggtttgtccttttttttgcgtttttaatcagaaaacaaaatagaggcagcttttgtagattttaaatgggttgtgcaagcattaaaatgcaggtctttcagaatctagaactaggcataaccttacataatactaggaaaattatgagaaaggggaaatttttggttaaataagagtaaggttcaaacacaagcagtacatgttctgtttcattatgctcgatagaaggcttttttttcacttataaggcctgattggtcctacccagcttaacggggtggggtttttttgtttgttcagacagtctgttcttttgtaaacatttttagttggaaaaacagcatctgcattttccccatcctctacgttttagagaggaatcttgtttttgtgtgcaacataagaaaattatgaaaactaatagccaaaaaacctttgagattgcattaaagagaagggataaaggaccagcaataataccttgtaagttgcttttgtttgtaaaatctgagcttatagttttccttagtgagtaaattcataaggatgggaacatttaaattaagttaatgggccttta

SEQ ID NO: 302171 - DNA, 1205 bp, Homo sapiens
cggccgctccttggtcgcggtcactccaggctgcctcgctgcgccgctggcggtgggcgtggcgctgccggcggctaggcgcggacgccggaggaggtgtccccgggtttaggggtgttcggccaggggcggggctgccgggcccgggcgactgccggagctgcggaagtcgtggaagcgtcggcgacgcatcgcgcgatggcgcgggcgggacagtgcttgtgaaactgaacacaacaaaagtatggatatgggaaaccaacatccttctattagtaggcttcaggaaatccaaaaggaagtaaaaagtgtagaacagcaagttatcggcttcagtggtctgtcagatgacaagaattacaagaaactggagaggattctaacaaaacagctttttgaaatagactctgtagatactgaaggaaaaggagatattcagcaagctaggaagcgggcagcacaggagaagagcagtgatcgaggtgcaaactctgatcacatatattgacttgaaggaggcccttgagaaaagaaagctgtttgcttgtgaggagcacccatcccataaagccgtctggaacgtccttggaaacttgtctgagatccagggagaagttctttcatttgatggaaatcgaaccgataagaactacatccggctggaagagctgctcaccaagcagctgctagccctggatgctgttgatccgcagggagaagagaagtgtaaggctgccaggaaacaagctgtgaggcttgcgcagaatattctcagctatctcgacctgaaatctgatgaatgggagtactgaaataccagagatctcacttttgatactgttttgcacttcatatgtgcttctatgtatagagagctttcagttcattgatttatacgtgcataaaaaaaaaaaaaaaaaaaaaaaaaaaaaaaaaaaaaaaaaaaaaaaaaaaaaaaaaaaaaaaaaaaaaaagaaaaaaaaaaaaaaaaaaaaaaaaaaaaaaaagggggggggcggacataaaaaatccccggaggggagacccaatgaaagagagccagatgtgatgaacaaaggggcaccacgagaggggggagagaaagaggaggggagggggcgagaaaaggaagagagggggggagaaaaagaagagggaaaccgatgggggagaaaagtggggggggaaaaggagagagaagacga

SEQ ID NO: 302172 - DNA, 3674 bp, Homo sapiens
tctcccggccttgttgactttggcgtccgcggggagctgcccctgtgcccgtggctctctgcgcatgcccggaccccggcggctccggagtccgggaggctctggctgctccagtcgcgggtccgggccccgcctctccactcggcggtggcgtccgtgttgttattgtggtggtagcggcgtctggctgctgcggaccccgccgagtcctagcgcctggcctgcgcgccgctgcccgcgccacagatttgagttctgtgaacctgcatttgttgttggtaattgcctccagatagcttctgacagtcatcagtatgatcgaatttattgtggagctggagtacagaaagaccatgaaaactacatgaaaatattactaaaagttggaggcatattagtcatgcctatagaggatcagttaacacagattatgcgaactggacagaacacttgggaaagtaaaaatatccttgctgtttcatttgctccacttgtgcaaccaagtaagaatgataatggcaaaccagattctgtgggactccctccctgtgctgtcaggaatctacaggacttggctcgtatttacattcgacgcacacttagaaatttcataaatgatgagatgcaggccaaggggattcctcaaagggctccacccaaaaggaaaagaaagagagttaaacagagaattaacacttacgtatttgtgggtaatcagcttattcctcagcctctagacagtgaagaggatgaaaaaatggaagaggataacaaagaagaggaggaaaaagatcacaatgaagcaatgaagccagaggagccacctcaaaatttactgagagaaaaaatcatgaagctgcccctccctgaatctttaaaagcttacttgacatattttagagacaaataacttagatcaagaagaaaaatgcctactgataattcctttagtcttgaaaatgtagcatttgttaggagttaaaagagagaattatttctttcatcagagcaaattatagtggaaaaaaaaatcacttgtttctgtcagtaacacaaatgatgtattcagtgaataaaagaatcccttttataaaatctatttttctttaaatcttggaaaaatgttgttttagctcagagtgatttcaaagtggaatgcaacagtagtcaagacttgtgtactataaatccttttctgattccttacagatttgtagtgatgaggtttagatttaattttatatatggtttaaataattgttaagcttatataacctgatctgaattgcagttgtttgcatttcctctatgaaaacttcatttatctaataaggaagtcaaatgctttgtagactatttaccttacttttgttgcaatcactgttgttgggttgctgtatatatattccgggcaatatatgagtgcaataacaatacaagatattgaataatttagctttaaaaaatcccacaaattttatgaaattttacagccctgctacttttgcttttgaatctcttgccaaaagacatgggtaaaatatctgcctctctcatagagattttaagagcacagcaagtgaattattaaaacaaagtctatacttaatacaactctttatatggaccctttacattttcagtatttaaaaaaataactctatagaattttaaaagtatatttagaattgttttttctgtagttcactgtataaagtatttggttttttaaaaaaagcaaaaccattgttatgtgtgactcttgataggacacagaacgagtgaatgagcatgagtgaggccactttcttggatggctgtaagtagcagggccagggtagacctgggtcagcggatgcactttagcagatggaacttctagtttatctgaatatttatctttgacaaggtagggctgagcctacatttgcttttgatctatctagtataagaaatattcacagaaattgtatgtagataccctttgttttgaaaatgctgttcagaatcatagtgtaatctttgggacctatgccatgttcatttcactccttcccatattttttgtgtttcttttggtaaaactataatggttttcattttttacttaatatcacacagttaaactgtccatatttgagctttattttagcttatcagtgataaaaaacaggtagtaactgccattgtttgtttgttttcctaataaggcctgaaaacagccattccttgttaagaaagtgtacaatgtaacatatttgctagagttacatggattatatatttcttaaagggaaaaatttgagagtatcatggactaccaccagcattattattacagtagttactcagatttggttaaggaagcccaagcaatgtatagtgaaaggattattatctctctgctaagattcagatattgtttcagaaatctcagctccagtaattccacaacatctaaaaacaaatgtttgtgatcatgtgtaagcatgaaattgttccaagtaagtgaggatattttagttatgtgaaagacagtttcatggaaggtatttgttttataccagtggctgggatggtggaattggggttatttctacaattattcttagacgattactaaactgttaagaaatgccccatatcatttttgtatctaggaaagaaaaaaatcagtttcatactgttgtcatctgtcagaaatgctcattttattttgaattaaatgtggcttttgaagtacctagttaccttgaattcctggtgaccacatgtttttatctggaaaacctggagaaagttatctgtcccatctcccctgcttgttttttttttttttttttgggttggagctgctgtttagatgatgcttttactatgcaggagagagtttttgttaaggatatatttgaagattggcttttccatattgtccttcattctttgaccgtggcaaagtgtacagtagattttcatgatcattgcatatttcttgtcattgaaatgtatcttttatgtttttaaatgcattcattttacacttgtgagtttatcattgactttaagaggtagaaatgaaaaatgaaaattaaagctaaagcctttttatctattaatgcagatatattagaataagaatattttgggtttgtgtttattttttaatgaatttatgtttacttgatatggaaaattacgctttataggtggaaaagtagcaaataaagattaagtaaaagtaagtgaaaatgatggggaatatagtattggaattttatagctagttaaaacaataagtatcatctaatttgggtgtttattttgcagatgagaaaacagacctagaaccgtggcatgttttgcctgaaacatacagtgagttagagacagggcctaagatagcttctagcatcagatcaatcccaagaatccatcagcaacctcagaccaacccaagaagataatttaaatctatactgcttattggtcaatatatttggttctagtattaataaagaaaaatgttattaaaatagcatacatagtagtaaaataaaatacaaaaagtgtgttgatttatagctgtttgagatgataaaagtgaagcaaagcctgttaaatcattggaagacttggaaaattattttaaataaacaattacatgtaattaaaaa

SEQ ID NO: 302173 - DNA, 1430 bp, Homo sapiens
tctcccggccttgttgactttggcgtccgcggggagctgcccctgtgcccgtggctctctgcgcatgcccggaccccggcggctccggagtccgggaggctctggctgctccagtcgcgggtccgggccccgcctctccactcggcggtggcgtccgtgttgttattgtggtggtagcggcgtctggctgctgcggaccccgccgagtcctagcgcctggcctgcgcgccgctgcccgcgccacaggattaatttatttttggaaatcaagtgcaatattggaagccatttctactaattttatttcacttttaaatttatgatttgatttgaatactatcatgggaggagctgtgagtgctggggaagataatgatgacttaattgataatttaaaagaagctcagtatattcgtactgaaagagtggagcaagccttcagagcgattgatcgtggagattactatttggaaggctacagagacaatgcttacaaagacttagcctggaagcatggaaacatccacttgtcagcaccttgcatttattctgaagttatggaagcattgaaacttcaaccaggattgtcttttcttaacctgggaagtggaaccggatatttaagtacaatggtgggcttaattttaggtccttttggaataaatcatgggattgagcttcattcagatgtggtggaatatgccaaggaaaaactggagagcttcatcaaaaatagtgatagctttgataagaggcgatcccgcgccctgggtgcggtgaggccgctgggacagcggaggtgcctcccgacgcgaagcagcgagctgaggcggcggccagcggggaagatgagcggcagcagcgccaggtccagccacctgtctcagcccgtcgtgaagagcgtgcttgtgtaccgcaacggggaccccttctacgcggggcgccgcgtcgtcatccatgagaagaaggtgtccagcttcgaagtcttcctgaaggaggtgaccggcggcgttcaggcaccctttggggccgtcaggaacatctacaccccgcggactggccaccgaatccggaagctagaccagatccagagcgggggcaattacgtggctggaggccaggaagccttcaagaaactcaagtgagtcggtctcccccaccgcccacccatttaggtgccctatagtgtggggttgatatgaagaaatgcagatccctacccccccacacctcagtggttgaggggctgtgacttctcggtgtgattgatgcccctcaaaactctcgttgcagttggggggtagaggttgacactgtgactggagaaggaatttcacttgggtcagcagtaggagtaaacttaaaatctgtgtataaacaacaggaatcttaaagaaaataaaaaggtatccttgcaaaggttagtgacc

SEQ ID NO: 302174 - DNA, 948 bp, Homo sapiens
tctcccggccttgttgactttggcgtccgcggggagctgcccctgtgcccgtggctctctgcgcatgcccggaccccggcggctccggagtccgggaggctctggctgctccagtcgcgggtccgggccccgcctctccactcggcggtggcgtccgtgttgttattgtggtggtagcggcgtctggctgctgcggaccccgccgagtcctagcgcctggcctgcgcgccgctgcccgcgccacaggattaatttatttttggaaatcaagtgcaatattggaagccatttctactaattttatttcacttttaaatttatgatttgatttgaatactatcatgggaggagctgtgagtgctggggaagataatgatgacttaattgataatttaaaagaagctcagtatattcgtactgaaagagtggagcaagccttcagagcgattgatcgtggagattactatttggaaggctacagagacaatgcttacaaagacttagcctggaagcatggaaacatccacttgtcagcaccttgcatttattctgaagttatggaagcattgaaacttcaaccaggattgtcttttcttaacctgggaagtggaaccggatatttaagtacaatggtgggcttaattttaggtaccaggacccaatgctaataaagactggactgtgaaaaaaaaaaaaaaaaaaaaaaaaaaataaaagaaacaaaaaaaaaaaaaaacaaaaaaaacaaacacaaaaacacggacaaaaaccaaaaaagaacgacaaagaagagcagggggggcggcgcgccccatacaaattcgcccggcagggggcgcccgcatttgacgacagccacccgactgtttgtggtgaaagcggcgcccacactaacaggatggcgcgtcaaatacgacgcacgcgcgcgcgcttttcacatcccgtctg

SEQ ID NO: 302175 - DNA, 877 bp, Homo sapiens
tctcccggccttgttgactttggcgtccgcggggagctgcccctgtgcccgtggctctctgcgcatgcccggaccccggcggctccggagtccgggaggctctggctgctccagtcgcgggtccgggccccgcctctccactcggcggtggcgtccgtgttgttattgtggtggtagcggcgtctggctgctgcggaccccgccgagtcctagcgcctggcctgcgcgccgctgcccgcgccacaggattaatttatttttggaaatcaagtgcaatattggaagccatttctactaattttatttcacttttaaatttatgatttgatttgaatactatcatgggaggagctgtgagtgctggggaagataatgatgacttaattgataatttaaaagaagctcagtatattcgtactgaaagagtggagcaagccttcagagcgattgatcgtggagattactatttggaaggctacagagacaatgcttacaaagacttagcctggaagcatggaaacatccacttgtcagcaccttgcatttattctgaagttatggaagcattgaaacttcaaccaggattgtcttttcttaacctgggaagtggaaccggatatttaagtacaatggtgggcttaattttaggtccttttggaataaatcatgggattgagcttcattcagatgtggtggaatatgccaaggaaaaactggagagcttcatcaaaaatagtgatagctttgataagtaagtattcatatctatagttttggtttaaaatcacttaatagatacatgcaacatgtctattcttgaacactattattgatcctgactggctcaattgaatgcagcaaaaatcagtgcaccata

SEQ ID NO: 302176 - DNA, 906 bp, Homo sapiens
tctcccggccttgttgactttggcgtccgcggggagctgcccctgtgcccgtggctctctgcgcatgcccggaccccggcggctccggagtccgggaggctctggctgctccagtcgcgggtccgggccccgcctctccactcggcggtggcgtccgtgttgttattgtggtggtagcggcgtctggctgctgcggaccccgccgagtcctagcgcctggcctgcgcgccgctgcccgcgccacaggattaatttatttttggaaatcaagtgcaatattggaagccatttctactaattttatttcacttttaaatttatgatttgatttgaatactatcatgggaggagctgtgagtgctggggaagataatgatgacttaattgataatttaaaagaagctcagtatattcgtactgaaagagtggagcaagccttcagagcgattgatcgtggagattactatttggaaggctacagagacaatgcttacaaagacttagcctggaagcatggaaacatccacttgtcagcaccttgcatttattctgaagttatggaagcattgaaacttcaaccaggattgtcttttcttaacctgggaagtggaaccggatatttaagtacaatggtgggcttaattttaggtccttttggaataaatcatgggattgagcttcattcagatgtggtggaatatgccaaggaaaaactggagagcttcatcaaaaatagtgatagctttgataattattaatagatttcacctattaatacatgaagacacagataatcccattgagggtcataaattgagcagaacagactcagggaagactcttgaatcagttgacagcaactctgtgcaagtgtctgtggagctcaagctatattgctggccacga

SEQ ID NO: 302177 - DNA, 4179 bp, Homo sapiens
tctcccggccttgttgactttggcgtccgcggggagctgcccctgtgcccgtggctctctgcgcatgcccggaccccggcggctccggagtccgggaggctctggctgctccagtcgcgggtccgggccccgcctctccactcggcggtggcgtccgtgttgttattgtggtggtagcggcgtctggctgctgcggaccccgccgagtcctagcgcctggcctgcgcgccgctgcccgcgccacaggattaatttatttttggaaatcaagtgcaatattggaagccatttctactaattttatttcacttttaaatttatgatttgatttgaatactatcatgggaggagctgtgagtgctggggaagataatgatgacttaattgataatttaaaagaagctcagtatattcgtactgaaagagtggagcaagccttcagagcgattgatcgtggagattactatttggaaggctacagagacaatgcttacaaagacttagcctggaagcatggaaacatccacttgtcagcaccttgcatttattctgaagttatggaagcattgaaacttcaaccaggattgtcttttcttaacctgggaagtggaaccggatatttaagtacaatggtgggcttaattttaggtccttttggaataaatcatgggattgagcttcattcagatgtggtggaatatgccaaggaaaaactggagagcttcatcaaaaatagtgatagctttgataaatttgagttctgtgaacctgcatttgttgttggtaattgcctccagatagcttctgacagtcatcagtatgatcgaatttattgtggagctggagtacagaaagaccatgaaaactacatgaaaatattactaaaagttggaggcatattagtcatgcctatagaggatcagttaacacagattatgcgaactggacagaacacttgggaaagtaaaaatatccttgctgtttcatttgctccacttgtgcaaccaagtaagaatgataatggcaaaccagattctgtgggactccctccctgtgctgtcaggaatctacaggacttggctcgtatttacattcgacgcacacttagaaatttcataaatgatgagatgcaggccaaggggattcctcaaagggctccacccaaaaggaaaagaaagagagttaaacagagaattaacacttacgtatttgtgggtaatcagcttattcctcagcctctagacagtgaagaggatgaaaaaatggaagaggataacaaagaagaggaggaaaaagatcacaatgaagcaatgaagccagaggagccacctcaaaatttactgagagaaaaaatcatgaagctgcccctccctgaatctttaaaagcttacttgacatattttagagacaaataacttagatcaagaagaaaaatgcctactgataattcctttagtcttgaaaatgtagcatttgttaggagttaaaagagagaattatttctttcatcagagcaaattatagtggaaaaaaaaatcacttgtttctgtcagtaacacaaatgatgtattcagtgaataaaagaatcccttttataaaatctatttttctttaaatcttggaaaaatgttgttttagctcagagtgatttcaaagtggaatgcaacagtagtcaagacttgtgtactataaatccttttctgattccttacagatttgtagtgatgaggtttagatttaattttatatatggtttaaataattgttaagcttatataacctgatctgaattgcagttgtttgcatttcctctatgaaaacttcatttatctaataaggaagtcaaatgctttgtagactatttaccttacttttgttgcaatcactgttgttgggttgctgtatatatattccgggcaatatatgagtgcaataacaatacaagatattgaataatttagctttaaaaaatcccacaaattttatgaaattttacagccctgctacttttgcttttgaatctcttgccaaaagacatgggtaaaatatctgcctctctcatagagattttaagagcacagcaagtgaattattaaaacaaagtctatacttaatacaactctttatatggaccctttacattttcagtatttaaaaaaataactctatagaattttaaaagtatatttagaattgttttttctgtagttcactgtataaagtatttggttttttaaaaaaagcaaaaccattgttatgtgtgactcttgataggacacagaacgagtgaatgagcatgagtgaggccactttcttggatggctgtaagtagcagggccagggtagacctgggtcagcggatgcactttagcagatggaacttctagtttatctgaatatttatctttgacaaggtagggctgagcctacatttgcttttgatctatctagtataagaaatattcacagaaattgtatgtagataccctttgttttgaaaatgctgttcagaatcatagtgtaatctttgggacctatgccatgttcatttcactccttcccatattttttgtgtttcttttggtaaaactataatggttttcattttttacttaatatcacacagttaaactgtccatatttgagctttattttagcttatcagtgataaaaaacaggtagtaactgccattgtttgtttgttttcctaataaggcctgaaaacagccattccttgttaagaaagtgtacaatgtaacatatttgctagagttacatggattatatatttcttaaagggaaaaatttgagagtatcatggactaccaccagcattattattacagtagttactcagatttggttaaggaagcccaagcaatgtatagtgaaaggattattatctctctgctaagattcagatattgtttcagaaatctcagctccagtaattccacaacatctaaaaacaaatgtttgtgatcatgtgtaagcatgaaattgttccaagtaagtgaggatattttagttatgtgaaagacagtttcatggaaggtatttgttttataccagtggctgggatggtggaattggggttatttctacaattattcttagacgattactaaactgttaagaaatgccccatatcatttttgtatctaggaaagaaaaaaatcagtttcatactgttgtcatctgtcagaaatgctcattttattttgaattaaatgtggcttttgaagtacctagttaccttgaattcctggtgaccacatgtttttatctggaaaacctggagaaagttatctgtcccatctcccctgcttgttttttttttttttttttgggttggagctgctgtttagatgatgcttttactatgcaggagagagtttttgttaaggatatatttgaagattggcttttccatattgtccttcattctttgaccgtggcaaagtgtacagtagattttcatgatcattgcatatttcttgtcattgaaatgtatcttttatgtttttaaatgcattcattttacacttgtgagtttatcattgactttaagaggtagaaatgaaaaatgaaaattaaagctaaagcctttttatctattaatgcagatatattagaataagaatattttgggtttgtgtttattttttaatgaatttatgtttacttgatatggaaaattacgctttataggtggaaaagtagcaaataaagattaagtaaaagtaagtgaaaatgatggggaatatagtattggaattttatagctagttaaaacaataagtatcatctaatttgggtgtttattttgcagatgagaaaacagacctagaaccgtggcatgttttgcctgaaacatacagtgagttagagacagggcctaagatagcttctagcatcagatcaatcccaagaatccatcagcaacctcagaccaacccaagaagataatttaaatctatactgcttattggtcaatatatttggttctagtattaataaagaaaaatgttattaaaatagcatacatagtagtaaaataaaatacaaaaagtgtgttgatttatagctgtttgagatgataaaagtgaagcaaagcctgttaaatcattggaagacttggaaaattattttaaataaacaattacatgtaattaaaaa

SEQ ID NO: 302178 - DNA, 3775 bp, Homo sapiens
tctcccggccttgttgactttggcgtccgcggggagctgcccctgtgcccgtggctctctgcgcatgcccggaccccggcggctccggagtccgggaggctctggctgctccagtcgcgggtccgggccccgcctctccactcggcggtggcgtccgtgttgttattgtggtggtagcggcgtctggctgctgcggaccccgccgagtcctagcgcctggcctgcgcgccgctgcccgcgccacagccttttggaataaatcatgggattgagcttcattcagatgtggtggaatatgccaaggaaaaactggagagcttcatcaaaaatagtgatagctttgataaatttgagttctgtgaacctgcatttgttgttggtaattgcctccagatagcttctgacagtcatcagtatgatcgaatttattgtggagctggagtacagaaagaccatgaaaactacatgaaaatattactaaaagttggaggcatattagtcatgcctatagaggatcagttaacacagattatgcgaactggacagaacacttgggaaagtaaaaatatccttgctgtttcatttgctccacttgtgcaaccaagtaagaatgataatggcaaaccagattctgtgggactccctccctgtgctgtcaggaatctacaggacttggctcgtatttacattcgacgcacacttagaaatttcataaatgatgagatgcaggccaaggggattcctcaaagggctccacccaaaaggaaaagaaagagagttaaacagagaattaacacttacgtatttgtgggtaatcagcttattcctcagcctctagacagtgaagaggatgaaaaaatggaagaggataacaaagaagaggaggaaaaagatcacaatgaagcaatgaagccagaggagccacctcaaaatttactgagagaaaaaatcatgaagctgcccctccctgaatctttaaaagcttacttgacatattttagagacaaataacttagatcaagaagaaaaatgcctactgataattcctttagtcttgaaaatgtagcatttgttaggagttaaaagagagaattatttctttcatcagagcaaattatagtggaaaaaaaaatcacttgtttctgtcagtaacacaaatgatgtattcagtgaataaaagaatcccttttataaaatctatttttctttaaatcttggaaaaatgttgttttagctcagagtgatttcaaagtggaatgcaacagtagtcaagacttgtgtactataaatccttttctgattccttacagatttgtagtgatgaggtttagatttaattttatatatggtttaaataattgttaagcttatataacctgatctgaattgcagttgtttgcatttcctctatgaaaacttcatttatctaataaggaagtcaaatgctttgtagactatttaccttacttttgttgcaatcactgttgttgggttgctgtatatatattccgggcaatatatgagtgcaataacaatacaagatattgaataatttagctttaaaaaatcccacaaattttatgaaattttacagccctgctacttttgcttttgaatctcttgccaaaagacatgggtaaaatatctgcctctctcatagagattttaagagcacagcaagtgaattattaaaacaaagtctatacttaatacaactctttatatggaccctttacattttcagtatttaaaaaaataactctatagaattttaaaagtatatttagaattgttttttctgtagttcactgtataaagtatttggttttttaaaaaaagcaaaaccattgttatgtgtgactcttgataggacacagaacgagtgaatgagcatgagtgaggccactttcttggatggctgtaagtagcagggccagggtagacctgggtcagcggatgcactttagcagatggaacttctagtttatctgaatatttatctttgacaaggtagggctgagcctacatttgcttttgatctatctagtataagaaatattcacagaaattgtatgtagataccctttgttttgaaaatgctgttcagaatcatagtgtaatctttgggacctatgccatgttcatttcactccttcccatattttttgtgtttcttttggtaaaactataatggttttcattttttacttaatatcacacagttaaactgtccatatttgagctttattttagcttatcagtgataaaaaacaggtagtaactgccattgtttgtttgttttcctaataaggcctgaaaacagccattccttgttaagaaagtgtacaatgtaacatatttgctagagttacatggattatatatttcttaaagggaaaaatttgagagtatcatggactaccaccagcattattattacagtagttactcagatttggttaaggaagcccaagcaatgtatagtgaaaggattattatctctctgctaagattcagatattgtttcagaaatctcagctccagtaattccacaacatctaaaaacaaatgtttgtgatcatgtgtaagcatgaaattgttccaagtaagtgaggatattttagttatgtgaaagacagtttcatggaaggtatttgttttataccagtggctgggatggtggaattggggttatttctacaattattcttagacgattactaaactgttaagaaatgccccatatcatttttgtatctaggaaagaaaaaaatcagtttcatactgttgtcatctgtcagaaatgctcattttattttgaattaaatgtggcttttgaagtacctagttaccttgaattcctggtgaccacatgtttttatctggaaaacctggagaaagttatctgtcccatctcccctgcttgttttttttttttttttttgggttggagctgctgtttagatgatgcttttactatgcaggagagagtttttgttaaggatatatttgaagattggcttttccatattgtccttcattctttgaccgtggcaaagtgtacagtagattttcatgatcattgcatatttcttgtcattgaaatgtatcttttatgtttttaaatgcattcattttacacttgtgagtttatcattgactttaagaggtagaaatgaaaaatgaaaattaaagctaaagcctttttatctattaatgcagatatattagaataagaatattttgggtttgtgtttattttttaatgaatttatgtttacttgatatggaaaattacgctttataggtggaaaagtagcaaataaagattaagtaaaagtaagtgaaaatgatggggaatatagtattggaattttatagctagttaaaacaataagtatcatctaatttgggtgtttattttgcagatgagaaaacagacctagaaccgtggcatgttttgcctgaaacatacagtgagttagagacagggcctaagatagcttctagcatcagatcaatcccaagaatccatcagcaacctcagaccaacccaagaagataatttaaatctatactgcttattggtcaatatatttggttctagtattaataaagaaaaatgttattaaaatagcatacatagtagtaaaataaaatacaaaaagtgtgttgatttatagctgtttgagatgataaaagtgaagcaaagcctgttaaatcattggaagacttggaaaattattttaaataaacaattacatgtaattaaaaa

SEQ ID NO: 302179 - DNA, 4240 bp, Homo sapiens
  misc_feature (2534)..(2534): n is a, c, g, or t
tctcccggccttgttgactttggcgtccgcggggagctgcccctgtgcccgtggctctctgcgcatgcccggaccccggcggctccggagtccgggaggctctggctgctccagtcgcgggtccgggccccgcctctccactcggcggtggcgtccgtgttgttattgtggtggtagcggcgtctggctgctgcggaccccgccgagtcctagcgcctggcctgcgcgccgctgcccgcgccacaggattaatttatttttggaaatcaagtgcaatattggaagccatttctactaattttatttcacttttaaatttatgatttgatttgaatactatcatgggaggagctgtgagtgctggggaagataatgatgacttaattgataatttaaaagaagctcagtatattcgtactgaaagagtggagcaagccttcagagcgattgatcgtggagattactatttggaaggctacagagacaatgcttacaaagacttagcctggaagcatggaaacatccacttgtcagcaccttgcatttattctgaagttatggaagcattgaaacttcaaccaggattgtcttttcttaacctgggaagtggaaccggatatttaagtacaatggtgggcttaattttaggtccttttggaataaatcatgggattgagcttcattcagatgtggtggaatatgccaaggaaaaactggagagcttcatcaaaaatagtgatagctttgataaatttgagttctgtgaacctgcatttgttgttggtaattgcctccagatagcttctgacagtcatcagtatgatcgaatttattgtggagctggagtacagaaagaccatgaaaactacatgaaaatattactaaaagttggaggcatattagtcatgcctatagaggatcagttaacacagattatgcgaactggacagaacacttgggaaagtaaaaatatccttgctgtttcatttgctccacttgtgcaaccaagtaagaatgataatggcaaaccagattctgtgggactccctccctgtgctgtcaggaatctacaggacttggctcgtatttacattcgacgcacacttagaaatttcataaatgatgagatgcaggccaaggggattcctcaaagggctccacccaaaaggaaaagaaagagagttaaacagagaattaacacttacgtatttgtgggtaatcagcttattcctcagcctctagacagtgaagaggatgaaaaaatggaagaggataacaaagaagaggaggaaaaagatcacaatgaagcaatgaagccagaggagccacctcaaaatttactgagagaaaaaatcatgaagctgcccctccctgaatctttaaaagcttacttgacatattttagagacaaataacttagatcaagaagaaaaatgcctactgataattcctttagtcttgaaaatgtagcatttgttaggagttaaaagagagaattatttctttcatcagagcaaattatagtggaaaaaaaaatcacttgtttctgtcagtaacacaaatgatgtattcagtgaataaaagaatcccttttataaaatctatttttctttaaatcttggaaaaatgttgttttagctcagagtgatttcaaagtggaatgcaacagtagtcaagacttgtgtactataaatccttttctgattccttacagatttgtagtgatgaggtttagatttaattttatatatggtttaaataattgttaagcttatataacctgatctgaattgcagttgtttgcatttcctctatgaaaacttcatttatctaataaggaagtcaaatgctttgtagactatttaccttacttttgttgcaatcactgttgttgggttgctgtatatatattccgggcaatatatgagtgcaataacaatacaagatattgaataatttagctttaaaaaatcccacaaattttatgaaattttacagccctgctacttttgcttttgaatctcttgccaaaagacatgggtaaaatatctgcctctctcatagagattttaagagcacagcaagtgaattattaaaacaaagtctatacttaatacaactctttatatggaccctttacattttcagtatttaaaaaaataactctatagaattttaaaagtatatttagaattgttttttctgtagttcactgtataaagtatttggttttttaaaaaaagcaaaaccattgttatgtgtgactcttgataggacacagaacgagtgaatgagcatgagtgaggccactttcttggatggctgtaagtagcagggccagggtagacctgggtcagcgggatagcgattgtagcaagcatggcacactttctaagtattaatctcgaatcatttaatgctgtgtgcacaaagcgtcatgcggctagacgccgtacccatttttgcctttggtcgtatccttatcgtagcttattagatgaaatcattcctacaagcacatattagttattgtnagattacccttatgatttttggatagattgctgtctcagctcatagtgtaatctttgggacctatgccatgttcatttcactccttcccatattttttgtgtttcttttggtaaaactataatggttttcattttttacttaatatcacacagttaaactgtccatatttgagctttattttagcttatcagtgataaaaaacaggtagtaactgccattgtttgtttgttttcctaataaggcctgaaaacagccattccttgttaagaaagtgtacaatgtaacatatttgctagagttacatggattatatatttcttaaagggaaaaatttgagagtatcatggactaccaccagcattattattacagtagttactcagatttggttaaggaagcccaagcaatgtatagtgaaaggattattatctctctgctaagattcagatattgtttcagaaatctcagctccagtaattccacaacatctaaaaacaaatgtttgtgatcatgtgtaagcatgaaattgttccaagtaagtgaggatattttagttatgtgaaagacagtttcatggaaggtatttgttttataccagtggctgggatggtggaattggggttatttctacaattattcttagacgattactaaactgttaagaaatgccccatatcatttttgtatctaggaaagaaaaaaatcagtttcatactgttgtcatctgtcagaaatgctcattttattttgaattaaatgtggcttttgaagtacctagttaccttgaattcctggtgaccacatgtttttatctggaaaacctggagaaagttatctgtcccatctcccctgcttgttttttttttttttttttgggttggagctgctgtttagatgatgcttttactatgcaggagagagtttttgttaaggatatatttgaagattggcttttccatattgtccttcattctttgaccgtggcaaagtgtacagtagattttcatgatcattgcatatttcttgtcattgaaatgtatcttttatgtttttaaatgcattcattttacacttgtgagtttatcattgactttaagaggtagaaatgaaaaatgaaaattaaagctaaagcctttttatctattaatgcagatatattagaataagaatattttgggtttgtgtttattttttaatgaatttatgtttacttgatatggaaaattacgctttataggtggaaaagtagcaaataaagattaagtaaaagtaagtgaaaatgatggggaatatagtattggaattttatagctagttaaaacaataagtatcatctaatttgggtgtttattttgcagatgagaaaacagacctagaaccgtggcatgttttgcctgaaacatacagtgagttagagacagggcctaagatagcttctagcatcagatcaatcccaagaatccatcagcaacctcagaccaacccaagaagataatttaaatctatactgcttattggtcaatatatttggttctagtattaataaagaaaaatgttattaaaatagcatacatagtagtaaaataaaatacaaaaagtgtgttgatttatagctgtttgagatgataaaagtgaagcaaagcctgttaaatcattggaagacttggaaaattattttaaataaacaattacatgtaattaaaaa

SEQ ID NO: 302180 - DNA, 3660 bp, Homo sapiens
gatcacctgagcctgggtggttgaggctccagtaggccatgattgtgccatcacacttcagcctgggctgtagtgagaccttgtttcaaaacaaacaaacaaaaacttcataggggatgggatctcacatctgttgttatgaataagtagtacttttcatatgatttatacatcaaaaagtataaaagatacacaggatagtctctctcctggtcttgtctcctaattacttcacagtcatgtaccctgtttccaaattcttatgcttccagagaacttttatgcatataaatgccaacacacagacacacacacatgcccctgtacattttaacttcagtgccatccatcggtccttggcatataatgactactccaaaacctttgttagatgaaaggtagagttttcatattttctgtattttctaaaatatgctaagaaacacattttgttctatgaaaaaaataaacaatagataatgttttattgttaatattttctttcttgcgttttatgtttgtttttagctccctgtgctgtcaggaatctacaggacttggctcgtatttacattcgacgcacacttagaaatttcataaatgatgagatgcaggccaaggggattcctcaaagggctccacccaaaaggaaaagaaagagagttaaacagagaattaacacttacgtatttgtgggtaatcagcttattcctcagcctctagacagtgaagaggatgaaaaaatggaagaggataacaaagaagaggaggaaaaagatcacaatgaagcaatgaagccagaggagccacctcaaaatttactgagagaaaaaatcatgaagctgcccctccctgaatctttaaaagcttacttgacatattttagagacaaataacttagatcaagaagaaaaatgcctactgataattcctttagtcttgaaaatgtagcatttgttaggagttaaaagagagaattatttctttcatcagagcaaattatagtggaaaaaaaaatcacttgtttctgtcagtaacacaaatgatgtattcagtgaataaaagaatcccttttataaaatctatttttctttaaatcttggaaaaatgttgttttagctcagagtgatttcaaagtggaatgcaacagtagtcaagacttgtgtactataaatccttttctgattccttacagatttgtagtgatgaggtttagatttaattttatatatggtttaaataattgttaagcttatataacctgatctgaattgcagttgtttgcatttcctctatgaaaacttcatttatctaataaggaagtcaaatgctttgtagactatttaccttacttttgttgcaatcactgttgttgggttgctgtatatatattccgggcaatatatgagtgcaataacaatacaagatattgaataatttagctttaaaaaatcccacaaattttatgaaattttacagccctgctacttttgcttttgaatctcttgccaaaagacatgggtaaaatatctgcctctctcatagagattttaagagcacagcaagtgaattattaaaacaaagtctatacttaatacaactctttatatggaccctttacattttcagtatttaaaaaaataactctatagaattttaaaagtatatttagaattgttttttctgtagttcactgtataaagtatttggttttttaaaaaaagcaaaaccattgttatgtgtgactcttgataggacacagaacgagtgaatgagcatgagtgaggccactttcttggatggctgtaagtagcagggccagggtagacctgggtcagcggatgcactttagcagatggaacttctagtttatctgaatatttatctttgacaaggtagggctgagcctacatttgcttttgatctatctagtataagaaatattcacagaaattgtatgtagataccctttgttttgaaaatgctgttcagaatcatagtgtaatctttgggacctatgccatgttcatttcactccttcccatattttttgtgtttcttttggtaaaactataatggttttcattttttacttaatatcacacagttaaactgtccatatttgagctttattttagcttatcagtgataaaaaacaggtagtaactgccattgtttgtttgttttcctaataaggcctgaaaacagccattccttgttaagaaagtgtacaatgtaacatatttgctagagttacatggattatatatttcttaaagggaaaaatttgagagtatcatggactaccaccagcattattattacagtagttactcagatttggttaaggaagcccaagcaatgtatagtgaaaggattattatctctctgctaagattcagatattgtttcagaaatctcagctccagtaattccacaacatctaaaaacaaatgtttgtgatcatgtgtaagcatgaaattgttccaagtaagtgaggatattttagttatgtgaaagacagtttcatggaaggtatttgttttataccagtggctgggatggtggaattggggttatttctacaattattcttagacgattactaaactgttaagaaatgccccatatcatttttgtatctaggaaagaaaaaaatcagtttcatactgttgtcatctgtcagaaatgctcattttattttgaattaaatgtggcttttgaagtacctagttaccttgaattcctggtgaccacatgtttttatctggaaaacctggagaaagttatctgtcccatctcccctgcttgttttttttttttttttttgggttggagctgctgtttagatgatgcttttactatgcaggagagagtttttgttaaggatatatttgaagattggcttttccatattgtccttcattctttgaccgtggcaaagtgtacagtagattttcatgatcattgcatatttcttgtcattgaaatgtatcttttatgtttttaaatgcattcattttacacttgtgagtttatcattgactttaagaggtagaaatgaaaaatgaaaattaaagctaaagcctttttatctattaatgcagatatattagaataagaatattttgggtttgtgtttattttttaatgaatttatgtttacttgatatggaaaattacgctttataggtggaaaagtagcaaataaagattaagtaaaagtaagtgaaaatgatggggaatatagtattggaattttatagctagttaaaacaataagtatcatctaatttgggtgtttattttgcagatgagaaaacagacctagaaccgtggcatgttttgcctgaaacatacagtgagttagagacagggcctaagatagcttctagcatcagatcaatcccaagaatccatcagcaacctcagaccaacccaagaagataatttaaatctatactgcttattggtcaatatatttggttctagtattaataaagaaaaatgttattaaaatagcatacatagtagtaaaataaaatacaaaaagtgtgttgatttatagctgtttgagatgataaaagtgaagcaaagcctgttaaatcattggaagacttggaaaattattttaaataaacaattacatgtaattaaaaa

SEQ ID NO: 302181 - DNA, 4125 bp, Homo sapiens
tctcccggccttgttgactttggcgtccgcggggagctgcccctgtgcccgtggctctctgcgcatgcccggaccccggcggctccggagtccgggaggctctggctgctccagtcgcgggtccgggccccgcctctccactcggcggtggcgtccgtgttgttattgtggtggtagcggcgtctggctgctgcggaccccgccgagtcctagcgcctggcctgcgcgccgctgcccgcgccacaggattaatttatttttggaaatcaagtgcaatattggaagccatttctactaattttatttcacttttaaatttatgatttgatttgaatactatcatgggaggagctgtgagtgctggggaagataatgatgacttaattgataatttaaaagaagctcagtatattcgtactgaaagagtggagcaagccttcagagcgattgatcgtggagattactatttggaaggctacagagacaatgcttacaaagacttagcctggaagcatggaaacatccacttgtcagcaccttgcatttattctgaagttatggaagcattgaaacttcaaccaggattgtcttttcttaacctgggaagtggaaccggatatttaagtacaatggtgggcttaattttaggtccttttggaataaatcatgggattgagcttcattcagatgtggtggaatatgccaaggaaaaactggagagcttcatcaaaaatagtgatagctttgataaatttgagttctgtgaacctgcatttgttgttggtaattgcctccagatagcttctgacagtcatcagtatgatcgaatttattgtggagctggagtacagaaagaccatgaaaactacatgaaaatattactaaaagttggaggcatattagtcatgcctatagaggatcagttaacacagattatgcgaactggacagaacacttgggaaagtaaaaatatccttgctgtttcatttgctccacttgtgcaaccaagtaagaatgataatggcaaaccagattctgtgggactccctccctgtgctgtcaggaatctacaggacttggctcgtatttacattcgacgcacacttagaaatttcataaatgatgagatgcaggccaaggggattcctcaaagggctccacccaaaaggaaaagaaagagagttaaacagagaattaacacttacgtatttgtgggtaatcagcttattcctcagcctctagacagtgaagaggatgaaaaaatggaagaggataacaaagaagaggaggaaaaagatcacaatgaagcaatgaagccagaggagccacctcaaaatttactgagagaaaaaatcatgaagctgcccctccctgaatctttaaaagcttacttgacatattttagagacaaataacttagatcaagaagaaaaatgcctactgataattcctttagtcttgaaaatgtagcatttgttaggagttaaaagagagaattatttctttcatcagagcaaattatagtggaaaaaaaaatcacttgtttctgtcagtaacacaaatgatgtattcagtgaataaaagaatcccttttataaaatctatttttctttaaatcttggaaaaatgttgttttagctcagagtgatttcaaagtggaatgcaacagtagtcaagacttgtgtactataaatccttttctgattccttacagatttgtagtgatgaggtttagatttaattttatatatggtttaaataattgttaagcttatataacctgatctgaattgcagttgtttgcatttcctctatgaaaacttcatttatctaataaggaagtcaaatgctttgtagactatttaccttacttttgttgcaatcactgttgttgggttgctgtatatatattccgggcaatatatgagtgcaataacaatacaagatattgaataatttagctttaaaaaatcccacaaattttatgaaattttacagccctgctacttttgcttttgaatctcttgccaaaagacatgggtaaaatatctgcctctctcatagagattttaagagcacagcaagtgaattattaaaacaaagtctatacttaatacaactctttatatggaccctttacattttcagtatttaaaaaaataactctatagaattttaaaagtatatttagaattgttttttctgtagttcactgtataaagtatttggttttttaaaaaaagcaaaaccattgttatgtgtgactcttgataggacacagaacgagtgaatgagcatgagtgaggccactttcttggatggctgtaagtagcagggccagggtagacctgggtcagcggatgcactttagcagatggaacttctagtttatctgaatatttatctttgacaaggtagggctgagcctacatttgcttttgatctatctagtataagaaatattcacagaaattgtatgtagataccctttgttttgaaaatgctgttcagaatcatagtgtaatctttgggacctatgccatgttcatttcactccttcccatattttttgtgtttcttttggtaaaactataatggttttcattttttacttaatatcacacagttaaactgtccatatttgagctttattttagcttatcagtgataaaaaacaggtagtaactgccattgtttgtttgttttcctaataaggcctgaaaacagccattccttgttaagaaagtgtacaatgtaacatatttgctagagttacatggattatatatttcttaaagggaaaaatttgagagtatcatggactaccaccagcattattattacagtagttactcagatttggttaaggaagcccaagcaatgtatagtgaaaggattattatctctctgctaagattcagatattgtttcagaaatctcagctccagtaattccacaacatctaaaaacaaatgtttgtgatcatgtgtaagcatgaaattgttccaagtaagtgaggatattttagttatgtgaaagacagtttcatggaaggtatttgttttataccagtggctgggatggtggaattggggttatttctacaattattcttagacgattactaaactgttaagaaatgccccatatcatttttgtatctaggaaagaaaaaaatcagtttcatactgttgtcatctgtcagaaatgctcattttattttgaattaaatgtggcttttgaagtacctagttaccttgaattcctggtgaccacatgtttttatctggaaaacctggagaaagttatctgtcccatctcccctgcttgttttttttttttttttttgggttggagctgctgtttagatgatgcttttactatgcaggagagagtttttgttaaggatatatttgaagattggcttttccatattgtccttcattctttgaccgtggcaaagtgtacagtagattttcatgatcattgcatatttcttgtcattgaaatgtatcttttatgtttttaaatgcattcattttacacttgtgagtttatcattgactttaagaggtagaaatgaaaaatgaaaattaaagctaaagcctttttatctattaatgcagatatattagaataagaatattttgggtttgtgtttattttttaatgaatttatgtttacttgatatggaaaattacgctttataggtggaaaagtagcaaataaagattaagtaaaagtaagtgaaaatgatggggaatatagtattggaattttatagctagttaaaacaataagtatcatctaatttgggtgtttattttgcagatgagacagggcctaagatagcttctagcatcagatcaatcccaagaatccatcagcaacctcagaccaacccaagaagataatttaaatctatactgcttattggtcaatatatttggttctagtattaataaagaaaaatgttattaaaatagcatacatagtagtaaaataaaatacaaaaagtgtgttgatttatagctgtttgagatgataaaagtgaagcaaagcctgttaaatcattggaagacttggaaaattattttaaataaacaattacatgtaattaaaaa

SEQ ID NO: 302182 - DNA, 4348 bp, Homo sapiens
tctcccggccttgttgactttggcgtccgcggggagctgcccctgtgcccgtggctctctgcgcatgcccggaccccggcggctccggagtccgggaggctctggctgctccagtcgcgggtccgggccccgcctctccactcggcggtggcgtccgtgttgttattgtggtggtagcggcgtctggctgctgcggaccccgccgagtcctagcgcctggcctgcgcgccgctgcccgcgccacaggattaatttatttttggaaatcaagtgcaatattggaagccatttctactaattttatttcacttttaaatttatgatttgatttgaatactatcatgggaggagctgtgagtgctggggaagataatgatgacttaattgataatttaaaagaagctcagtatattcgtactgaaagagtggagcaagccttcagagcgattgatcgtggagattactatttggaaggctacagagacaatgcttacaaagacttagcctggaagcatggaaacatccacttgtcagcaccttgcatttattctgaagttatggaagcattgaaacttcaaccaggattgtcttttcttaacctgggaagtggaaccggatatttaagtacaatggtgggcttaattttaggtccttttggaataaatcatgggattgagcttcattcagatgtggtggaatatgccaaggaaaaactggagagcttcatcaaaaatagtgatagctttgataaatttgagttctgtgaacctgcatttgttgttggtaattgcctccagatagcttctgacagtcatcagtatgatcgaatttattgtggagctggagtacagaaagaccatgaaaactacatgaaaatattactaaaagttggaggcatattagtcatgcctatagaggatcagttaacacagattatgcgaactggacagaacacttgggaaagtaaaaatatccttgctgtttcatttgctccacttgtgcaaccaagtaagaatgataatggcaaaccagattctgtgggactccctccctgtgctgtcaggaatctacaggacttggctcgtatttacattcgacgcacacttagaaatttcataaatgatgagatgcaggccaaggggattcctcaaagggctccacccaaaaggaaaagaaagagagttaaacagagaattaacacttacgtatttgtgggtaatcagcttattcctcagcctctagacagtgaagaggatgaaaaaatggaagaggataacaaagaagaggaggaaaaagatcacaatgaagcaatgaagccagaggagccacctcaaaatttactgagagaaaaaatcatgaagctgcccctccctgaatctttaaaagcttacttgacatattttagagacaaataacttagatcaagaagaaaaatgcctactgataattcctttagtcttgaaaatgtagcatttgttaggagttaaaagagagaattatttctttcatcagagcaaattatagtggaaaaaaaaatcacttgtttctgtcagtaacacaaatgatgtattcagtgaataaaagaatcccttttataaaatctatttttctttaaatcttggaaaaatgttgttttagctcagagtgatttcaaagtggaatgcaacagtagtcaagacttgtgtactataaatccttttctgattccttacagatttgtagtgatgaggtttagatttaattttatatatggtttaaataattgttaagcttatataacctgatctgaattgcagttgtttgcatttcctctatgaaaacttcatttatctaataaggaagtcaaatgctttgtagactatttaccttacttttgttgcaatcactgttgttgggttgctgtatatatattccgggcaatatatgagtgcaataacaatacaagatattgaataatttagctttaaaaaatcccacaaattttatgaaattttacagccctgctacttttgcttttgaatctcttgccaaaagacatgggtaaaatatctgcctctctcatagagattttaagagcacagcaagtgaattattaaaacaaagtctatacttaatacaactctttatatggaccctttacattttcagtatttaaaaaaataactctatagaattttaaaagtatatttagaattgttttttctgtagttcactgtataaagtatttggttttttaaaaaaagcaaaaccattgttatgtgtgactcttgataggacacagaacgagtgaatgagcatgagtgaggccactttcttggatggctgtaagtagcagggccagggtagacctgggtcagcggatgcactttagcagatggaacttctagtttatctgaatatttatctttgacaaggtagggctgagcctacatttgcttttgatctatctagtataagaaatattcacagaaattgtatgtagataccctttgttttgaaaatgctgttcagaatcatagtgtaatctttgggacctatgccatgttcatttcactccttcccatattttttgtgtttcttttggtaaaactataatggttttcattttttacttaatatcacacagttaaactgtccatatttgagctttattttagcttatcagtgataaaaaacaggtagtaactgccattgtttgtttgttttcctaataaggcctgaaaacagccattccttgttaagaaagtgtacaatgtaacatatttgctagagttacatggattatatatttcttaaagggaaaaatttgagagtatcatggactaccaccagcattattattacagtagttactcagatttggttaaggaagcccaagcaatgtatagtgaaaggattattatctctctgctaagattcagatattgtttcagaaatctcagctccagtaattccacaacatctaaaaacaaatgtttgtgatcatgtgtaagcatgaaattgttccaagtaagtgaggatattttagttatgtgaaagacagtttcatggaaggtatttgttttataccagtggctgggatggtggaattggggttatttctacaattattcttagacgattactaaactgttaagaaatgccccatatcatttttgtatctaggaaagaaaaaaatcagtttcatactgttgtcatctgtcagaaatgctcattttattttgaattaaatgtggcttttgaagtacctagttaccttgaattcctggtgaccacatgtttttatctggaaaacctggagaaagttatctgtcccatctcccctgcttgttttttttttttttttttgggttggagctgctgtttagatgatgcttttactatgcaggagagagtttttgttaaggatatatttgaagattggcttttccatattgtccttcattctttgaccgtggcaaagtgtacagtagattttcatgatcattgcatatttcttgtcattgaaatgtatcttttatgtttttaaatgcattcattttacacttgtgagtttatcattgactttaagaggtagaaatgaaaaatgaaaattaaagctaaagcctttttatctattaatgcagatatattagaataagaatattttgggtttgtgtttattttttaatgaatttatgtttacttgatatggaaaattacgctttataggtggaaaagtagcaaataaagattaagtaaaagtaagtgaaaatgatggggaatatagtattggaattttatagctagttaaaacaataagtatcatctaatttgggtgtttattttgcagatgagaaaacagacctagaaccgtggcatgttttgcctgaaacatacagtgagttagagacagggcctaagatagcttctagcatcagatcaatcccaagaatccatcagcaacctcagaccaacccaagaagataatttaaatctatactgcttattggtcaataagatagcttctagcatcagatcaatcccaagaatccatcagcaacctcagaccaacccaagaagataatttaaatctatactgcttattggtcaataagatagcttctagcatcagatcaatcccaagaatccatcagcaacctcagaccaacccaagaagataatttaaatctatactgcttattggtcaataagatagcttctagcatcagatcaatcccaagaatccatcagcaacctcagaccaacccaagaagataatttaaatctatactgcttattggtcaataagctagcttctagcatcagatcattcgcaagaatccatcagcaacctcagacgtcgacc

SEQ ID NO: 302183 - DNA, 783 bp, Homo sapiens
tgctgggattataggcgtgagccactgtgcctggcccccctaccttcattctttgaccgtggcaaagtgtacagtagattttcatgatcattgcatatttcttgtcattgaaatgtatcttttatgtttttaaatgcattcattttacacttgtgagtttatcattgactttaagaggtagaaatgaaaaatgaaaattaaagctaaagcctttttatctattaatgcagatatattagaataagaatattttgggtttgtgtttattttttaatgaatttatgtttacttgatatggaaaattacgctttataggtggaaaagtagcaaataaagattaagtaaaagtaagtgaaaatgatggggaatatagtattggaattttatagctagttaaaacaataagtatcatctaatttgggtgtttattttgcagatgagaaaacagacctagaaccgtggcatgttttgcctgaaacatacagtgagttagagacagggcctaagatagcttctagcatcagatcaatcccaagaatccatcagcaacctcagaccaacccaagaagataatttaaatctatactgcttattggtcaatatatttggttctagtattaataaagaaaaatgttattaaaatagcatacatagtagtaaaataaaatacaaaaagtgtgttgatttatagctgtttgagatgataaaagtgaagcaaagcctgttaaatcattggaagacttggaaaattattttaaataaacaattacatgtaattaaaaa

SEQ ID NO: 302184 - DNA, 2589 bp, Homo sapiens
tctcccggccttgttgactttggcgtccgcggggagctgcccctgtgcccgtggctctctgcgcatgcccggaccccggcggctccggagtccgggaggctctggctgctccagtcgcgggtccgggccccgcctctccactcggcggtggcgtccgtgttgttattgtggtggtagcggcgtctggctgctgcggaccccgccgagtcctagcgcctggcctgcgcgccgctgcccgcgccacaggattaatttatttttggaaatcaagtgcaatattggaagccatttctactaattttatttcacttttaaatttatgatttgatttgaatactatcatgggaggagctgtgagtgctggggaagataatgatgacttaattgataatttaaaagaagctcagtatattcgtactgaaagagtggagcaagccttcagagcgattgatcgtggagattactatttggaaggctacagagacaatgcttacaaagacttagcctggaagcatggaaacatccacttgtcagcaccttgcatttattctgaagttatggaagcattgaaacttcaaccaggattgtcttttcttaacctgggaagtggaaccggatatttaagtacaatggtgggcttaattttaggtccttttggaataaatcatgggattgagcttcattcagatgtggtggaatatgccaaggaaaaactggagagcttcatcaaaaatagtgatagctttgataaatttgagttctgtgaacctgcatttgttgttggtaattgcctccagatagcttctgacagtcatcagtatgatcgaatttattgtggagctggagtacagaaagaccatgaaaactacatgaaaatattactaaaagttggaggcatattagtcatgcctatagaggatcagttaacacagattatgcgaactggacagaacacttgggaaagtaaaaatatccttgctgtttcatttgctccacttgtgcaaccaagtaagaatgataatggcaaaccagattctgtgggactccctccctgtgctgtcaggaatctacaggacttggctcgtatttacattcgacgcacacttagaaatttcataaatgatgagatgcaggccaaggggattcctcaaagggctccacccaaaaggaaaagaaagagagttaaacagagaattaacacttacgtatttgtgggtaatcagcttattcctcagcctctagacagtgaagaggatgaaaaaatggaagaggataacaaagaagaggaggaaaaagatcacaatgaagcaatgaagccagaggagccacctcaaaatttactgagagaaaaaatcatgaagctgcccctccctgaatctttaaaagcttacttgacatattttagagacaaataacttagatcaagaagaaaaatgcctactgataattcctttagtcttgaaaatgtagcatttgttaggagttaaaagagagaattatttctttcatcagagcaaattatagtggaaaaaaaaatcacttgtttctgtcagtaacacaaatgatgtattcagtgaataaaagaatcccttttataaaatctatttttctttaaatcttggaaaaatgttgttttagctcagagtgatttcaaagtggaatgcaacagtagtcaagacttgtgtactataaatccttttctgattccttacagatttgtagtgatgaggtttagatttaattttatatatggtttaaataattgttaagcttatataacctgatctgaattgcagttgtttgcatttcctctatgaaaacttcatttatctaataaggaagtcaaatgctttgtagactatttaccttacttttgttgcaatcactgttgttgggttgctgtatatatattccgggcaatatatgagtgcaataacaatacaagatattgaataatttagctttaaaaaatcccacaaattttatgaaattttacagccctgctacttttgcttttgaatctcttgccaaaagacatgggtaaaatatctgcctctctcatagagattttaagagcacagcaagtgaattattaaaacaaagtctatacttaatacaactctttatatggaccctttacattttcagtatttaaaaaaataactctatagaattttaaaagtatatttagaattgttttttctgtagttcactgtataaagtatttggttttttaaaaaaagcaaaaccattgttatgtgtgactcttgataggacacagaacgagtgaatgagcatgagtgaggccactttcttggatggctgtaagtagcagggccagggtagacctgggtcagcggatgcactttagcagatggaacttctagtttatctgaatatttatctttgacaaggtagggctgagcctacatttgcttttgatctatctagtataagaaatattcacagaaattgtatgtagataccctttgttttgaaaatgctgttcagaagggtcttcccgtgccacagacttgaattatgttggtttcggttgttttctacatagactatggtgagctcatgtag

SEQ ID NO: 302185 - DNA, 1578 bp, Homo sapiens
tctcccggccttgttgactttggcgtccgcggggagctgcccctgtgcccgtggctctctgcgcatgcccggaccccggcggctccggagtccgggaggctctggctgctccagtcgcgggtccgggccccgcctctccactcggcggtggcgtccgtgttgttattgtggtggtagcggcgtctggctgctgcggaccccgccgagtcctagcgcctggcctgcgcgccgctgcccgcgccacaggattaatttatttttggaaatcaagtgcaatattggaagccatttctactaattttatttcacttttaaatttatgatttgatttgaatactatcatgggaggagctgtgagtgctggggaagataatgatgacttaattgataatttaaaagaagctcagtatattcgtactgaaagagtggagcaagccttcagagcgattgatcgtggagattactatttggaaggctacagagacaatgcttacaaagacttagcctggaagcatggaaacatccacttgtcagcaccttgcatttattctgaagttatggaagcattgaaacttcaaccaggattgtcttttcttaacctgggaagtggaaccggatatttaagtacaatggtgggcttaattttaggtccttttggaataaatcatgggattgagcttcattcagatgtggtggaatatgccaaggaaaaactggagagcttcatcaaaaatagtgatagctttgataaatttgagttctgtgaacctgcatttgttgttggtaattgcctccagatagcttctgacagtcatcagtatgatcgaatttattgtggagctggagtacagaaagaccatgaaaactacatgaaaatattactaaaagttggaggcatattagtcatgcctatagaggatcagttaacacagattatgcgaactggacagaacacttgggaaagtaaaaatatccttgctgtttcatttgctccacttgtgcaaccaagtaagaatgataatggcaaaccagattctgtgggactccctccctgtgctgtcaggaatctacaggacttggctcgtatttacattcgacgcacacttagaaatttcataaatgatgagatgcaggccaaggggattcctcaaagggctccacccaaaaggaaaagaaagagagttaaacagagaattaacacttacgtatttgtgggtaatcagcttattcctcagcctctagacagtgaagaggatgaaaaaatggaagaggataacaaagaagaggaggaaaaagatcacaatgaagcaatgaagccagaggagccacctcaaaatttactgagagaaaaaatcatgaagctgcccctccctgaatctttaaaagcttacttgacatattttagagacaaataacttagatcaagaagaaaatggctatggaatatcctaatcctgaaatgtgcattggtgcggttcagcaaaatatcttcctcaagcatttctgggaacactgcttgcgcgcacacccaggtttctcgggaccctgcttgctaccagagagagttcccgactgccg

SEQ ID NO: 302186 - DNA, 1480 bp, Homo sapiens
tctcccggccttgttgactttggcgtccgcggggagctgcccctgtgcccgtggctctctgcgcatgcccggaccccggcggctccggagtccgggaggctctggctgctccagtcgcgggtccgggccccgcctctccactcggcggtggcgtccgtgttgttattgtggtggtagcggcgtctggctgctgcggaccccgccgagtcctagcgcctggcctgcgcgccgctgcccgcgccacaggattaatttatttttggaaatcaagtgcaatattggaagccatttctactaattttatttcacttttaaatttatgatttgatttgaatactatcatgggaggagctgtgagtgctggggaagataatgatgacttaattgataatttaaaagaagctcagtatattcgtactgaaagagtggagcaagccttcagagcgattgatcgtggagattactatttggaaggctacagagacaatgcttacaaagacttagcctggaagcatggaaacatccacttgtcagcaccttgcatttattctgaagttatggaagcattgaaacttcaaccaggattgtcttttcttaacctgggaagtggaaccggatatttaagtacaatggtgggcttaattttaggtccttttggaataaatcatgggattgagcttcattcagatgtggtggaatatgccaaggaaaaactggagagcttcatcaaaaatagtgatagctttgataaatttgagttctgtgaacctgcatttgttgttggtaattgcctccagatagcttctgacagtcatcagtatgatcgaatttattgtggagctggagtacagaaagaccatgaaaactacatgaaaatattactaaaagttggaggcatattagtcatgcctatagaggatcagttaacacagattatgcgaactggacagaacacttgggaaagtaaaaatatccttgctgtttcatttgctccacttgtgcaaccaagtaagaatgataatggcaaaccagattctgtgggactccaccttggttgaccatagaaagcggaaaccgtggaaagtgaaactgtgcataaagggagactactgtacttgaaattctacaataaggagaaaagtcatcagtaaccaacagtaacttataaaaataagtcaggaattatgtgaatttctaaaaaataaaagcttcatatagtaatattcagagcatgaaaatagttttgaaaattgatatttgccaaaatttaataggatgtatggagaataagtttttgtgggtgtgtagaagtaagttaaaatagctttctgttgagaggacattattccttaattgcaggaaattaaaatatgaaagaacgcgactccaaaaatcccaaaaataatatatatataaattatttgccaaatgtatcttgtagtaatcaagttgctcatattaaacaacttactaaagtgga

SEQ ID NO: 302187 - DNA, 1212 bp, Homo sapiens
tctcccggccttgttgactttggcgtccgcggggagctgcccctgtgcccgtggctctctgcgcatgcccggaccccggcggctccggagtccgggaggctctggctgctccagtcgcgggtccgggccccgcctctccactcggcggtggcgtccgtgttgttattgtggtggtagcggcgtctggctgctgcggaccccgccgagtcctagcgcctggcctgcgcgccgctgcccgcgccacaggattaatttatttttggaaatcaagtgcaatattggaagccatttctactaattttatttcacttttaaatttatgatttgatttgaatactatcatgggaggagctgtgagtgctggggaagataatgatgacttaattgataatttaaaagaagctcagtatattcgtactgaaagagtggagcaagccttcagagcgattgatcgtggagattactatttggaaggctacagagacaatgcttacaaagacttagcctggaagcatggaaacatccacttgtcagcaccttgcatttattctgaagttatggaagcattgaaacttcaaccaggattgtcttttcttaacctgggaagtggaaccggatatttaagtacaatggtgggcttaattttaggttattttgacctcagagtcctcaactgaaatgatggatcttgaattatttcatcttcagaactttatgtattgcgaagtactttttgcctgtggctacgttctgtaagttagctttacacaaaatactaaaggcacagtgaatttcattcaaatgcagtgtggaactctcaggtttccttggtctgcctcagtcttctactcatcagcaccacactgtcaaaatgttggacattacaaggggcgaacatagacataaataaaaaatattggtattgcatagacacttgatgcctaaacctaataatcattaacttttatgtgcaagcttgggttcttgactaattggtaaatgataaatgaaccagattagatccaattattagaaaagcactcttaagagtgcaatgaatgtgatttgaaaacttgaaagcagcctagattttactatattaggtattgttatcaatgggggtttgtcaaccttaaaaattattttttatgtaaagatacctaggaatttctaataactgtatttgttttaataaactttgactttgctgta

SEQ ID NO: 302188 - DNA, 397 bp, Homo sapiens
ctgaggctgtaggcatggcccaggattgccaagcgtagcggaagaccctacccggaccggccaagcacccctttaactggagacgaacttgataatgaccttcatacctctacagagattttttttttttttccggtctttctgagcaggtacaaagaagaaaagagaagaaaaagatggggggaaaaaatcaaaccacaatggattgttgtttcctagttgggataggagtggtaagggaaaaatgttattaaaatagcatacatagtagtaaaataaaatacaaaaagtgtgttgatttatagctgtttgagatgataaaagtgaagcaaagcctgttaaatcattggaagacttggaaaattattttaaataaacaattacatgtaattaaaaa

SEQ ID NO: 302189 - DNA, 2713 bp, Homo sapiens
  misc_feature (2)..(2): n is a, c, g, or t
angaagcagaaaaggttggataaaagataaggacagacccacgaagtcaagcatgcggagtgcagccaagccctggaacccagccatcagagcagggggccacggcccagaccgggtgcggcctctgcctgcagcctcttccggcatgaagagttctaagtcttcaacttccttggcttttgagtcccgactcagcaggctcaagagggccagcagtgaggacacgctcaacaagccaggaagtaccgctgcatcgggggtggttcgcctgaagaagaccgccactgccggagccatctcggagctcacggagagccgcctgaggagcggcacaggggcctttacaacaactaaacggacaggcattccagccccacgggaattttcagtaactgtctcaagagagaggtctgtgccacgtggtccctccaaccccaggaaatcagtgtccagtccaacttcctccaacactcccactcctacgaaacacctgaggaccccttccacaaagcccaagcaagagaatgaaggtggagaaaaggctgcgcttgagtcccaagttcgggaacttttggcagaagccaaagcaaaagatagtgaaattaacaggcttcgaagtgaactaaagaaatacaaagagaaaaggactctgaacgctgaggggactgatgctttgggcccaaatgtcgatggaacatcagtctccccaggtgacacggaacctatgataagagctcttgaggagaagaacaagaactttcagaaagagctttccgatctagaggaagaaaaccgggtcctgaaggagaaactgatctatcttgagcactccccaaattcagaaggggcagcaagtcacactggcgacagcagctgcccaacatccataactcaagagtcaagcttcggaagcccaactggaaatcagttgtccagtgacattgatgagtataaaaaaaacatacatggaaatgcattacggacatcaggctcctcaagtagcgatgttaccaaagcttctttgtcgccagatgcttccgactttgagcacattacagcagagacaccctcaaggcccctgtcctccaccagtaacccctttaagagttcaaagtgttctactgctgggagttccccaaacagcgtaagtgaattgtccctggcttccctcacagagaagatacaaaagatggaagaaaaccaccatagcactgcagaagaactacaggctactctacaagaattatcagaccagcaacaaatggtacaggaattgacagctgaaaatgagaagctggtggatgaaaagacgattttagagacatcctttcatcagcatcgagagagggcagagcagctaagtcaagaaaatgagaagctgatgaatcttttacaagagcgagtaaagaatgaagagcccaccactcaggaaggaaaaattattgaactggagcagaagtgcacaggtattcttgaacagggccgctttgaaagagagaagctactcaacattcagcagcagttgacctgtagcttgcggaaggttgaggaagaaaaccaaggagctttagaaatgattaaacgtctgaaggaagaaaatgaaaaactgaatgagtttctagaactggaacggcataataataacatgatggccaaaactttggaagagtgtagagttaccttggaagggctaaaaatggagaatggatctttgaagtctcatttgcagggtgagaagcagaaagccacagaggccagtgctgtggagcagacggcagagagctgcgaagttcaagaaatgttgaaagtagcccgagcagagaaagatctactggaactgtcttgcaatgagctcagacaagaattactaaaggcaaatggtgaaattaaacatgtttccagtctgctggccaaggtggaaaaggattattcatacctgaaggagatatgtgatcaccaagccgaacagctgagcagaaccagcctaaagctgcaagaaaaagcatcagagagtgatgcagagatcaaagacatgaaagaaaccatatttgaattggaagatcaggtggaacagcaccgggctgtcaagttacacaataatcaactcatcagtgagctagaaagtagtgtgatcaagctggaggaacagaagtcagacctggagaggcagctgaagactctgaccaagcagatgaaggaggagaccgaggaatggaggcggttccaggcggatctgcagaccgcagtggtggtggccaatgacatcaagtgtgaggcccagcaggagctgcgcaccgtgaagaggaaactgctggaggaggaggagaagaatgcccggttgcagaaggagctgggggatgtgcagggccacggcagggtggtcaccagcagagccgcccctccctccctgggctctgtcagctagcagagcatttggtggaagaaagacagcccagctcttgccatgattgggagccgcagccatctctagatgaaagggggaatgtgtagaggagaaattgcctctttataaagagcccagtttgtctccttgtgacattctctgtttctcagagtcattgccgtcgagtctctgctttttgtccacattttgggatcagcttactgcatgatcaaagatgatgtttccctctttttacttttcctcagaagattgagctgtcttttatttggagaataaaatgaagttctg

SEQ ID NO: 302190 - DNA, 1158 bp, Homo sapiens
ctataatatatgcatttattactttgataatttttttgatatagcatcatgattaagcaactttgttatgcaacagaatgtttatgccataaatcttgcaaagtatgaattacctaaatcttgacaaaggtaaacaaaaatttatctttgataggtgtcaatcagtaatgttagttttggtgcagttgcaacctgttgatttttttttttcttaaactgagatcaaatattgtacacttgacttactattcttcgctttataatagtgaataatctatatgggaatatcagttgatattctttcctggcaaaagctatatattttaaattactgattccagtctctttgtctttttaacttagaagaggaatctcttgttggcatttgaagcggctgaaagtgtaggcatcaaacccagcctggaactcagcgagatgctgtacacagaccggcccgactggcagagtgtgatgcagtacgtggcccaaatctacaagtactttgagacgtaaccctggagggcctggggcagccaccattgccacctactgcagcttttcctggaagcgcctgattactgtccactgaccctgctctgcccaccacccagctgcctagacttcaaagacaggctcaatccaagtggaccaacacccaaataagaaacagagtgggtcccacgatgtacctgtctgaaatgcaaatgcagctggactgtaaattggggactctttgatctcttgtgggatgcttctaaagagggcagcctccctccttccagaccaagaccccacacccaggcttgttttgctgattatattgggtggctgaacgaacacattatctgcagaaattcagacaaagaacatctccaaatcagtcttttggttgctgttgttaaaaatatcccggctttgcctttatgaaacctttgcccttggctgggtgtggtagctcgtggctgtaatcccagcactttaggaagccaaggcagtaggatcgtttgagcccaggagttcgaggctgcagtgagctatgagcataccactgcactccagcctgtgtgaaagagccagaccctgtctcaaaaaaatgataaaacccaaaactttgcccttgtgaaccctcccttcccccctccccccccaaaaaaaaac

SEQ ID NO: 302191 - DNA, 1269 bp, Homo sapiens
ggtgagcgtacactggatgccatgtcccttgtggacagcagtttccctggtgagtgcacattcactagaatggcagcccgcacagtggcacagcagcacggggacccgggtgtgaaatgctcagcccacgtaatggcacagcccacgtaatagcgcgtgcagtgtgctgggagtctggggaattagaggtggattcaaatgtaatttagaaacttggaaatcattttaatagtgaaattatgggtgatttttgctttttaaaacttgtttaaatgctgtcatatggttaaaagataaaagcagtgggaggtcatgttttccgtttttggaaagggacagtatctcctgaataagtgggaggaaaagtcctttaactcatcgctttcagcaccacctgtgctggccttcacgttctgtctgtgtaagtggagggtttccaggcagtgtaagccctaacctggactgaagtccttgaggggaaggggtctgtgatgtcctgccttgtgatctgtcccccattcccttcccctgcaggaactcagcgagatgctgtacacagaccggcccgactggcagagtgtgatgcagtacgtggcccaaatctacaagtactttgagacgtaaccctggagggcctggggcagccaccattgccacctactgcagcttttcctggaagcgcctgattactgtccactgaccctgctctgcccaccacccagctgcctagacttcaaagacaggctcaatccaagtggaccaacacccaaataagaaacagagtgggtcccacgatgtacctgtctgaaatgcaaatgcagctggactgtaaattggggactctttgatctcttgtgggatgcttctaaagagggcagcctccctccttccagaccaagaccccacacccaggcttgttttgctgattatattgggtggctgaacgaacacattatctgcagaaattcagacaaagaacatctccaaatcagtcttttggttgctgttgttaaaaatatcccggctttgcctttatgaaacctttgcccttggctgggtgtggtagctcgtggctgtaatcccagcactttaggaagccaaggcagtaggatcgtttgagcccaggagttcgaggctgcagtgagctatgagcataccactgcactccagcctgtgtgaaagagccagaccctgtctcaaaaaaatgataaaacccaaaactttgcccttgtgaaccctcccttcccccctccccccccaaaaaaaaac

SEQ ID NO: 302192 - DNA, 3754 bp, Homo sapiens
ggaactgcaaggcgcccggtcctttctttgactggagcggacccgccggacgcaaccgcctcgccagccggagccagcgcgagctcggcacggtggacacccggtccgaggccggcaagccggctggtgcccgagtcggccaagcatgggcaaccactcaggacggcccgaggatccggaaccaggggcctttacaacaactaaacggacaggcattccagccccacgggaattttcagtaactgtctcaagagagaggtctgtgccacgtggtccctccaaccccaggaaatcagtgtccagtccaacttcctccaacactcccactcctacgaaacacctgaggaccccttccacaaagcccaagcaagagaatgaaggtggagaaaaggctgcgcttgagtcccaagttcgggaacttttggcagaagccaaagcaaaagatagtgaaattaacaggcttcgaagtgaactaaagaaatacaaagagaaaaggactctgaacgctgaggggactgatgctttgggcccaaatgtcgatggaacatcagtctccccaggtgacacggaacctatgataagagctcttgaggagaagaacaagaactttcagaaagagctttccgatctagaggaagaaaaccgggtcctgaaggagaaactgatctatcttgagcactccccaaattcagaaggggcagcaagtcacactggcgacagcagctgcccaacatccataactcaagagtcaagcttcggaagcccaactggaaatcagttgtccagtgacattgatgagtataaaaaaaacatacatggaaatgcattacggacatcaggctcctcaagtagcgatgttaccaaagcttctttgtcgccagatgcttccgactttgagcacattacagcagagacaccctcaaggcccctgtcctccaccagtaacccctttaagagttcaaagtgttctactgctgggagttccccaaacagcgtaagtgaattgtccctggcttccctcacagagaagatacaaaagatggaagaaaaccaccatagcactgcagaagaactacaggctactctacaagaattatcagaccagcaacaaatggtacaggaattgacagctgaaaatgagaagctggtggatgaaaagacgattttagagacatcctttcatcagcatcgagagagggcagagcagctaagtcaagaaaatgagaagctgatgaatcttttacaagagcgagtaaagaatgaagagcccaccactcaggaaggaaaaattattgaactggagcagaagtgcacaggtattcttgaacagggccgctttgaaagagagaagctactcaacattcagcagcagttgacctgtagcttgcggaaggttgaggaagaaaaccaaggagctttagaaatgattaaacgtctgaaggaagaaaatgaaaaactgaatgagtttctagaactggaacggcataataataacatgatggccaaaactttggaagagtgtagagttaccttggaagggctaaaaatggagaatggatctttgaagtctcatttgcagggtgagaagcagaaagccacagaggccagtgctgtggagcagacggcagagagctgcgaagttcaagaaatgttgaaagtagcccgagcagagaaagatctactggaactgtcttgcaatgagctcagacaagaattactaaaggcaaatggtgaaattaaacatgtttccagtctgctggccaaggtggaaaaggattattcatacctgaaggagatatgtgatcaccaagccgaacagctgagcagaaccagcctaaagctgcaagaaaaagcatcagagagtgatgcagagatcaaagacatgaaagaaaccatatttgaattggaagatcaggtggaacagcaccgggctgtcaagttacacaataatcaactcatcagtgagctagaaagtagtgtgatcaagctggaggaacagaagtcagacctggagaggcagctgaagactctgaccaagcagatgaaggaggagaccgaggaatggaggcggttccaggcggatctgcagaccgcagtggtggtggccaatgacatcaagtgtgaggcccagcaggagctgcgcaccgtgaagaggaaactgctggaggaggaggagaagaatgcccggttgcagaaggagctgggggatgtgcagggccacggcagggtggtcaccagcagagccgcccctccacctgtggatgaagagccagagtcctctgaggtcgatgctgctggtcggtggcctggtgtctgtgttagcagaacatctccaacacccccagagtcggcaaccaccgttaagtcacttatcaagtcatttgacttgggacgcccaggtggagctggacagaatatttctgtccataagacccccagaagtcccctaagtgggataccagtgaggactgctccagcagctgctgtctctccaatgcagaggcattcgacttacagcagtgtgcggccagccagcagaggggtgactcaacgcttggaccttcctgaccttcccctctcagatattctaaagggaaggactgagaccctgaagccagacccccacctccgcaagagtccctcactagagtcactgagcagacccccgtctctgggctttggggacacaagactgctgagtgcttccacccgggcatggaaaccacaaagcaaactcagtgtggaaagaaaagaccctctggcggccttggcccgggaatacggtggttccaagcgcaatgctctactgaaatggtgccagaagaagacacaaggttatgcgaacattgacatcaccaatttcagcagcagctggagcgatggcctggccttctgtgctctgctccacacctacctgcctgcccacatcccctaccaggagctgaatagtcaggagaaaaagaggaatctcttgttggcatttgaagcggctgaaagtgtaggcatcaaacccagcctggaactcagcgagatgctgtacacagaccggcccgactggcagagtgtgatgcagtacgtggcccaaatctacaagtactttgagacgtaaccctggagggcctggggcagccaccattgccacctactgcagcttttcctggaagcgcctgattactgtccactgaccctgctctgcccaccacccagctgcctagacttcaaagacaggctcaatccaagtggaccaacacccaaataagaaacagagtgggtcccacgatgtacctgtctgaaatgcaaatgcagctggactgtaaattggggactctttgatctcttgtgggatgcttctaaagagggcagcctccctccttccagaccaagaccccacacccaggcttgttttgctgattatattgggtggctgaacgaacacattatctgcagaaattcagacaaagaacatctccaaatcagtcttttggttgctgttgttaaaaatatcccggctttgcctttatgaaacctttgcccttggctgggtgtggtagctcgtggctgtaatcccagcactttaggaagccaaggcagtaggatcgtttgagcccaggagttcgaggctgcagtgagctatgagcataccactgcactccagcctgtgtgaaagagccagaccctgtctcaaaaaaatgataaaacccaaaactttgcccttgtgaaccctcccttcccccctccccccccaaaaaaaaac

SEQ ID NO: 302193 - DNA, 3090 bp, Homo sapiens
ggaactgcaaggcgcccggtcctttctttgactggagcggacccgccggacgcaaccgcctcgccagccggagccagcgcgagctcggcacggtggacacccggtccgaggccggcaagccggctggtgcccgagtcggccaagcatgggcaaccactcaggacggcccgaggatccggaaccaggggcctttacaacaactaaacggacaggcattccagccccacgggaattttcagtaactgtctcaagagagaggtctgtgccacgtggtccctccaaccccaggaaatcagtgtccagtccaacttcctccaacactcccactcctacgaaacacctgaggaccccttccacaaagcccaagcaagagaatgaaggtggagaaaaggctgcgcttgagtcccaagttcgggaacttttggcagaagccaaagcaaaagatagtgaaattaacaggcttcgaagtgaactaaagaaatacaaagagaaaaggactctgaacgctgaggggactgatgctttgggcccaaatgtcgatggaacatcagtctccccaggtgacacggaacctatgataagagctcttgaggagaagaacaagaactttcagaaagagctttccgatctagaggaagaaaaccgggtcctgaaggagaaactgatctatcttgagcactccccaaattcagaaggggcagcaagtcacactggcgacagcagctgcccaacatccataactcaagagtcaagcttcggaagcccaactggaaatcagttgtccagtgacattgatgagtataaaaaaaacatacatggaaatgcattacggacatcaggctcctcaagtagcgatgttaccaaagcttctttgtcgccagatgcttccgactttgagcacattacagcagagacaccctcaaggcccctgtcctccaccagtaacccctttaagagttcaaagtgttctactgctgggagttccccaaacagcgtaagtgaattgtccctggcttccctcacagagaagatacaaaagatggaagaaaaccaccatagcactgcagaagaactacaggctactctacaagaattatcagaccagcaacaaatggtacaggaattgacagctgaaaatgagaagctggtggatgaaaagacgattttagagacatcctttcatcagcatcgagagagggcagagcagctaagtcaagaaaatgagaagctgatgaatcttttacaagagcgagtaaagaatgaagagcccaccactcaggaaggaaaaattattgaactggagcagaagtgcacaggtattcttgaacagggccgctttgaaagagagaagctactcaacattcagcagcagttgacctgtagcttgcggaaggttgaggaagaaaaccaaggagctttagaaatgattaaacgtctgaaggaagaaaatgaaaaactgaatgagtttctagaactggaacggcataataataacatgatggccaaaactttggaagagtgtagagttaccttggaagggctaaaaatggagaatggatctttgaagtctcatttgcagggtgagaagcagaaagccacagaggccagtgctgtggagcagacggcagagagctgcgaagttcaagaaatgttgaaagtagcccgagcagagaaagatctactggaactgtcttgcaatgagctcagacaagaattactaaaggcaaatggtgaaattaaacatgtttccagtctgctggccaaggtggaaaaggattattcatacctgaaggagatatgtgatcaccaagccgaacagctgagcagaaccagcctaaagctgcaagaaaaagcatcagagagtgatgcagagatcaaagacatgaaagaaaccatatttgaattggaagatcaggtggaacagcaccgggctgtcaagttacacaataatcaactcatcagtgagctagaaagtagtgtgatcaagctggaggaacagaagtcagacctggagaggcagctgaagactctgaccaagcagatgaaggaggagaccgaggaatggaggcggttccaggcggatctgcagaccgcagtggtggtggccaatgacatcaagtgtgaggcccagcaggagctgcgcaccgtgaagaggaaactgctggaggaggaggagaagaatgcccggttgcagaaggagctgggggatgtgcagggccacggcagggtggtcaccagcagagccgcccctccacctgtggatgaagagccagagtcctctgaggtcgatgctgctggtcggtggcctggtgtctgtgttagcagaacatctccaacacccccagagtcggcaaccaccgttaagtcacttatcaagtcatttgacttgggacgcccaggtggagctggacagaatatttctgtccataagacccccagaagtcccctaagtgggataccagtgaggactgctccagcagctgctgtctctccaatgcagaggcattcgacttacagcagtgtgcggccagccagcagaggggtgactcaacgcttggaccttcctgaccttcccctctcagatattctaaagggaaggactgagaccctgaagccagacccccacctccgcaagagtccctcactagagtcactgagcagacccccgtctctgggctttggggacacaagactgctgagtgcttccacccgggcatggaaaccacaaagcaaactcagtgtggaaagaaaagaccctctggcggccttggcccgggaatacggtggttccaagcgcaatgctctactgaaatggtgccagaagaagacacaaggttatgcgaacattgacatcaccaatttcagcagcagctggagcgatggcctggccttctgtgctctgctccacacctacctgcctgcccacatcccctaccaggagctgaatagtcaggagaaaaagaggaatctcttgttggcatttgaagcggctgaaagtgtaggcatcaaacccagcctggaactcagcgagatgctgtacacagaccggcgtcgacgcggccgcgaatttagtagtaaaaccgggaattc

SEQ ID NO: 302194 - DNA, 3637 bp, Homo sapiens
ggaactgcaaggcgcccggtcctttctttgactggagcggacccgccggacgcaaccgcctcgccagccggagccagcgcgagctcggcacggtggacacccggtccgaggccggcaagccggctggtgcccgagtcggccaagcatgggcaaccactcaggacggcccgaggatccggaaccaggggcctttacaacaactaaacggacaggcattccagccccacgggaattttcagtaactgtctcaagagagaggtctgtgccacgtggtccctccaaccccaggaaatcagtgtccagtccaacttcctccaacactcccactcctacgaaacacctgaggaccccttccacaaagcccaagcaagagaatgaaggtggagaaaaggctgcgcttgagtcccaagttcgggaacttttggcagaagccaaagcaaaagatagtgaaattaacaggcttcgaagtgaactaaagaaatacaaagagaaaaggactctgaacgctgaggggactgatgctttgggcccaaatgtcgatggaacatcagtctccccaggtgacacggaacctatgataagagctcttgaggagaagaacaagaactttcagaaagagctttccgatctagaggaagaaaaccgggtcctgaaggagaaactgatctatcttgagcactccccaaattcagaaggggcagcaagtcacactggcgacagcagctgcccaacatccataactcaagagtcaagcttcggaagcccaactggaaatcagttgtccagtgacattgatgagtataaaaaaaacatacatggaaatgcattacggacatcaggctcctcaagtagcgatgttaccaaagcttctttgtcgccagatgcttccgactttgagcacattacagcagagacaccctcaaggcccctgtcctccaccagtaacccctttaagagttcaaagtgttctactgctgggagttccccaaacagcgtaagtgaattgtccctggcttccctcacagagaagatacaaaagatggaagaaaaccaccatagcactgcagaagaactacaggctactctacaagaattatcagaccagcaacaaatggtacaggaattgacagctgaaaatgagaagctggtggatgaaaagacgattttagagacatcctttcatcagcatcgagagagggcagagcagctaagtcaagaaaatgagaagctgatgaatcttttacaagagcgagtaaagaatgaagagcccaccactcaggaaggaaaaattattgaactggagcagaagtgcacaggtattcttgaacagggccgctttgaaagagagaagctactcaacattcagcagcagttgacctgtagcttgcggaaggttgaggaagaaaaccaaggagctttagaaatgattaaacgtctgaaggaagaaaatgaaaaactgaatgagtttctagaactggaacggcataataataacatgatggccaaaactttggaagagtgtagagttaccttggaagggctaaaaatggagaatggatctttgaagtctcatttgcagggtgagaagcagaaagccacagaggccagtgctgtggagcagacggcagagagctgcgaagttcaagaaatgttgaaagtagcccgagcagagaaagatctactggaactgtcttgcaatgagctcagacaagaattactaaaggcaaatggtgaaattaaacatgtttccagtctgctggccaaggtggaaaaggattattcatacctgaaggagatatgtgatcaccaagccgaacagctgagcagaaccagcctaaagctgcaagaaaaagcatcagagagtgatgcagagatcaaagacatgaaagaaaccatatttgaattggaagatcaggtggaacagcaccgggctgtcaagttacacaataatcaactcatcagtgagctagaaagtagtgtgatcaagctggaggaacagaagtcagacctggagaggcagctgaagactctgaccaagcagatgaaggaggagaccgaggaatggaggcggttccaggcggatctgcagaccgcagtggtggtggccaatgacatcaagtgtgaggcccagcaggagctgcgcaccgtgaagaggaaactgctggaggaggaggagaagaatgcccggttgcagaaggagctgggggatgtgcagggccacggcagggtggtcaccagcagagccgcccctccacctgtggatgaagagccagagtcctctgaggtcgatgctgctggtcggtggcctggtgtctgtgttagcagaacatctccaacacccccagagtcggcaaccaccgttaagtcacttatcaagtcatttgacttgggacgcccaggtggagctggacagaatatttctgtccataagacccccagaagtcccctaagtgggataccagtgaggactgctccagcagctgctgtctctccaatgcagaggcattcgacttacagcagtgtgcggccagccagcagaggggtgactcaacgcttggaccttcctgaccttcccctctcagatattctaaagggaaggactgagaccctgaagccagacccccacctccgcaagagtccctcactagagtcactgagcagacccccgtctctgggctttggggacacaagactgctgagtgcttccacccgggcatggaaaccacaaagcaaactcagtgtggaaagaaaagaccctctggcggccttggcccgggaatacggtggttccaagcgcaatgctctactgaaatggtgccagaagaagacacaaggttatgcgaagaggaatctcttgttggcatttgaagcggctgaaagtgtaggcatcaaacccagcctggaactcagcgagatgctgtacacagaccggcccgactggcagagtgtgatgcagtacgtggcccaaatctacaagtactttgagacgtaaccctggagggcctggggcagccaccattgccacctactgcagcttttcctggaagcgcctgattactgtccactgaccctgctctgcccaccacccagctgcctagacttcaaagacaggctcaatccaagtggaccaacacccaaataagaaacagagtgggtcccacgatgtacctgtctgaaatgcaaatgcagctggactgtaaattggggactctttgatctcttgtgggatgcttctaaagagggcagcctccctccttccagaccaagaccccacacccaggcttgttttgctgattatattgggtggctgaacgaacacattatctgcagaaattcagacaaagaacatctccaaatcagtcttttggttgctgttgttaaaaatatcccggctttgcctttatgaaacctttgcccttggctgggtgtggtagctcgtggctgtaatcccagcactttaggaagccaaggcagtaggatcgtttgagcccaggagttcgaggctgcagtgagctatgagcataccactgcactccagcctgtgtgaaagagccagaccctgtctcaaaaaaatgataaaacccaaaactttgcccttgtgaaccctcccttcccccctccccccccaaaaaaaaac

SEQ ID NO: 302195 - DNA, 3944 bp, Homo sapiens
cagaatagagtggctgacttgctgattgaggtcggcagctcccgagaagcaggagaagcagagtttttgcagacagacccacgaagtcaagcatgcggagtgcagccaagccctggaacccagccatcagagcagggggccacggcccagaccgggtgcggcctctgcctgcagcctcttccggcatgaagagttctaagtcttcaacttccttggcttttgagtcccgactcagcaggctcaagagggccagcagtgaggacacgctcaacaagccaggaagtaccgctgcatcgggggtggttcgcctgaagaagaccgccactgccggagccatctcggagctcacggagagccgcctgaggagcggcacaggggcctttacaacaactaaacggacaggcattccagccccacgggaattttcagtaactgtctcaagagagaggtctgtgccacgtggtccctccaaccccaggaaatcagtgtccagtccaacttcctccaacactcccactcctacgaaacacctgaggaccccttccacaaagcccaagcaagagaatgaaggtggagaaaaggctgcgcttgagtcccaagttcgggaacttttggcagaagccaaagcaaaagatagtgaaattaacaggcttcgaagtgaactaaagaaatacaaagagaaaaggactctgaacgctgaggggactgatgctttgggcccaaatgtcgatggaacatcagtctccccaggtgacacggaacctatgataagagctcttgaggagaagaacaagaactttcagaaagagctttccgatctagaggaagaaaaccgggtcctgaaggagaaactgatctatcttgagcactccccaaattcagaaggggcagcaagtcacactggcgacagcagctgcccaacatccataactcaagagtcaagcttcggaagcccaactggaaatcagttgtccagtgacattgatgagtataaaaaaaacatacatggaaatgcattacggacatcaggctcctcaagtagcgatgttaccaaagcttctttgtcgccagatgcttccgactttgagcacattacagcagagacaccctcaaggcccctgtcctccaccagtaacccctttaagagttcaaagtgttctactgctgggagttccccaaacagcgtaagtgaattgtccctggcttccctcacagagaagatacaaaagatggaagaaaaccaccatagcactgcagaagaactacaggctactctacaagaattatcagaccagcaacaaatggtacaggaattgacagctgaaaatgagaagctggtggatgaaaagacgattttagagacatcctttcatcagcatcgagagagggcagagcagctaagtcaagaaaatgagaagctgatgaatcttttacaagagcgagtaaagaatgaagagcccaccactcaggaaggaaaaattattgaactggagcagaagtgcacaggtattcttgaacagggccgctttgaaagagagaagctactcaacattcagcagcagttgacctgtagcttgcggaaggttgaggaagaaaaccaaggagctttagaaatgattaaacgtctgaaggaagaaaatgaaaaactgaatgagtttctagaactggaacggcataataataacatgatggccaaaactttggaagagtgtagagttaccttggaagggctaaaaatggagaatggatctttgaagtctcatttgcagggtgagaagcagaaagccacagaggccagtgctgtggagcagacggcagagagctgcgaagttcaagaaatgttgaaagtagcccgagcagagaaagatctactggaactgtcttgcaatgagctcagacaagaattactaaaggcaaatggtgaaattaaacatgtttccagtctgctggccaaggtggaaaaggattattcatacctgaaggagatatgtgatcaccaagccgaacagctgagcagaaccagcctaaagctgcaagaaaaagcatcagagagtgatgcagagatcaaagacatgaaagaaaccatatttgaattggaagatcaggtggaacagcaccgggctgtcaagttacacaataatcaactcatcagtgagctagaaagtagtgtgatcaagctggaggaacagaagtcagacctggagaggcagctgaagactctgaccaagcagatgaaggaggagaccgaggaatggaggcggttccaggcggatctgcagaccgcagtggtggtggccaatgacatcaagtgtgaggcccagcaggagctgcgcaccgtgaagaggaaactgctggaggaggaggagaagaatgcccggttgcagaaggagctgggggatgtgcagggccacggcagggtggtcaccagcagagccgcccctccacctgtggatgaagagccagagtcctctgaggtcgatgctgctggtcggtggcctggtgtctgtgttagcagaacatctccaacacccccagagtcggcaaccaccgttaagtcacttatcaagtcatttgacttgggacgcccaggtggagctggacagaatatttctgtccataagacccccagaagtcccctaagtgggataccagtgaggactgctccagcagctgctgtctctccaatgcagaggcattcgacttacagcagtgtgcggccagccagcagaggggtgactcaacgcttggaccttcctgaccttcccctctcagatattctaaagggaaggactgagaccctgaagccagacccccacctccgcaagagtccctcactagagtcactgagcagacccccgtctctgggctttggggacacaagactgctgagtgcttccacccgggcatggaaaccacaaagcaaactcagtgtggaaagaaaagaccctctggcggccttggcccgggaatacggtggttccaagcgcaatgctctactgaaatggtgccagaagaagacacaaggttatgcgaacattgacatcaccaatttcagcagcagctggagcgatggcctggccttctgtgctctgctccacacctacctgcctgcccacatcccctaccaggagctgaatagtcaggagaaaaagaggaatctcttgttggcatttgaagcggctgaaagtgtaggcatcaaacccagcctggaactcagcgagatgctgtacacagaccggcccgactggcagagtgtgatgcagtacgtggcccaaatctacaagtactttgagacgtaaccctggagggcctggggcagccaccattgccacctactgcagcttttcctggaagcgcctgattactgtccactgaccctgctctgcccaccacccagctgcctagacttcaaagacaggctcaatccaagtggaccaacacccaaataagaaacagagtgggtcccacgatgtacctgtctgaaatgcaaatgcagctggactgtaaattggggactctttgatctcttgtgggatgcttctaaagagggcagcctccctccttccagaccaagaccccacacccaggcttgttttgctgattatattgggtggctgaacgaacacattatctgcagaaattcagacaaagaacatctccaaatcagtcttttggttgctgttgttaaaaatatcccggctttgcctttatgaaacctttgcccttggctgggtgtggtagctcgtggctgtaatcccagcactttaggaagccaaggcagtaggatcgtttgagcccaggagttcgaggctgcagtgagctatgagcataccactgcactccagcctgtgtgaaagagccagaccctgtctcaaaaaaatgataaaacccaaaactttgcccttgtgaaccctcccttcccccctccccccccaaaaaaaaac

SEQ ID NO: 302196 - DNA, 3643 bp, Homo sapiens
atggcatgtagtgaggacaagaattactaaaggcaaatggtgaaattaaacatgtttccagtctgctggccaaggggcctttacaacaactaaacggacaggcattccagccccacgggaattttcagtaactgtctcaagagagaggtctgtgccacgtggtccctccaaccccaggaaatcagtgtccagtccaacttcctccaacactcccactcctacgaaacacctgaggaccccttccacaaagcccaagcaagagaatgaaggtggagaaaaggctgcgcttgagtcccaagttcgggaacttttggcagaagccaaagcaaaagatagtgaaattaacaggcttcgaagtgaactaaagaaatacaaagagaaaaggactctgaacgctgaggggactgatgctttgggcccaaatgtcgatggaacatcagtctccccaggtgacacggaacctatgataagagctcttgaggagaagaacaagaactttcagaaagagctttccgatctagaggaagaaaaccgggtcctgaaggagaaactgatctatcttgagcactccccaaattcagaaggggcagcaagtcacactggcgacagcagctgcccaacatccataactcaagagtcaagcttcggaagcccaactggaaatcagttgtccagtgacattgatgagtataaaaaaaacatacatggaaatgcattacggacatcaggctcctcaagtagcgatgttaccaaagcttctttgtcgccagatgcttccgactttgagcacattacagcagagacaccctcaaggcccctgtcctccaccagtaacccctttaagagttcaaagtgttctactgctgggagttccccaaacagcgtaagtgaattgtccctggcttccctcacagagaagatacaaaagatggaagaaaaccaccatagcactgcagaagaactacaggctactctacaagaattatcagaccagcaacaaatggtacaggaattgacagctgaaaatgagaagctggtggatgaaaagacgattttagagacatcctttcatcagcatcgagagagggcagagcagctaagtcaagaaaatgagaagctgatgaatcttttacaagagcgagtaaagaatgaagagcccaccactcaggaaggaaaaattattgaactggagcagaagtgcacaggtattcttgaacagggccgctttgaaagagagaagctactcaacattcagcagcagttgacctgtagcttgcggaaggttgaggaagaaaaccaaggagctttagaaatgattaaacgtctgaaggaagaaaatgaaaaactgaatgagtttctagaactggaacggcataataataacatgatggccaaaactttggaagagtgtagagttaccttggaagggctaaaaatggagaatggatctttgaagtctcatttgcagggtgagaagcagaaagccacagaggccagtgctgtggagcagacggcagagagctgcgaagttcaagaaatgttgaaagtagcccgagcagagaaagatctactggaactgtcttgcaatgagctcagacaagaattactaaaggcaaatggtgaaattaaacatgtttccagtctgctggccaaggtggaaaaggattattcatacctgaaggagatatgtgatcaccaagccgaacagctgagcagaaccagcctaaagctgcaagaaaaagcatcagagagtgatgcagagatcaaagacatgaaagaaaccatatttgaattggaagatcaggtggaacagcaccgggctgtcaagttacacaataatcaactcatcagtgagctagaaagtagtgtgatcaagctggaggaacagaagtcagacctggagaggcagctgaagactctgaccaagcagatgaaggaggagaccgaggaatggaggcggttccaggcggatctgcagaccgcagtggtggtggccaatgacatcaagtgtgaggcccagcaggagctgcgcaccgtgaagaggaaactgctggaggaggaggagaagaatgcccggttgcagaaggagctgggggatgtgcagggccacggcagggtggtcaccagcagagccgcccctccacctgtggatgaagagccagagtcctctgaggtcgatgctgctggtcggtggcctggtgtctgtgttagcagaacatctccaacacccccagagtcggcaaccaccgttaagtcacttatcaagtcatttgacttgggacgcccaggtggagctggacagaatatttctgtccataagacccccagaagtcccctaagtgggataccagtgaggactgctccagcagctgctgtctctccaatgcagaggcattcgacttacagcagtgtgcggccagccagcagaggggtgactcaacgcttggaccttcctgaccttcccctctcagatattctaaagggaaggactgagaccctgaagccagacccccacctccgcaagagtccctcactagagtcactgagcagacccccgtctctgggctttggggacacaagactgctgagtgcttccacccgggcatggaaaccacaaagcaaactcagtgtggaaagaaaagaccctctggcggccttggcccgggaatacggtggttccaagcgcaatgctctactgaaatggtgccagaagaagacacaaggttatgcgaacattgacatcaccaatttcagcagcagctggagcgatggcctggccttctgtgctctgctccacacctacctgcctgcccacatcccctaccaggagctgaatagtcaggagaaaaagaggaatctcttgttggcatttgaagcggctgaaagtgtaggcatcaaacccagcctggaactcagcgagatgctgtacacagaccggcccgactggcagagtgtgatgcagtacgtggcccaaatctacaagtactttgagacgtaaccctggagggcctggggcagccaccattgccacctactgcagcttttcctggaagcgcctgattactgtccactgaccctgctctgcccaccacccagctgcctagacttcaaagacaggctcaatccaagtggaccaacacccaaataagaaacagagtgggtcccacgatgtacctgtctgaaatgcaaatgcagctggactgtaaattggggactctttgatctcttgtgggatgcttctaaagagggcagcctccctccttccagaccaagaccccacacccaggcttgttttgctgattatattgggtggctgaacgaacacattatctgcagaaattcagacaaagaacatctccaaatcagtcttttggttgctgttgttaaaaatatcccggctttgcctttatgaaacctttgcccttggctgggtgtggtagctcgtggctgtaatcccagcactttaggaagccaaggcagtaggatcgtttgagcccaggagttcgaggctgcagtgagctatgagcataccactgcactccagcctgtgtgaaagagccagaccctgtctcaaaaaaatgataaaacccaaaactttgcccttgtgaaccctcccttcccccctccccccccaaaaaaaaac

SEQ ID NO: 302197 - DNA, 2863 bp, Homo sapiens
ggaactgcaaggcgcccggtcctttctttgactggagcggacccgccggacgcaaccgcctcgccagccggagccagcgcgagctcggcacggtggacacccggtccgaggccggcaagccggctggtgcccgagtcggccaagcatgggcaaccactcaggacggcccgaggatccggaaccaggggcctttacaacaactaaacggacaggcattccagccccacgggaattttcagtaactgtctcaagagagaggtctgtgccacgtggtccctccaaccccaggaaatcagtgtccagtccaacttcctccaacactcccactcctacgaaacacctgaggaccccttccacaaagcccaagcaagagaatgaaggtggagaaaaggctgcgcttgagtcccaagttcgggaacttttggcagaagccaaagcaaaagatagtgaaattaacaggcttcgaagtgaactaaagaaatacaaagagaaaaggactctgaacgctgaggggactgatgctttgggcccaaatgtcgatggaacatcagtctccccaggtgacacggaacctatgataagagctcttgaggagaagaacaagaactttcagaaagagctttccgatctagaggaagaaaaccgggtcctgaaggagaaactgatctatcttgagcactccccaaattcagaaggggcagcaagtcacactggcgacagcagctgcccaacatccataactcaagagtcaagcttcggaagcccaactggaaatcagttgtccagtgacattgatgagtataaaaaaaacatacatggaaatgcattacggacatcaggctcctcaagtagcgatgttaccaaagcttctttgtcgccagatgcttccgactttgagcacattacagcagagacaccctcaaggcccctgtcctccaccagtaacccctttaagagttcaaagtgttctactgctgggagttccccaaacagcgtaagtgaattgtccctggcttccctcacagagaagatacaaaagatggaagaaaaccaccatagcactgcagaagaactacaggctactctacaagaattatcagaccagcaacaaatggtacaggaattgacagctgaaaatgagaagctggtggatgaaaagacgattttagagacatcctttcatcagcatcgagagagggcagagcagctaagtcaagaaaatgagaagctgatgaatcttttacaagagcgagtaaagaatgaagagcccaccactcaggaaggaaaaattattgaactggagcagaagtgcacaggtattcttgaacagggccgctttgaaagagagaagctactcaacattcagcagcagttgacctgtagcttgcggaaggttgaggaagaaaaccaaggagctttagaaatgattaaacgtctgaaggaagaaaatgaaaaactgaatgagtttctagaactggaacggcataataataacatgatggccaaaactttggaagagtgtagagttaccttggaagggctaaaaatggagaatggatctttgaagtctcatttgcagggtgagaagcagaaagccacagaggccagtgctgtggagcagacggcagagagctgcgaagttcaagaaatgttgaaagtagcccgagcagagaaagatctactggaactgtcttgcaatgagctcagacaagaattactaaaggcaaatggtgaaattaaacatgtttccagtctgctggccaaggtggaaaaggattattcatacctgaaggagatatgtgatcaccaagccgaacagctgagcagaaccagcctaaagctgcaagaaaaagcatcagagagtgatgcagagatcaaagacatgaaagaaaccatatttgaattggaagatcaggtggaacagcaccgggctgtcaagttacacaataatcaactcatcagtgagctagaaagtagtgtgatcaagctggaggaacagaagtcagacctggagaggcagctgaagactctgaccaagcagatgaaggaggagaccgaggaatggaggcggttccaggcggatctgcagaccgcagtggtggtggccaatgacatcaagtgtgaggcccagcaggagctgcgcaccgtgaagaggaaactgctggaggaggaggagaagaatgcccggttgcagaaggagctgggggatgtgcagggccacggcagggtggtcaccagcagagccgcccctccctccctgggctctgtcagctagcagagcatttggtggaagaaagacagcccagctcttgccatgattgggagccgcagccatctctagatgaaagggggaatgtgtagaggagaaattgcctctttataaagagcccagtttgtctccttgtgacattctctgtttctcagagtcattgccgtcgagtctctgctttttgtccacattttgggatcagcttactgcatgatcaaagatgatgtttccctctttttacttttcctcagaagattgagctgtcttttatttggagaataaaatgaagttctgaaaaaaacaaagtacaagtcttatgaaaagttatttgcagctggagtgctgaaaagggcacagtggcagagcagatgcagagctgggtacagcgcaggcccgagttcttttgttttttgttgttgttgttgttgttgttttgttttgttttttttttttttttgagacagagtttcactcttgttgcccaggctggagtgcaatggtacgatctcggctcactgcaacctctgcctcccgggttcaagtgattctcttgcctcagccttccaagtagctggaattacaggcgcctgccac

SEQ ID NO: 302198 - DNA, 2843 bp, Homo sapiens
ctcggggttgtcaagttacacaataatcaactcatcagtgagctagaaaggggtgtgatcatgctgggagttccccaaacagcgtaagtgaattgtccctggcttccctcacagagaagatacaaaagatggaagaaaaccaccatagcactgcagaagaactacaggctactctacaagaattatcagaccagcaacaaatggtacaggaattgacagctgaaaatgagaagctggtggatgaaaagacgattttagagacatcctttcatcagcatcgagagagggcagagcagctaagtcaagaaaatgagaagctgatgaatcttttacaagagcgagtaaagaatgaagagcccaccactcaggaaggaaaaattattgaactggagcagaagtgcacaggtattcttgaacagggccgctttgaaagagagaagctactcaacattcagcagcagttgacctgtagcttgcggaaggttgaggaagaaaaccaaggagctttagaaatgattaaacgtctgaaggaagaaaatgaaaaactgaatgagtttctagaactggaacggcataataataacatgatggccaaaactttggaagagtgtagagttaccttggaagggctaaaaatggagaatggatctttgaagtctcatttgcagggtgagaagcagaaagccacagaggccagtgctgtggagcagacggcagagagctgcgaagttcaagaaatgttgaaagtagcccgagcagagaaagatctactggaactgtcttgcaatgagctcagacaagaattactaaaggcaaatggtgaaattaaacatgtttccagtctgctggccaaggtggaaaaggattattcatacctgaaggagatatgtgatcaccaagccgaacagctgagcagaaccagcctaaagctgcaagaaaaagcatcagagagtgatgcagagatcaaagacatgaaagaaaccatatttgaattggaagatcaggtggaacagcaccgggctgtcaagttacacaataatcaactcatcagtgagctagaaagtagtgtgatcaagctggaggaacagaagtcagacctggagaggcagctgaagactctgaccaagcagatgaaggaggagaccgaggaatggaggcggttccaggcggatctgcagaccgcagtggtggtggccaatgacatcaagtgtgaggcccagcaggagctgcgcaccgtgaagaggaaactgctggaggaggaggagaagaatgcccggttgcagaaggagctgggggatgtgcagggccacggcagggtggtcaccagcagagccgcccctccacctgtggatgaagagccagagtcctctgaggtcgatgctgctggtcggtggcctggtgtctgtgttagcagaacatctccaacacccccagagtcggcaaccaccgttaagtcacttatcaagtcatttgacttgggacgcccaggtggagctggacagaatatttctgtccataagacccccagaagtcccctaagtgggataccagtgaggactgctccagcagctgctgtctctccaatgcagaggcattcgacttacagcagtgtgcggccagccagcagaggggtgactcaacgcttggaccttcctgaccttcccctctcagatattctaaagggaaggactgagaccctgaagccagacccccacctccgcaagagtccctcactagagtcactgagcagacccccgtctctgggctttggggacacaagactgctgagtgcttccacccgggcatggaaaccacaaagcaaactcagtgtggaaagaaaagaccctctggcggccttggcccgggaatacggtggttccaagcgcaatgctctactgaaatggtgccagaagaagacacaaggttatgcgaacattgacatcaccaatttcagcagcagctggagcgatggcctggccttctgtgctctgctccacacctacctgcctgcccacatcccctaccaggagctgaatagtcaggagaaaaagaggaatctcttgttggcatttgaagcggctgaaagtgtaggcatcaaacccagcctggaactcagcgagatgctgtacacagaccggcccgactggcagagtgtgatgcagtacgtggcccaaatctacaagtactttgagacgtaaccctggagggcctggggcagccaccattgccacctactgcagcttttcctggaagcgcctgattactgtccactgaccctgctctgcccaccacccagctgcctagacttcaaagacaggctcaatccaagtggaccaacacccaaataagaaacagagtgggtcccacgatgtacctgtctgaaatgcaaatgcagctggactgtaaattggggactctttgatctcttgtgggatgcttctaaagagggcagcctccctccttccagaccaagaccccacacccaggcttgttttgctgattatattgggtggctgaacgaacacattatctgcagaaattcagacaaagaacatctccaaatcagtcttttggttgctgttgttaaaaatatcccggctttgcctttatgaaacctttgcccttggctgggtgtggtagctcgtggctgtaatcccagcactttaggaagccaaggcagtaggatcgtttgagcccaggagttcgaggctgcagtgagctatgagcataccactgcactccagcctgtgtgaaagagccagaccctgtctcaaaaaaatgataaaacccaaaactttgcccttgtgaaccctcccttcccccctccccccccaaaaaaaaac

SEQ ID NO: 302199 - DNA, 2174 bp, Homo sapiens
ggaactgcaaggcgcccggtcctttctttgactggagcggacccgccggacgcaaccgcctcgccagccggagccagcgcgagctcggcacggtggacacccggtccgaggccggcaagccggctggtgcccgagtcggccaagcatgggcaaccactcaggacggcccgaggatccggaaccaggtggaaaaggattattcatacctgaaggagatatgtgatcaccaagccgaacagctgagcagaaccagcctaaagctgcaagaaaaagcatcagagagtgatgcagagatcaaagacatgaaagaaaccatatttgaattggaagatcaggtggaacagcaccgggctgtcaagttacacaataatcaactcatcagtgagctagaaagtagtgtgatcaagctggaggaacagaagtcagacctggagaggcagctgaagactctgaccaagcagatgaaggaggagaccgaggaatggaggcggttccaggcggatctgcagaccgcagtggtggtggccaatgacatcaagtgtgaggcccagcaggagctgcgcaccgtgaagaggaaactgctggaggaggaggagaagaatgcccggttgcagaaggagctgggggatgtgcagggccacggcagggtggtcaccagcagagccgcccctccacctgtggatgaagagccagagtcctctgaggtcgatgctgctggtcggtggcctggtgtctgtgttagcagaacatctccaacacccccagagtcggcaaccaccgttaagtcacttatcaagtcatttgacttgggacgcccaggtggagctggacagaatatttctgtccataagacccccagaagtcccctaagtgggataccagtgaggactgctccagcagctgctgtctctccaatgcagaggcattcgacttacagcagtgtgcggccagccagcagaggggtgactcaacgcttggaccttcctgaccttcccctctcagatattctaaagggaaggactgagaccctgaagccagacccccacctccgcaagagtccctcactagagtcactgagcagacccccgtctctgggctttggggacacaagactgctgagtgcttccacccgggcatggaaaccacaaagcaaactcagtgtggaaagaaaagaccctctggcggccttggcccgggaatacggtggttccaagcgcaatgctctactgaaatggtgccagaagaagacacaaggttatgcgaacattgacatcaccaatttcagcagcagctggagcgatggcctggccttctgtgctctgctccacacctacctgcctgcccacatcccctaccaggagctgaatagtcaggagaaaaagaggaatctcttgttggcatttgaagcggctgaaagtgtaggcatcaaacccagcctggaactcagcgagatgctgtacacagaccggcccgactggcagagtgtgatgcagtacgtggcccaaatctacaagtactttgagacgtaaccctggagggcctggggcagccaccattgccacctactgcagcttttcctggaagcgcctgattactgtccactgaccctgctctgcccaccacccagctgcctagacttcaaagacaggctcaatccaagtggaccaacacccaaataagaaacagagtgggtcccacgatgtacctgtctgaaatgcaaatgcagctggactgtaaattggggactctttgatctcttgtgggatgcttctaaagagggcagcctccctccttccagaccaagaccccacacccaggcttgttttgctgattatattgggtggctgaacgaacacattatctgcagaaattcagacaaagaacatctccaaatcagtcttttggttgctgttgttaaaaatatcccggctttgcctttatgaaacctttgcccttggctgggtgtggtagctcgtggctgtaatcccagcactttaggaagccaaggcagtaggatcgtttgagcccaggagttcgaggctgcagtgagctatgagcataccactgcactccagcctgtgtgaaagagccagaccctgtctcaaaaaaatgataaaacccaaaactttgcccttgtgaaccctcccttcccccctccccccccaaaaaaaaac

SEQ ID NO: 302200 - DNA, 1180 bp, Homo sapiens
cgcgggtccctctcctgagcatcagtgagcgcccggagccgtggccgctgggggttgcggcggcgctgagccagcggggccggtggaaaaggattattcatacctgaaggagatatgtgatcaccaagccgaacagctgagcagaaccagcctaaagctgcaagaaaaagcatcagagagtgatgcagagatcaaagacatgaaagaaaccatatttgaattggaagatcaggtggaacagcaccgggctgtcaagttacacaataatcaactcatcagtgagctagaaagtagtgtgatcaagctggaggaacagaagtcagacctggagaggcagctgaagactctgaccaagcagatgaaggaggagaccgaggaatggaggcggttccaggcggatctgcagaccgcagtggtggtggccaatgacatcaagtgtgaggcccagcaggagctgcgcaccgtgaagaggaaactgctggaggaggaggagaagaatgcccggttgcagaaggagctgggggatgtgcagggccacggcagggtggtcaccagcagagccgcccctccctccctgggctctgtcagctagcagagcatttggtggaagaaagacagcccagctcttgccatgattgggagccgcagccatctctagatgaaagggggaatgtgtagaggagaaattgcctctttataaagagcccagtttgtctccttgtgacattctctgtttctcagagtcattgccgtcgagtctctgctttttgtccacattttgggatcagcttactgcatgatcaaagatgatgtttccctctttttacttttcctcagaagattgagctgtcttttatttggagaataaaatgaagttctgaaaaaaacaaagtacaagtcttatgaaaagttatttgcagctggagtgctgaaaagggcacagtggcagagcagatgcagagctgggtacagcgcaggcccgagttcttttgttttttgttgttgttgttgttgttgttttgttttgttttttttttttttttgagacagagtttcactcttgttgcccaggctggagtgcaatggtacgatctcggctcactgcaacctctgcctcccgggttcaagtgattctcttgcctcagccttccaagtagctggaattacaggcgcctgccac

SEQ ID NO: 302201 - DNA, 427 bp, Homo sapiens
tagcttttccctgtgggacagtgtaagctggaaattcttgcgtttgtgaactaagactgtattgccttaggtaactcctttacagcctctccctcccgtttctattttcacagctccctgggctctgtcagctagcagagcatttggtggaagaaagacagcccagctcttgccatgattgggagccgcagccatctctagatgaaagggggaatgtgtagaggagaaattgcctctttataaagagcccagtttgtctccttgtgacattctctgtttctcagagtcattgccgtcgagtctctgctttttgtccacattttgggatcagcttactgcatgatcaaagatgatgtttccctctttttacttttcctcagaagattgagctgtcttttatttggagaataaaatgaagttctgaaaa

SEQ ID NO: 302202 - DNA, 441 bp, Homo sapiens
tccaactctccatcaaagtcatgaatcctgtttacaacaacctgatgagatgtcaactacttttcacgtgaacacacccaggaattaggaaggcattccctaaccggcagctcttatctctcccaatcacgatttgagcttcaccaaataactcaaacccctgtttcctcacatattaaaggggagtaaatatctgctttacagaacattgttgggagaataaaaggagatagaggaatataaatggcctaatccacttacagaggagggtgtgcaatgttagtcccctttttgcctccttttatgggacagcacattccatttttggatcgtcatcacctagagaaaggtcttccttaatactgaattgtctttgtatccttttagcacctttcttaagtttaaccctaagtggtctcatagaatgtcatttttccgtcc

SEQ ID NO: 302203 - DNA, 4632 bp, Homo sapiens
gcgctctcgggcactatgtgcttccggtctccaataccgcaggagggcggtcttccccggctcgccaactcggctgctctgggggattcgtgcgcggtaagaagctgcgcggtagcgcggtgaggtgaggttctcagccaccaaagctgcagggtctcgtcgttcgttccctctggcctggcggaacttgcgtgggaagctgggaggacagaaggcttagccgctgggtccctgagctggctggagcgcgggctgtctaggggcggcgacctcagctgttgggctccggctgctgggggctgtgcgtccagccgccctggaatccgcctgtgggtgggccgcttggctctcccacttcaccctcttgataacccagagcctcccccttcccacgtacgtaggggaaggataatctacttccttttgaacagcttcggtccccactatgacagtcgcataaacttcagcgaagagtgcgctggtaaagtggcatggagtttctcacaccaattcattgggtccacccttcagcttctgtggaaggggtctttctgttactaggagctgagacttggggggttgccagggatgctggtcttaaaaggtgataatttaggccgggcgcggtggctcacgcctgtaatcccagcactttgggaggtcgaggcgggcagatctcctgagctcaggagttcgagaccaccctgggcaacatggtgaaaccccttctctactaaaatacaaaaaattagctgggcgtggtggcacgcgcctgtaatcccagctattcgggaggctgaggcccgagaatcgcttgagccctggcggcagaggttgcagtgagccaagatcgcccactgcactccaggttgggctacagagtgagactccgtctcaacaacgaccacaacaacaacaaaaaaggtggtggcttaatacagccatgctccccttaagaactggtatagttatgagaaatggttgggccgtttcgtggttgtgtgaacatcatagtgtacttgcacaaacctacacagctgggccgtatgggatagcctgttactcctagtctacagacctgtacagtataactactaaatactgtaggcagttgtaaaaggatggtgtgtatctaaacacagaaaagatactgtaaaaatatagtgtaaaagaaaacatggtacagctgaatagggcacttacgcatggagcttgcagggctgtcggtagctattaagtgagtcagtgagtggtatgtgagtgtgaaggcctacgatattatttagggtattactgtacactactgtagactttataaatgcggtatgcttagtctaagtttattaaaaataaggtaataaccttagcttactgtgcttttttaactttataaacttttaaattaattttaactccttgacctttttttttttttttgagacggagtttattctctctgtctctcatttttgagacagagttttgctcttgtcacccaggctggagtgcagtggcgcaatctcagctcactgcaacgtccacctcttgagttcaagcgattctcctgcctcagcttcccaggtggtgcgcgcctgtagctgggactacaagagtgcgccaccacgcccagctaatttttgtatttttagtagagatggggtttgaccatgttggccaggatggtctcgatatcctgaccttgtgatccacctggccttggcctcccaaagtgctgggattacaggcgtgagccaccatacccggcccactcttttgtaataacacttagcttaaaatgctaatgtgttgtatagctatataaaaatattttctttattcccttacattattctatagctttttcctgtaaaaattttttttgttgttataaactaagacacacacattgtgcctacaccgggtcaggagcatcaatatcactcttttcttcctccacatcttgtcctactggaaggttttcaggggcagtaacatgaatggagctgtcatctcctataataactgcttttttctggaatacttataattgtctagtattatgtacagtacatcattgtaagcattatgcttgtatatgactggcatcccaggtttgtttacaccagcattaccacagacatgagtaatgtgttacactacaagttatgagggctacaaagtcaataggaatttttcagctccattataatcatctgagaccagtatcatgtgtgcagtcgctgttgacctaaatgttatgtagcatgtgactagctgatgaatctttgattatggctgaatgttctcattcattgcaggaaaaaaatatcctccaaatcactaggtagtatgtaagtgaccaaaacttttttccattttatgttggagccaaatcattagtgttaggataaattacttctttatgtatgtgctctaaaatgaaaagttatttctgaatattaaagcatatgtattaagagtataaaaacaagatacagattttggtgtgaaatatatcttatgattcaagtcataatttaaatagaattgaagatgatgtgaaatcactgggctggaagtagcttataccttgattagtaagaggaagcccgggatcatcctgtgatggtaaacacttttatatgttttacttataactttgccaggaaatttcaacaaacttcatattaaaggacatgatttctgtatacttagtaatctgctatgcaaattgttgcattgaaatggcagacgaagcaagaagattgggagaaagtagctgtgggacttggagataggaaaataaacagccgggaaaactgcagaatgtgggaggaataattgcattcattgtattactatctgatttatattttatgaaataatttggtttcttaagatagtttttcaattttaagcacaccttttttaactggtgtggcagcttttctggtaagtggtagatttatgttagaagcatgtctatgcagcatattatagcattaaatatgtatacagatatctaactgaaataaaaagtgttttaataattaaaagtttaacatatgggcatatgtgacatatagtgatatagcatgtctctttagttttgttgtttttgttgttgatggctaaccacccatgcttgtcttaaaaattgataaggtaccactgatgaaattatgaccaggtgggcccgagttagtaccacatataacaagagacccttgcctgcaacatcatgggaggacatgaagaagggatcctttgagggaacaagccaaaacctaccaaagcgtaaacaacttgaagccaataggctatccctcaaaaatgatgcaccccaagcaaaacataaaaagaacaaaaagaaaaaagagtacttaaatgaagatgtgaatggattcatggaatacctaagacagaattcacagatggttcacaatgggcaaattatagcaacagacagtgaggaagtaagggaagaaattgcagttgctttaaagaaagacagtcgacgggaaggaagaagattaaaaagacaagcggcaaagaaaaatgcaatggtgtgtttccattgtagaaaacctggtcatggaattgcagattgccccgccgcccttgaaaatcaagacatgggcactgggatatgttacaggtgtgggtccacagagcacgaaataaccaagtgtaaggctaaagtagacccggctcttggcgaatttccttttgcaaaatgttttgtttgtggagaaatggggcacctgtctagatcttgtcctgataatcccaaaggactctatgctgatggtggcggttgcaaactttgtggctctgtggaacatttaaagaaagattgccctgaaagtcagaattcagagcgaatggtcacagttggtcgctgggcaaagggaatgagtgcagactatgaagaaattttggatgtacctaaaccgcaaaaacccaaaacaaaaatacctaaagttgttaatttttgataacagctagcactatcatgagttactacctcattgttactttctaaaccaggcccgcttcacgagttagagttgagctcccctgtagccaggactatgctgtagatatcagtatgatctgggtgtggccaaaaacaattttctttattctgtctatcaaatagtacttctaccactgtttggagaaaattgaagaaaagaataagatgattaaatgaattctctaaaagaacatattttaagagacagaacttagacataaccaagtagttgtatacctgattgtaacaatcatcttttataaaagcaaaattatgcataaatgtaaaacacccctaaacaaagggaacaaatgaatttttggttatattgttttcttggctcaaagtatcaatttattattataatagaaatttataagttgctagaaagtctatatttttaaagtacggaataaaaatatgttttctattaagcaatagaaatatttttgtgtataatttttctgaatacttgattctcgattgaaatatccattgttcgttaatatccatgtaacaatcccattggaaacaagattttttttgaatcctagatgagaataaacagggatttggtttttgttttagttttg

SEQ ID NO: 302204 - DNA, 1433 bp, Homo sapiens
gcgctctcgggcactatgtgcttccggtctccaataccgcaggagggcggtcttccccggctcgccaactcggctgctctgggggattcgtgcgcggtaagaagctgcgcggtagcgcggtgaggtaccactgatgaaattatgaccaggtgggcccgagttagtaccacatataacaagagacccttgcctgcaacatcatgggaggacatgaagaagggatcctttgagggaacaagccaaaacctaccaaagcgtaaacaacttgaagccaataggctatccctcaaaaatgatgcaccccaagcaaaacataaaaagaacaaaaagaaaaaagagtacttaaatgaagatgtgaatggattcatggaatacctaagacagaattcacagatggttcacaatgggcaaattatagcaacagacagtgaggaagtaagggaagaaattgcagttgctttaaagaaagacagtcgacgggaaggaagaagattaaaaagacaagcggcaaagaaaaatgcaatggtgtgtttccattgtagaaaacctggtcatggaattgcagattgccccgccgcccttgaaaatcaagacatgggcactgggatatgttacaggtgtgggtccacagagcacgaaataaccaagtgtaaggctaaagtagacccggctcttggcgaatttccttttgcaaaatgttttgtttgtggagaaatggggcacctgtctagatcttgtcctgataatcccaaaggactctatgctgatggtggcggttgcaaactttgtggctctgtggaacatttaaagaaagattgccctgaaagtcagaattcagagcgaatggtcacagttggtcgctgggcaaagggaatgagtgcagactatgaagaaattttggatgtacctaaaccgcaaaaacccaaaacaaaaatacctaaagttgttaatttttgataacagctagcactatcatgagttactacctcattgttactttctaaaccaggcccgcttcacgagttagagttgagctcccctgtagccaggactatgctgtagatatcagtatgatctgggtgtggccaaaaacaattttctttattctgtctatcaaatagtacttctaccactgtttggagaaaattgaagaaaagaataagatgattaaatgaattctctaaaagaacatattttaagagacagaacttagacataaccaagtagttgtatacctgattgtaacaatcatcttttataaaagcaaaattatgcataaatgtaaaacacccctaaacaaagggaacaaatgaatttttggttatattgttttcttggctcaaagtatcaatttattattataatagaaatttataagttgctagaaagtctatatttttaaagtacggaataaaaatatgttttctattaag

SEQ ID NO: 302205 - DNA, 2049 bp, Homo sapiens
gcgctctcgggcactatgtgcttccggtctccaataccgcaggagggcggtcttccccggctcgccaactcggctgctctgggggattcgtgcgcggtaagaagctgcgcggtagcgcggtgaggtaccactgatgaaattatgaccaggtgggcccgagttagtaccacatataacaagagacccttgcctgcaacatcatgggaggacatgaagaagggatcctttgagggaacaagccaaaacctaccaaagcgtaaacaacttgaagccaataggctatccctcaaaaatgatgcaccccaagcaaaacataaaaagaacaaaaagaaaaaagagtacttaaatgaagatgtgaatggattcatggaatacctaagacagaattcacagatggttcacaatgggcaaattatagcaacagacagtgaggaagtaagggaagaaattgcagttgctttaaagaaagacagtcgacgggaaggaagaagattaaaaagacaagcggcaaagaaaaatgcaatggtgtgtttccattgtagaaaacctggtcatggaattgcagattgccccgccgcccttgaaaatcaagacatgggcactgggatatgttacaggtgtgggtccacagagcacgaaataaccaagtgtaaggctaaagtagacccggctcttggcgaatttccttttgcaaaatgttttgtttgtggagaaatggggcacctgtctagatcttgtcctgataatcccaaaggactctatgctgatggtggcggttgcaaactttgtggctctgtggaacatttaaagaaagattgccctgaaagtcagaattcagagcgaatggtcacagttggtcgctgggcaaagggaatgagtgcagactatgaagaaattttggatgtacctaaaccgcaaaaacccaaaacaaaaatacctaaagttgttaatttttgataacagctagcactatcatgagttactacctcattgttactttctaaaccaggcccgcttcacgagttagagttgagctcccctgtagccaggactatgctgtagatatcagtatgatctgggtgtggccaaaaacaattttctttattctgtctatcaaatagtacttctaccactgtttggagaaaattgaagaaaagaataagatgattaaatgaattctctaaaagaacatattttaagagacagaacttagacataaccaagtagttgtatacctgattgtaacaatcatcttttataaaagcaaaattatgcataaatgtaaaacacccctaaacaaagggaacaaatgaatttttggttatattgttttcttggctcaaagtatcaatttattattataatagaaatttataagttgctagaaagtctatatttttaaagtacggaataaaaatatgttttctattaagcaatagaaatatttttgtgtataatttttctgaatacttgattctcgattgaaatatccattgttcgttaatatccatgtaacaatcccattggaaacaagattttttttgaatcctagatgagaataaacagggatttggtttttgttttagttttgacataaaggattccaagttactgaagttaaaattgaaatatctcagtttaacagcagctcttttttgcccttgattttcaagagagaacttctagccaaaattcagtttttgttacttaaccagaatgatggcagataacagatggtataataaacttaatagcattttgttctcatgttttagatgagtcagagtaagatggaagtatcaccataatagagttagaacactaatcagagacccattagcttctttgtttgatttgatgaattcatgcatacttaatacatatatttcacaaggcttaacactaccattgtactgtataatggaatgactctagtggttttgtgtttcatttgaaattttacctgattgaatccatttgtaactaaaggaaacagctgtgattagttactgatgcctcaaaagcaaaatatttaccaaataagaaaag

SEQ ID NO: 302206 - DNA, 2021 bp, Homo sapiens
gcgctctcgggcactatgtgcttccggtctccaataccgcaggagggcggtcttccccggctcgccaactcggctgctctgggggattcgtgcgcggtaccactgatgaaattatgaccaggtgggcccgagttagtaccacatataacaagagacccttgcctgcaacatcatgggaggacatgaagaagggatcctttgagggaacaagccaaaacctaccaaagcgtaaacaacttgaagccaataggctatccctcaaaaatgatgcaccccaagcaaaacataaaaagaacaaaaagaaaaaagagtacttaaatgaagatgtgaatggattcatggaatacctaagacagaattcacagatggttcacaatgggcaaattatagcaacagacagtgaggaagtaagggaagaaattgcagttgctttaaagaaagacagtcgacgggaaggaagaagattaaaaagacaagcggcaaagaaaaatgcaatggtgtgtttccattgtagaaaacctggtcatggaattgcagattgccccgccgcccttgaaaatcaagacatgggcactgggatatgttacaggtgtgggtccacagagcacgaaataaccaagtgtaaggctaaagtagacccggctcttggcgaatttccttttgcaaaatgttttgtttgtggagaaatggggcacctgtctagatcttgtcctgataatcccaaaggactctatgctgatggtggcggttgcaaactttgtggctctgtggaacatttaaagaaagattgccctgaaagtcagaattcagagcgaatggtcacagttggtcgctgggcaaagggaatgagtgcagactatgaagaaattttggatgtacctaaaccgcaaaaacccaaaacaaaaatacctaaagttgttaatttttgataacagctagcactatcatgagttactacctcattgttactttctaaaccaggcccgcttcacgagttagagttgagctcccctgtagccaggactatgctgtagatatcagtatgatctgggtgtggccaaaaacaattttctttattctgtctatcaaatagtacttctaccactgtttggagaaaattgaagaaaagaataagatgattaaatgaattctctaaaagaacatattttaagagacagaacttagacataaccaagtagttgtatacctgattgtaacaatcatcttttataaaagcaaaattatgcataaatgtaaaacacccctaaacaaagggaacaaatgaatttttggttatattgttttcttggctcaaagtatcaatttattattataatagaaatttataagttgctagaaagtctatatttttaaagtacggaataaaaatatgttttctattaagcaatagaaatatttttgtgtataatttttctgaatacttgattctcgattgaaatatccattgttcgttaatatccatgtaacaatcccattggaaacaagattttttttgaatcctagatgagaataaacagggatttggtttttgttttagttttgacataaaggattccaagttactgaagttaaaattgaaatatctcagtttaacagcagctcttttttgcccttgattttcaagagagaacttctagccaaaattcagtttttgttacttaaccagaatgatggcagataacagatggtataataaacttaatagcattttgttctcatgttttagatgagtcagagtaagatggaagtatcaccataatagagttagaacactaatcagagacccattagcttctttgtttgatttgatgaattcatgcatacttaatacatatatttcacaaggcttaacactaccattgtactgtataatggaatgactctagtggttttgtgtttcatttgaaattttacctgattgaatccatttgtaactaaaggaaacagctgtgattagttactgatgcctcaaaagcaaaatatttaccaaataagaaaag

SEQ ID NO: 302207 - DNA, 2406 bp, Homo sapiens
gcgctctcgggcactatgtgcttccggtctccaataccgcaggagggcggtcttccccggctcgccaactcggctgctctgggggattcgtgcgcggtaagaagctgcgcggtagcgcggtgaggtgaggttctcagccaccaaagctgcagggtctcgtcgttcgttccctctggcctggcggaacttgcgtgggaagctgggaggacagaaggcttagccgctgggtccctgagctggctggagcgcgggctgtctaggggcggcgacctcagctgttgggctccggctgctgggggctgtgcgtccagccgccctggaatccgcctgtgggtgggccgcttggctctcccacttcaccctcttgataacccagagcctcccccttcccacgtacgtaggggaaggataatctacttccttttgaacagcttcggtccccactatgacagtcgcataaacttcagcgaagagtgcgctggtaccactgatgaaattatgaccaggtgggcccgagttagtaccacatataacaagagacccttgcctgcaacatcatgggaggacatgaagaagggatcctttgagggaacaagccaaaacctaccaaagcgtaaacaacttgaagccaataggctatccctcaaaaatgatgcaccccaagcaaaacataaaaagaacaaaaagaaaaaagagtacttaaatgaagatgtgaatggattcatggaatacctaagacagaattcacagatggttcacaatgggcaaattatagcaacagacagtgaggaagtaagggaagaaattgcagttgctttaaagaaagacagtcgacgggaaggaagaagattaaaaagacaagcggcaaagaaaaatgcaatggtgtgtttccattgtagaaaacctggtcatggaattgcagattgccccgccgcccttgaaaatcaagacatgggcactgggatatgttacaggtgtgggtccacagagcacgaaataaccaagtgtaaggctaaagtagacccggctcttggcgaatttccttttgcaaaatgttttgtttgtggagaaatggggcacctgtctagatcttgtcctgataatcccaaaggactctatgctgatggtggcggttgcaaactttgtggctctgtggaacatttaaagaaagattgccctgaaagtcagaattcagagcgaatggtcacagttggtcgctgggcaaagggaatgagtgcagactatgaagaaattttggatgtacctaaaccgcaaaaacccaaaacaaaaatacctaaagttgttaatttttgataacagctagcactatcatgagttactacctcattgttactttctaaaccaggcccgcttcacgagttagagttgagctcccctgtagccaggactatgctgtagatatcagtatgatctgggtgtggccaaaaacaattttctttattctgtctatcaaatagtacttctaccactgtttggagaaaattgaagaaaagaataagatgattaaatgaattctctaaaagaacatattttaagagacagaacttagacataaccaagtagttgtatacctgattgtaacaatcatcttttataaaagcaaaattatgcataaatgtaaaacacccctaaacaaagggaacaaatgaatttttggttatattgttttcttggctcaaagtatcaatttattattataatagaaatttataagttgctagaaagtctatatttttaaagtacggaataaaaatatgttttctattaagcaatagaaatatttttgtgtataatttttctgaatacttgattctcgattgaaatatccattgttcgttaatatccatgtaacaatcccattggaaacaagattttttttgaatcctagatgagaataaacagggatttggtttttgttttagttttgacataaaggattccaagttactgaagttaaaattgaaatatctcagtttaacagcagctcttttttgcccttgattttcaagagagaacttctagccaaaattcagtttttgttacttaaccagaatgatggcagataacagatggtataataaacttaatagcattttgttctcatgttttagatgagtcagagtaagatggaagtatcaccataatagagttagaacactaatcagagacccattagcttctttgtttgatttgatgaattcatgcatacttaatacatatatttcacaaggcttaacactaccattgtactgtataatggaatgactctagtggttttgtgtttcatttgaaattttacctgattgaatccatttgtaactaaaggaaacagctgtgattagttactgatgcctcaaaagcaaaatatttaccaaataagaaaag

SEQ ID NO: 302208 - DNA, 2283 bp, Homo sapiens
gcgctctcgggcactatgtgcttccggtctccaataccgcaggagggcggtcttccccggctcgccaactcggctgctctgggggattcgtgcgcggtaagaagctgcgcggtagcgcggtgaggtaccactgatgaaattatgaccaggtgggcccgagttagtaccacatataacaagagacccttgcctgcaacatcatgggaggacatgaagaagggatcctttgagggaacaagccaaaacctaccaaagcgtaaacaacttgaagccaataggctatccctcaaaaatgatgcaccccaagcaaaacataaaaagaacaaaaagaaaaaagagtacttaaatgaagatgtgaatggattcatggaatacctaagacagaattcacagatggttcacaatgggcaaattatagcaacagacagtgaggaagtaagggaagaaattgcagttgctttaaagaaagacagtcgacgggaaggaagaagattaaaaagacaagcggcaaagaaaaatgcaatggtgtgtttccattgtagaaaacctggtcatggaattgcagattgccccgccgcccttgaaaatcaagacatgggcactgggatatgttacaggtgtgggtccacagagcacgaaataaccaagtgtaaggctaaagtagacccggctcttggtatgtgtttctttcagttttttgttttgttcatggggaaagccaataaatagcaccttgggtatttttttaacacaatttgttacgagtgtgccacttagtatttggaaatcatatgagattaaattttaagttatgtaaatatattttttattcagagtattttaaaataatgttaattttatgacttgccatatgtattgtcaactgaataggaactgttgatttttacaggcgaatttccttttgcaaaatgttttgtttgtggagaaatggggcacctgtctagatcttgtcctgataatcccaaaggactctatgctgatggtggcggttgcaaactttgtggctctgtggaacatttaaagaaagattgccctgaaagtcagaattcagagcgaatggtcacagttggtcgctgggcaaagggaatgagtgcagactatgaagaaattttggatgtacctaaaccgcaaaaacccaaaacaaaaatacctaaagttgttaatttttgataacagctagcactatcatgagttactacctcattgttactttctaaaccaggcccgcttcacgagttagagttgagctcccctgtagccaggactatgctgtagatatcagtatgatctgggtgtggccaaaaacaattttctttattctgtctatcaaatagtacttctaccactgtttggagaaaattgaagaaaagaataagatgattaaatgaattctctaaaagaacatattttaagagacagaacttagacataaccaagtagttgtatacctgattgtaacaatcatcttttataaaagcaaaattatgcataaatgtaaaacacccctaaacaaagggaacaaatgaatttttggttatattgttttcttggctcaaagtatcaatttattattataatagaaatttataagttgctagaaagtctatatttttaaagtacggaataaaaatatgttttctattaagcaatagaaatatttttgtgtataatttttctgaatacttgattctcgattgaaatatccattgttcgttaatatccatgtaacaatcccattggaaacaagattttttttgaatcctagatgagaataaacagggatttggtttttgttttagttttgacataaaggattccaagttactgaagttaaaattgaaatatctcagtttaacagcagctcttttttgcccttgattttcaagagagaacttctagccaaaattcagtttttgttacttaaccagaatgatggcagataacagatggtataataaacttaatagcattttgttctcatgttttagatgagtcagagtaagatggaagtatcaccataatagagttagaacactaatcagagacccattagcttctttgtttgatttgatgaattcatgcatacttaatacatatatttcacaaggcttaacactaccattgtactgtataatggaatgactctagtggttttgtgtttcatttgaaattttacctgattgaatccatttgtaactaaaggaaacagctgtgattagttactgatgcctcaaaagcaaaatatttaccaaataagaaaag

SEQ ID NO: 302209 - DNA, 1648 bp, Homo sapiens
gcgctctcgggcactatgtgcttccggtctccaataccgcaggagggcggtcttccccggctcgccaactcggctgctctgggggattcgtgcgcggtaagaagctgcgcggtagcgcggtgaggtgtgtttccattgtagaaaacctggtcatggaattgcagattgccccgccgcccttgaaaatcaagacatgggcactgggatatgttacaggtgtgggtccacagagcacgaaataaccaagtgtaaggctaaagtagacccggctcttggcgaatttccttttgcaaaatgttttgtttgtggagaaatggggcacctgtctagatcttgtcctgataatcccaaaggactctatgctgatggtggcggttgcaaactttgtggctctgtggaacatttaaagaaagattgccctgaaagtcagaattcagagcgaatggtcacagttggtcgctgggcaaagggaatgagtgcagactatgaagaaattttggatgtacctaaaccgcaaaaacccaaaacaaaaatacctaaagttgttaatttttgataacagctagcactatcatgagttactacctcattgttactttctaaaccaggcccgcttcacgagttagagttgagctcccctgtagccaggactatgctgtagatatcagtatgatctgggtgtggccaaaaacaattttctttattctgtctatcaaatagtacttctaccactgtttggagaaaattgaagaaaagaataagatgattaaatgaattctctaaaagaacatattttaagagacagaacttagacataaccaagtagttgtatacctgattgtaacaatcatcttttataaaagcaaaattatgcataaatgtaaaacacccctaaacaaagggaacaaatgaatttttggttatattgttttcttggctcaaagtatcaatttattattataatagaaatttataagttgctagaaagtctatatttttaaagtacggaataaaaatatgttttctattaagcaatagaaatatttttgtgtataatttttctgaatacttgattctcgattgaaatatccattgttcgttaatatccatgtaacaatcccattggaaacaagattttttttgaatcctagatgagaataaacagggatttggtttttgttttagttttgacataaaggattccaagttactgaagttaaaattgaaatatctcagtttaacagcagctcttttttgcccttgattttcaagagagaacttctagccaaaattcagtttttgttacttaaccagaatgatggcagataacagatggtataataaacttaatagcattttgttctcatgttttagatgagtcagagtaagatggaagtatcaccataatagagttagaacactaatcagagacccattagcttctttgtttgatttgatgaattcatgcatacttaatacatatatttcacaaggcttaacactaccattgtactgtataatggaatgactctagtggttttgtgtttcatttgaaattttacctgattgaatccatttgtaactaaaggaaacagctgtgattagttactgatgcctcaaaagcaaaatatttaccaaataagaaaag

SEQ ID NO: 302210 - DNA, 1620 bp, Homo sapiens
gcgctctcgggcactatgtgcttccggtctccaataccgcaggagggcggtcttccccggctcgccaactcggctgctctgggggattcgtgcgcggtgtgtttccattgtagaaaacctggtcatggaattgcagattgccccgccgcccttgaaaatcaagacatgggcactgggatatgttacaggtgtgggtccacagagcacgaaataaccaagtgtaaggctaaagtagacccggctcttggcgaatttccttttgcaaaatgttttgtttgtggagaaatggggcacctgtctagatcttgtcctgataatcccaaaggactctatgctgatggtggcggttgcaaactttgtggctctgtggaacatttaaagaaagattgccctgaaagtcagaattcagagcgaatggtcacagttggtcgctgggcaaagggaatgagtgcagactatgaagaaattttggatgtacctaaaccgcaaaaacccaaaacaaaaatacctaaagttgttaatttttgataacagctagcactatcatgagttactacctcattgttactttctaaaccaggcccgcttcacgagttagagttgagctcccctgtagccaggactatgctgtagatatcagtatgatctgggtgtggccaaaaacaattttctttattctgtctatcaaatagtacttctaccactgtttggagaaaattgaagaaaagaataagatgattaaatgaattctctaaaagaacatattttaagagacagaacttagacataaccaagtagttgtatacctgattgtaacaatcatcttttataaaagcaaaattatgcataaatgtaaaacacccctaaacaaagggaacaaatgaatttttggttatattgttttcttggctcaaagtatcaatttattattataatagaaatttataagttgctagaaagtctatatttttaaagtacggaataaaaatatgttttctattaagcaatagaaatatttttgtgtataatttttctgaatacttgattctcgattgaaatatccattgttcgttaatatccatgtaacaatcccattggaaacaagattttttttgaatcctagatgagaataaacagggatttggtttttgttttagttttgacataaaggattccaagttactgaagttaaaattgaaatatctcagtttaacagcagctcttttttgcccttgattttcaagagagaacttctagccaaaattcagtttttgttacttaaccagaatgatggcagataacagatggtataataaacttaatagcattttgttctcatgttttagatgagtcagagtaagatggaagtatcaccataatagagttagaacactaatcagagacccattagcttctttgtttgatttgatgaattcatgcatacttaatacatatatttcacaaggcttaacactaccattgtactgtataatggaatgactctagtggttttgtgtttcatttgaaattttacctgattgaatccatttgtaactaaaggaaacagctgtgattagttactgatgcctcaaaagcaaaatatttaccaaataagaaaag

SEQ ID NO: 302211 - DNA, 1556 bp, Homo sapiens
gcgctctcgggcactatgtgcttccggtctccaataccgcaggagggcggtcttccccggctcgccaactcggctgctctgggggattcgtgcgcggtaagaagctgcgcggtagcgcggtgaggtgtgggtccacagagcacgaaataaccaagtgtaaggctaaagtagacccggctcttggcgaatttccttttgcaaaatgttttgtttgtggagaaatggggcacctgtctagatcttgtcctgataatcccaaaggactctatgctgatggtggcggttgcaaactttgtggctctgtggaacatttaaagaaagattgccctgaaagtcagaattcagagcgaatggtcacagttggtcgctgggcaaagggaatgagtgcagactatgaagaaattttggatgtacctaaaccgcaaaaacccaaaacaaaaatacctaaagttgttaatttttgataacagctagcactatcatgagttactacctcattgttactttctaaaccaggcccgcttcacgagttagagttgagctcccctgtagccaggactatgctgtagatatcagtatgatctgggtgtggccaaaaacaattttctttattctgtctatcaaatagtacttctaccactgtttggagaaaattgaagaaaagaataagatgattaaatgaattctctaaaagaacatattttaagagacagaacttagacataaccaagtagttgtatacctgattgtaacaatcatcttttataaaagcaaaattatgcataaatgtaaaacacccctaaacaaagggaacaaatgaatttttggttatattgttttcttggctcaaagtatcaatttattattataatagaaatttataagttgctagaaagtctatatttttaaagtacggaataaaaatatgttttctattaagcaatagaaatatttttgtgtataatttttctgaatacttgattctcgattgaaatatccattgttcgttaatatccatgtaacaatcccattggaaacaagattttttttgaatcctagatgagaataaacagggatttggtttttgttttagttttgacataaaggattccaagttactgaagttaaaattgaaatatctcagtttaacagcagctcttttttgcccttgattttcaagagagaacttctagccaaaattcagtttttgttacttaaccagaatgatggcagataacagatggtataataaacttaatagcattttgttctcatgttttagatgagtcagagtaagatggaagtatcaccataatagagttagaacactaatcagagacccattagcttctttgtttgatttgatgaattcatgcatacttaatacatatatttcacaaggcttaacactaccattgtactgtataatggaatgactctagtggttttgtgtttcatttgaaattttacctgattgaatccatttgtaactaaaggaaacagctgtgattagttactgatgcctcaaaagcaaaatatttaccaaataagaaaag

SEQ ID NO: 302212 - DNA, 1337 bp, Homo sapiens
gcgctctcgggcactatgtgcttccggtctccaataccgcaggagggcggtcttccccggctcgccaactcggctgctctgggggattcgtgcgcggtaagaagctgcgcggtagcgcggtgaggtgaggttctcagccaccaaagctgcagggtctcgtcgttcgttccctctggcctggcggaacttgcgtgggaagctgggaggacagaaggcttagccgctgggtccctgagctggctggagcgcgggctgtctaggggcggcgacctcagctgttgggctccggctgctgggggctgtgcgtccagccgccctggaatccgcctgtgggtgggccgcttggctctcccacttcaccctcttgataacccagagcctcccccttcccacgtacgtaggggaaggataatctacttccttttgaacagcttcggtccccactatgacagtcgcataaacttcagcgaagagtgcgctggtaccactgatgaaattatgaccaggtgggcccgagttagtaccacatataacaagagacccttgcctgcaacatcatgggaggacatgaagaagggatcctttgagggaacaagccaaaacctaccaaagcgtaaacaacttgaagccaataggctatccctcaaaaatgatgcaccccaagcaaaacataaaaagaacaaaaagaaaaaagagtacttaaatgaagatgtgaatggattcatggaatacctaagacagaattcacagatggttcacaatgggcaaattatagcaacagacagtgaggaagtaagggaagaaattgcagttgctttaaagaaagacagtcgacgggaaggaagaagattaaaaagacaagcggcaaagaaaaatgcaatggtgagagcatcacttctaccatgttatttactttatttagctggaaactattcttatattcacacacatatataccttagccagctctggttaccattatgtcccagatttatagagcatcgttttaaggactagtacttttttagcacatatatgctaggcacatgatgtactggttaattattacaacaacacagcaaaggtgatggcatatattcccatattatggatggcaaacactgaagtgcagatagattaaataacctgtggaagccacttagctagtagcagaggtgacattcaaacccagcctgacttcaaaacctacgttatagaccagatgtggtggcccatgcccgtgatcccagcactttaggaagctgaggcgggaggatcacttgagcccaggaattaaagacgagccagggccacatagggagacgccatgtctacca

SEQ ID NO: 302213 - DNA, 1249 bp, Homo sapiens
gcgctctcgggcactatgtgcttccggtctccaataccgcaggagggcggtcttccccggctcgccaactcggctgctctgggggattcgtgcgcggtaagaagctgcgcggtagcgcggtgaggtgaggttctcagccaccaaagctgcagggtctcgtcgttcgttccctctggcctggcggaacttgcgtgggaagctgggaggacagaaggcttagccgctgggtccctgagctggctggagcgcgggctgtctaggggcggcgacctcagctgttgggctccggctgctgggggctgtgcgtccagccgccctggaatccgcctgtgggtgggccgcttggctctcccacttcaccctcttgataacccagagcctcccccttcccacgtaccactgatgaaattatgaccaggtgggcccgagttagtaccacatataacaagagacccttgcctgcaacatcatgggaggacatgaagaagggatcctttgagggaacaagccaaaacctaccaaagcgtaaacaacttgaagccaataggctatccctcaaaaatgatgcaccccaagcaaaacataaaaagaacaaaaagaaaaaagagtacttaaatgaagatgtgaatggattcatggaatacctaagacagaattcacagatggttcacaatgggcaaattatagcaacagacagtgaggaagtaagggaagaaattgcagttgctttaaagaaagacagtcgacgggaaggaagaagattaaaaagacaagcggcaaagaaaaatgcaatggtgagagcatcacttctaccatgttatttactttatttagctggaaactattcttatattcacacacatatataccttagccagctctggttaccattatgtcccagatttatagagcatcgttttaaggactagtacttttttagcacatatatgctaggcacatgatgtactggttaattattacaacaacacagcaaaggtgatggcatatattcccatattatggatggcaaacactgaagtgcagatagattaaataacctgtggaagccacttagctagtagcagaggtgacattcaaacccagcctgacttcaaaacctacgttatagaccagatgtggtggcccatgcccgtgatcccagcactttaggaagctgaggcgggaggatcacttgagcccaggaattaaagacgagccagggccacatagggagacgccatgtctacca

SEQ ID NO: 302214 - DNA, 491 bp, Homo sapiens
gcgctctcgggcactatgtgcttccggtctccaataccgcaggagggcggtcttccccggctcgccaactcggctgctctgggggattcgtgcgcggtaagaagctgcgcggtagcgcggtgaggtgtgtttccattgtagaaaacctggtcatggaattgcagattgccccgccgcccttgaaaatcaagacatgggcactgggatatgttacaggtgtgggtccacagagcacgaaataaccaagtgtaaggctaaagtagacccggctcttggcgaatttccttttgcaaaatgttttgtttgtggagaaatggggcacctgtctagatcttgtcctgataatcccaaaggactctatgctgatggtaagtactgttaccctcatatagcagaaatggtgagtcatcgtgcagttgtgatttaatttacactcaatcacagttcttgaataaattcttgaataaattgcaaaaccttgagaattacat

SEQ ID NO: 302215 - DNA, 2381 bp, Homo sapiens
caatatattcctcgttagggcaggcgcggcccttcggctccgagctgaccctgatcagggccgagttgtctcggcggcgctgccgaggcctccacccaggaccccggggagggtggttaccgctgaggagctgcagtctctgtcaagatgatagaggtactgacaacaactgactctcagaaactgctacaccagctgaatgccctgttggaacaggagtctagatgtcagccaaaggtctgtggtttgagactaattgagtctgcacacgataatggcctcagaatgactgcaagactaagggactttgaagtaaaagatcttcttagtctaactcagttctttggctttgacacagagacattttctctagctgtgaatttactggacagattcctgtctaaaatgaaggtacagcccaagcaccttgggtgtgttggactgagctgcttttatttggctgtaaaatcaatagaagaggaaaggaatgtcccattggcaactgacttgatccgaataagtcaatataggtttacggtttcagacttgatgagaatggaaaagattgtattggagaaggtgtgttggaaagtcaaagctactactgcctttcaatttctgcaactgtattattcactccttcaagagaacttgccacttgaaaggagaaatagcattaattttgaaagactagaagctcaactgaaggcatgtcattgcaggatcatattttctaaagcaaagccttctgtgttggcattgtctatcattgcattagagatccaagcacagaagtgtgtagagttaacagaaggaatagaatgtcttcagaaacattccaagataaatggcagagatctgaccttctggcaagagcttgtatccaaatgtttaactgaatattcatcaaataagtgttccaaaccaaatgttcagaagttgaaatggattgtttctgggcgtactgcacggcaattgaagcatagctactacagaataactcaccttccaacaattcctgaaatggtcccttaactggattattacagcaccaaaaaacttctctgaagcctttctccacaaccttgttctatggattccataatgttacaatggatttaagctatgaagcctcaaaacatcacgagataagcatgatggtctcagacttgggaaaactgcctaatattatgctgtagtggaattatgtttagatttgaattcatctgtgaagcattcaaatcaaagctaaaagcctaaatgtgaaatgctaatgacaagcctgagaaggtaaactgtgaatcttcatttctatcattgatctaactttagatattggatcaatatatttaggtggtattgaaaatgctattggaggagtcacactaatactatcaactatcagtcttcccacagcttcaatcactgtcattattctaatcctactcctacttaaattttaagttatgaggtttatgtcaaaagcaacatttcacaaatgtacttttaaggcataataagggttaacattctaggcagtataaacacaccccataatgcaagtaataggtaatctagagatgtggactttattgctatatgggaattacatttaaatttgagggcattttatataaagaaaaatacagacctataaagtttggcatattcattaagttatcttttaatatttttttctagaaaacaggtgacatttgtatctacgataaaaatttttatacagaacctactgcctcaaactgaatcccatcaagaaaactagtttctattgtattagtaactcaaaataaattatcacttcgaaaacttgctttcccacactaaggtaagttcagactagattgaacactccagaattttttactacagactgtttttaagttagaagtgatggcaattttataaatagagaatatacttccactgatgcccttactgtgccaaaacaaaaatcttaagaaaagcaagtagacaccttcataactatgaatgaagctgctgaagtagtgtttaggatcctccatggcagttagtgaatgtaagaagtacagtgttaaagtgttgtaaacagttactcagtgcaatgtatagcctgagtctatccatgatggctatatccaatttgacatcacgttatggatcagtacacaatgaaaaaccaaagaaccacagtatatcttattcttaacttttgtaaaccatgttttatgggtaactttttagttttcccaaaaggctgataaatttcaatattttgaatacatcattgttaattttgagttggcagaggtaaactaaccaactaccattatgttttagtactaagggatatacctttcaataaagttaatgaaattcaa

SEQ ID NO: 302216 - DNA, 707 bp, Homo sapiens
cggacgcgtgggtcgacccacgcgtccaaaacaggtgacatttgtatctacgataaaaatttttatacagaacctactgcctcaaactgaatcccatcaagaaaactagtttctattgtattagtaactcaaaataaattatcacttcgaaaacttgctttcccacactaaggtaagttcagactagattgaacactccagaattttttactacagactgtttttaagttagaagtgatggcaattttataaatagagaatatacttccactgatgcccttactgtgccaaaacaaaaatcttaagaaaagcaagtagacaccttcataactatgaatgaagctgctgaagtagtgtttaggatcctccatggcagttagtgaatgtaagaagtacagtgttaaagtgttgtaaacagttactcagtgcaatgtatagcctgagtctatccatgatggctatatccaatttgacatcacgttatggatcagtacacaatgaaaaaccaaagaaccacagtatatcttattcttaacttttgtaaaccatgttttatgggtaactttttagttttcccaaaaggctgataaatttcaatattttgaatacatcattgttaattttgagttggcagaggtaaactaaccaactaccattatgttttagtactaagggatatacctttcaataaagttaatgaaattcaa

SEQ ID NO: 302217 - DNA, 1157 bp, Homo sapiens
cggacgcgtgggtcgacccacgcgtccaaaactagtttctattgtattagtaactcaaaataaattatcacttcgaaaacttgctttcccacactaaggtaagttcagactagattgaacactccagaattttttactacagactgtttttaagttagaagtgatggcaattttataaatagagaatatacttccactgatgcccttactgtgccaaaacaaaaatcttaagaaaagcaagtagacaccttcataactatgaatgaagctgctgaagtagtgtttaggatcctccatggcagttagtgaatgtaagaagtacagtgttaaagtgttgtaaacagttactcagtgcaatgtatagcctgagtctatccatgatggctatatccaatttgacatcacgttatggatcagtacacaatgaaaaaccaaagaaccacagtatatcttattcttaacttttgtaaaccatgttttatgggtaactttttagttttcccaaaaggctgataaatttcaatattttgaatacatcattgttaattttgagttggcagaggtaaactaaccaactaccattatgttttagtactaagggatatacctttcaataaagttaatgaaattcaaaaaaaaaaataacaaaaaaacaaaaacaaaaagaaaaaaaaaagcacaaaacaaaaaacaaacaaagggggggcgggcccccctatatgtatgatgaggcgaacagcaaccacatttatctcacatggggcaccagctgtgtacaagattaagaacacgcgcgacagtggggtgcagagagacgtacatggaaaaaccacaaattatattagaggggggggccaccaacacgcgcgtgcaaagaacagcctacaggcgggagagaggactctaaggaaatcatgccgcccgaccccattctggtgcgacccacgcgtgtgggtgtggcgcggggggcaccaactttgaaagaaagtaccccaccaagaaaaagggcccagaacaacaaaatggtgtgctgtggacaacacgcagaaaaccaagggcgggcacaataatcacgaggacaagctactgggtgggtcccccattcaggttattgaaaacgggcaaaaccgggcaaaagcattaaggcaagaaaaaag

SEQ ID NO: 302218 - DNA, 2473 bp, Homo sapiens
caatatattcctcgttagggcaggcgcggcccttcggctccgagctgaccctgatcagggccgagttgtctcggcggcgctgccgaggcctccacccaggacagtccccctccccgggcctctctcctcttgcctacgagtcccctctcctcgtaggcctctcggatctgatatcgtggggtgaggtgagcaggcccggggagggtggttaccgctgaggagctgcagtctctgtcaagatgatagaggtactgacaacaactgactctcagaaactgctacaccagctgaatgccctgttggaacaggagtctagatgtcagccaaaggtctgtggtttgagactaattgagtctgcacacgataatggcctcagaatgactgcaagactaagggactttgaagtaaaagatcttcttagtctaactcagttctttggctttgacacagagacattttctctagctgtgaatttactggacagattcctgtctaaaatgaaggtacagcccaagcaccttgggtgtgttggactgagctgcttttatttggctgtaaaatcaatagaagaggaaaggaatgtcccattggcaactgacttgatccgaataagtcaatataggtttacggtttcagacttgatgagaatggaaaagattgtattggagaaggtgtgttggaaagtcaaagctactactgcctttcaatttctgcaactgtattattcactccttcaagagaacttgccacttgaaaggagaaatagcattaattttgaaagactagaagctcaactgaaggcatgtcattgcaggatcatattttctaaagcaaagccttctgtgttggcattgtctatcattgcattagagatccaagcacagaagtgtgtagagttaacagaaggaatagaatgtcttcagaaacattccaagataaatggcagagatctgaccttctggcaagagcttgtatccaaatgtttaactgaatattcatcaaataagtgttccaaaccaaatgttcagaagttgaaatggattgtttctgggcgtactgcacggcaattgaagcatagctactacagaataactcaccttccaacaattcctgaaatggtcccttaactggattattacagcaccaaaaaacttctctgaagcctttctccacaaccttgttctatggattccataatgttacaatggatttaagctatgaagcctcaaaacatcacgagataagcatgatggtctcagacttgggaaaactgcctaatattatgctgtagtggaattatgtttagatttgaattcatctgtgaagcattcaaatcaaagctaaaagcctaaatgtgaaatgctaatgacaagcctgagaaggtaaactgtgaatcttcatttctatcattgatctaactttagatattggatcaatatatttaggtggtattgaaaatgctattggaggagtcacactaatactatcaactatcagtcttcccacagcttcaatcactgtcattattctaatcctactcctacttaaattttaagttatgaggtttatgtcaaaagcaacatttcacaaatgtacttttaaggcataataagggttaacattctaggcagtataaacacaccccataatgcaagtaataggtaatctagagatgtggactttattgctatatgggaattacatttaaatttgagggcattttatataaagaaaaatacagacctataaagtttggcatattcattaagttatcttttaatatttttttctagaaaacaggtgacatttgtatctacgataaaaatttttatacagaacctactgcctcaaactgaatcccatcaagaaaactagtttctattgtattagtaactcaaaataaattatcacttcgaaaacttgctttcccacactaaggtaagttcagactagattgaacactccagaattttttactacagactgtttttaagttagaagtgatggcaattttataaatagagaatatacttccactgatgcccttactgtgccaaaacaaaaatcttaagaaaagcaagtagacaccttcataactatgaatgaagctgctgaagtagtgtttaggatcctccatggcagttagtgaatgtaagaagtacagtgttaaagtgttgtaaacagttactcagtgcaatgtatagcctgagtctatccatgatggctatatccaatttgacatcacgttatggatcagtacacaatgaaaaaccaaagaaccacagtatatcttattcttaacttttgtaaaccatgttttatgggtaactttttagttttcccaaaaggctgataaatttcaatattttgaatacatcattgttaattttgagttggcagaggtaaactaaccaactaccattatgttttagtactaagggatatacctttcaataaagttaatgaaattcaa

SEQ ID NO: 302219 - DNA, 2615 bp, Homo sapiens
caatatattcctcgttagggcaggcgcggcccttcggctccgagctgaccctgatcagggccgagttgtctcggcggcgctgccgaggcctccacccaggacagtccccctccccgggcctctctcctcttgcctacgagtcccctctcctcgtaggcctctcggatctgatatcgtggggtgaggtgagcaggcccggggagggtggttaccgctgaggagctgcagtctctgtcaagatgatagaggtactgacaacaactgactctcagaaactgctacaccagctgaatgccctgttggaacaggagtctagatgtcagccaaaggtctgtggtttgagactaattgagtctgcacacgataatggcctcagaatgactgcaagactaagggactttgaagtaaaagatcttcttagtctaactcagttctttggctttgacacagagacattttctctagctgtgaatttactggacagattcctgtctaaaatgaaggtacagcccaagcaccttgggtgtgttggactgagctgcttttatttggctgtaaaatcaatagaagaggaaaggaatgtcccattggcaactgacttgatccgaataagtcaatataggtttacggtttcagacttgatgagaatggaaaagattgtattggagaaggtgtgttggaaagtcaaagctactactgcctttcaatttctgcaactgtattattcactccttcaagagaacttgccacttgaaaggagaaatagcattaattttgaaagactagaagctcaactgaaggcatgtcattgcaggatcatattttctaaagcaaagccttctgtgttggcattgtctatcattgcattagagatccaagcacagaagtgtgtagagttaacagaaggaatagaatgtcttcagaaacattccaagataaatggcagagatctgaccttctggcaagagcttgtatccaaatgtttaactgaatattcatcaaataagtgttccaaaccaaatgttcagaagttgaaatggattgtttctgggcgtactgcacggcaattgaagcatagctactacagaataactcaccttccaacaattcctgaaatggtcccttaactggattattacagcaccaaaaaacttctctgaagcctttctccacaaccttgttctatggattccataatgttacaatggatttaagctatgaagcctcaaaacatcacgagataagcatgatggtctcagacttgggaaaactgcctaatattatgctgtagtggaattatgtttagatttgaattcatctgtgaagcattcaaatcaaagctaaaagcctaaatgtgaaatgctaatgacaagcctgagaaggtaaactgtgaatcttcatttctatcattgatctaactttagatattggatcaatatatttaggtggtattgaaaatgctattggaggagtcacactaatactatcaactatcagtcttcccacagcttcaatcactgtcattattctaatcctactcctacttaaattttaagttatgaggtttatgtcaaaagcaacatttcacaaatgtacttttaaggcataataagggttaacattctaggcagtataaacacaccccataatgcaagtaataggtaatctagagatgtggactttattgctatatgggaattacatttaaatttgagggcattttatataaagaaaaatacagacctataaagtttggcatattcattaagttatcttttaatatttttttctagaaaacaggtgacatttgtatctacgataaaaatttttatacagaacctactgcctcaaactgaatcccatcaagaaaactagtttctattgtattagtaactcaaaataaattatcacttcgaaaacttgctttcccacactaaggtaagttcagactagattgaacactccagaattttttactacagactgtttttaagttagaagtgatggcaattttataaatagagaatatacttccactgatgcccttactgtgccaaaacaaaaatcttaagaaaagcaagtagacaccttcataactatgaatgaagctgctgaagtagtgtttaggatcctccatggcagttagtgaatgtaagaagtacagtgttaaagtgttgtaaacagttactcagtgcaatgtatagcctgagtctatccatgatggctatatccaatttgacatcacgttatggatcagtacacaatgaaaaaccaaagaaccacagtatatcttattcttaacttttgtaaaccatgttttatgggtaactttttagttttcccaaaaggctgataaatttcaatattttgaatacatcattgttaattttgagttggcagaggtaaactaaccaactaccattatgttttagtactaagggatatacctttcaataaagttaatgaaattcaaaaaaaaagggggcggtctaaaccgaggcagttccgtccattggacagccaagggctaaaagagcgcgtaacacagacacaccgttgggaccttgggtggaccacaaccgaaatttgcgcccgttgatactacacgccttatt

SEQ ID NO: 302220 - DNA, 2424 bp, Homo sapiens
caatatattcctcgttagggcaggcgcggcccttcggctccgagctgaccctgatcagggccgagttgtctcggcggcgctgccgaggcctccacccaggacagtccccctccccgggcctctctcctcttgcctacgagtcccctctcctcgtaggcctctcggatctgatatcgtggggtgaggtgagcaggcccggggagggtggttaccgctgaggagctgcagtctctgtcaagatgatagaggtactgacaacaactgactctcagaaactgctacaccagctgaatgccctgttggaacaggagtctagatgtcagccaaaggtctgtggtttgagactaattgagtctgcacacgataatggcctcagaatgactgcaagactaagggactttgaagtaaaagatcttcttagtctaactcagttctttggctttgacacagagacattttctctagctgtgaatttactggacagattcctgtctaaaatgaaggtacagcccaagcaccttgggtgtgttggactgagctgcttttatttggctgtaaaatcaatagaagaggaaaggaatgtcccattggcaactgacttgatccgaataagtcaatataggtttacggtttcagacttgatgagaatggaaaagattgtattggagaaggtgtgttggaaagtcaaagctactactgcctttcaatttctgcaactgtattattcactccttcaagagaacttgccacttgaaaggagaaatagcattaattttgaaagactagaagctcaactgaaggcatgtcattgcaggatcatattttctaaagcaaagccttctgtgttggcattgtctatcattgcattagagatccaagcacagaagtgtgtagagttaacagaaggaatagaatgtcttcagaaacattccaagataaatggcagagatctgaccttctggcaagagcttgtatccaaatgtttaactgaatattcatcaaataagtgttccaaaccaaatgttcagaagttgaaatggattgtttctgggcgtactgcacggcaattgaagcatagctagattattacagcaccaaaaaacttctctgaagcctttctccacaaccttgttctatggattccataatgttacaatggatttaagctatgaagcctcaaaacatcacgagataagcatgatggtctcagacttgggaaaactgcctaatattatgctgtagtggaattatgtttagatttgaattcatctgtgaagcattcaaatcaaagctaaaagcctaaatgtgaaatgctaatgacaagcctgagaaggtaaactgtgaatcttcatttctatcattgatctaactttagatattggatcaatatatttaggtggtattgaaaatgctattggaggagtcacactaatactatcaactatcagtcttcccacagcttcaatcactgtcattattctaatcctactcctacttaaattttaagttatgaggtttatgtcaaaagcaacatttcacaaatgtacttttaaggcataataagggttaacattctaggcagtataaacacaccccataatgcaagtaataggtaatctagagatgtggactttattgctatatgggaattacatttaaatttgagggcattttatataaagaaaaatacagacctataaagtttggcatattcattaagttatcttttaatatttttttctagaaaacaggtgacatttgtatctacgataaaaatttttatacagaacctactgcctcaaactgaatcccatcaagaaaactagtttctattgtattagtaactcaaaataaattatcacttcgaaaacttgctttcccacactaaggtaagttcagactagattgaacactccagaattttttactacagactgtttttaagttagaagtgatggcaattttataaatagagaatatacttccactgatgcccttactgtgccaaaacaaaaatcttaagaaaagcaagtagacaccttcataactatgaatgaagctgctgaagtagtgtttaggatcctccatggcagttagtgaatgtaagaagtacagtgttaaagtgttgtaaacagttactcagtgcaatgtatagcctgagtctatccatgatggctatatccaatttgacatcacgttatggatcagtacacaatgaaaaaccaaagaaccacagtatatcttattcttaacttttgtaaaccatgttttatgggtaactttttagttttcccaaaaggctgataaatttcaatattttgaatacatcattgttaattttgagttggcagaggtaaactaaccaactaccattatgttttagtactaagggatatacctttcaataaagttaatgaaattcaa

SEQ ID NO: 302221 - DNA, 2997 bp, Homo sapiens
caatatattcctcgttagggcaggcgcggcccttcggctccgagctgaccctgatcagggccgagttgtctcggcggcgctgccgaggcctccacccaggacagtccccctccccgggcctctctcctcttgcctacgagtcccctctcctcgtaggcctctcggatctgatatcgtggggtgaggtgagcaggcccggggagggtggttaccgctgaggagctgcagtctctgtcaagatgatagaggtactgacaacaactgactctcagaaactgctacaccagctgaatgccctgttggaacaggagtctagatgtcagccaaaggtctgtggtttgagactaattgagtctgcacacgataatggcctcagaatgactgcaagactaagggactttgaagtaaaagatcttcttagtctaactcagttctttggctttgacacagagacattttctctagctgtgaatttactggacagattcctgtctaaaatgaaggtacagcccaagcaccttgggtgtgttggactgagctgcttttatttggctgtaaaatcaatagaagaggaaaggaatgtcccattggcaactgacttgatccgaataagtcaatataggtttacggtttcagacttgatgagaatggaaaagattgtattggagaaggtgtgttggaaagtcaaagctactactgcctttcaatttctgcaactgtattattcactccttcaagagaacttgccacttgaaaggagaaatagcattaattttgaaagactagaagctcaactgaaggcatgtcattgcaggatcatattttctaaagcaaagccttctgtgttggcattgtctatcattgcattagagatccaagcacagaagtgtgtagagttaacagaaggaatagaatgtcttcagaaacattccaagataaatggcagagatctgaccttctggcaagagcttgtatccaaatgtttaactgaatattcatcaaataagtgttccaaaccaaatgttcagaagttgaaatggattgtttctgggcgtactgcacggcaattgaagcatagctactacagaataactcaccttccaacaattcctgaaatggtcccttaactggattattacagcaccaaaaaacttctctgaagcctttctccacaaccttgttctatggattccataatgttacaatggatttaagctatgaagcctcaaaacatcacgagataagcatgatggtctcagacttgggaaaactgcctaatattatgctgtagtggaattatgtttagatttgaattcatctgtgaagcattcaaatcaaagctaaaagcctaaatgtgaaatgctaatgacaagcctgagaaggtaaactgtgaatcttcatttctatcattgatctaactttagatattggatcaatatatttaggtggtattgaaaatgctattggaggagtcacactaatactatcaactatcagtcttcccacagcttcaatcactgtcattattctaatcctactcctacttaaattttaagttatgaggtttatgtcaaaagcaacatttcacaaatgtacttttaaggcataataagggttaacattctaggcagtataaacacaccccataatgcaagtaataggtaatctagagatgtggactttattgctatatgggaattacatttaaatttgagggcattttatataaagaaaaatacagacctataaagtttggcatattcattaagttatcttttaatatttttttctagaaaacaggtgacatttgtatctacgataaaaatttttatacagaacctactgcctcaaactgaatcccatcaagaaaactagtttctattgtattagtaactcaaaataaattatcacttcgaaaacttgctttcccacactaaggtaagttcagactagattgaacactccagaattttttactacagactgtttttaagttagaagtgatggcaattttataaatagagaatatacttccactgatgcccttactgtgccaaaacaaaaatcttaagaaaagcaagtagacaccttcataactatgaatgaagctgctgaagtagtgtttaggatcctccatggcagttagtgaatgtaagaagtacagtgttaaagtgttgtaaacagttactcagtgcaatgtatagcctgagtctatccatgatggctatatccaatttgacatcacgttatggatcagtacacaatgaaaaaccaaagaaccacagtatatcttattcttaacttttgtaaaccatgttttatgggtaactttttagttttcccaaaaggctgataaatttcaatattttgaatacatcattgttaattttgagttggcagaggtaaactaaccaactaccattatgttttagtactaagggatatacctttcaataaagttaatgaaattcaaaaaaaaaaataacaaaaaaacaaaaacaaaaagaaaaaaaaaagcacaaaacaaaaaacaaacaaagggggggcgggcccccctatatgtatgatgaggcgaacagcaaccacatttatctcacatggggcaccagctgtgtacaagattaagaacacgcgcgacagtggggtgcagagagacgtacatggaaaaaccacaaattatattagaggggggggccaccaacacgcgcgtgcaaagaacagcctacaggcgggagagaggactctaaggaaatcatgccgcccgaccccattctggtgcgacccacgcgtgtgggtgtggcgcggggggcaccaactttgaaagaaagtaccccaccaagaaaaagggcccagaacaacaaaatggtgtgctgtggacaacacgcagaaaaccaagggcgggcacaataatcacgaggacaagctactgggtgggtcccccattcaggttattgaaaacgggcaaaaccgggcaaaagcattaaggcaagaaaaaag

SEQ ID NO: 302222 - DNA, 2481 bp, Homo sapiens
caatatattcctcgttagggcaggcgcggcccttcggctccgagctgaccctgatcagggccgagttgtctcggcggcgctgccgaggcctccacccaggacagtccccctccccgggcctctctcctcttgcctacgagtcccctctcctcgtaggcctctcggatctgatatcgtggggtgaggtgagcaggcccggggagggtggttaccgctgaggagctgcagtctctgtcaagatgatagaggtactgacaacaactgactctcagaaactgctacaccagctgaatgccctgttggaacaggagtctagatgtcagccaaaggtctgtggtttgagactaattgagtctgcacacgataatggcctcagaatgactgcaagactaagggactttgaagtaaaagatcttcttagtctaactcagttctttggctttgacacagagacattttctctagctgtgaatttactggacagattcctgtctaaaatgaaggtacagcccaagcaccttgggtgtgttggactgagctgcttttatttggctgtaaaatcaatagaagaggaaaggaatgtcccattggcaactgacttgatccgaataagtcaatataggtttacggtttcagacttgatgagaatggaaaagattgtattggagaaggtgtgttggaaagtcaaagctactactgcctttcaatttctgcaactgtattattcactccttcaagagaacttgccacttgaaaggagaaatagcattaattttgaaagactagaagctcaactgaaggcatgtcattgcaggatcatattttctaaagcaaagccttctgtgttggcattgtctatcattgcattagagatccaagcacagaagtgtgtagagttaacagaaggaatagaatgtcttcagaaacattccaagataaatggcagagatctgaccttctggcaagagcttgtatccaaatgtttaactgaatattcatcaaataagtgttccaaaccaaatgttcagaagttgaaatggattgtttctgggcgtactgcacggcaattgaagcatagctactacagaataactcaccttccaacaattcctgaaatggtcccttaactggattattacagcaccaaaaaacttctctgaagcctttctccacaaccttgttctatggattccataatgttacaatggatttaagctatgaagcctcaaaacatcacgagataagcatgatggtctcagacttgggaaaactgcctaatattatgctgtagtggaattatgtttagatttgaattcatctgtgaagcattcaaatcaaagctaaaagcctaaatgtgaaatgctaatgacaagcctgagaaggtaaactgtgaatcttcatttctatcattgatctaactttagatattggatcaatatatttaggtggtattgaaaatgctattggaggagtcacactaatactatcaactatcagtcttcccacagcttcaatcactgtcattattctaatcctactcctacttaaattttaagttatgaggtttatgtcaaaagcaacatttcacaaatgtacttttaaggcataataagggttaacattctaggcagtataaacacaccccataatgcaagtaataggtaatctagagatgtggactttattgctatatgggaattacatttaaatttgagggcattttatataaagaaaaatacagacctataaagtttggcatattcattaagttatcttttaatatttttttctagaaaacaggtgacatttgtatctacgataaaaatttttatacagaacctactgcctcaaactgaatcccatcaagaaaactagtttctattgtattagtaactcaaaataaattatcacttcgaaaacttgctttcccacactaaggtaagttcagactagattgaacactccagaattttttactacagactgtttttaagttagaagtgatggcaattttataaatagagaatatacttccactgatgcccttactgtgccaaaacaaaaatcttaagaaaagcaagtagacaccttcataactatgaatgaagctgctgaagtagtgtttaggatcctccatggcagttagtgaatgtaagaagtacagtgttaaagtgttgtaaacagttactcagtgcaatgtatagcctgagtctatccatgatggctatatccaatttgacatcacgttatggatcagtacacaatgaaaaaccaaagaaccacagtatatcttattcttaacttttgtaaaccatgttttatgggtaactttttagttttcccaaaaggctgataaatttcaatattttgaatacatcattgttaattttgagttggcagaggtaaactaaccaactaccattaactttattgaaaggtatatcccttagtactaaaacataatggtcgacgcggccgcga

SEQ ID NO: 302223 - DNA, 2449 bp, Homo sapiens
caatatattcctcgttagggcaggcgcggcccttcggctccgagctgaccctgatcagggccgagttgtctcggcggcgctgccgaggcctccacccaggacctcttgcctacgagtcccctctcctcgtaggcctctcggatctgatatcgtggggtgaggtgagcaggcccggggagggtggttaccgctgaggagctgcagtctctgtcaagatgatagaggtactgacaacaactgactctcagaaactgctacaccagctgaatgccctgttggaacaggagtctagatgtcagccaaaggtctgtggtttgagactaattgagtctgcacacgataatggcctcagaatgactgcaagactaagggactttgaagtaaaagatcttcttagtctaactcagttctttggctttgacacagagacattttctctagctgtgaatttactggacagattcctgtctaaaatgaaggtacagcccaagcaccttgggtgtgttggactgagctgcttttatttggctgtaaaatcaatagaagaggaaaggaatgtcccattggcaactgacttgatccgaataagtcaatataggtttacggtttcagacttgatgagaatggaaaagattgtattggagaaggtgtgttggaaagtcaaagctactactgcctttcaatttctgcaactgtattattcactccttcaagagaacttgccacttgaaaggagaaatagcattaattttgaaagactagaagctcaactgaaggcatgtcattgcaggatcatattttctaaagcaaagccttctgtgttggcattgtctatcattgcattagagatccaagcacagaagtgtgtagagttaacagaaggaatagaatgtcttcagaaacattccaagataaatggcagagatctgaccttctggcaagagcttgtatccaaatgtttaactgaatattcatcaaataagtgttccaaaccaaatgttcagaagttgaaatggattgtttctgggcgtactgcacggcaattgaagcatagctactacagaataactcaccttccaacaattcctgaaatggtcccttaactggattattacagcaccaaaaaacttctctgaagcctttctccacaaccttgttctatggattccataatgttacaatggatttaagctatgaagcctcaaaacatcacgagataagcatgatggtctcagacttgggaaaactgcctaatattatgctgtagtggaattatgtttagatttgaattcatctgtgaagcattcaaatcaaagctaaaagcctaaatgtgaaatgctaatgacaagcctgagaaggtaaactgtgaatcttcatttctatcattgatctaactttagatattggatcaatatatttaggtggtattgaaaatgctattggaggagtcacactaatactatcaactatcagtcttcccacagcttcaatcactgtcattattctaatcctactcctacttaaattttaagttatgaggtttatgtcaaaagcaacatttcacaaatgtacttttaaggcataataagggttaacattctaggcagtataaacacaccccataatgcaagtaataggtaatctagagatgtggactttattgctatatgggaattacatttaaatttgagggcattttatataaagaaaaatacagacctataaagtttggcatattcattaagttatcttttaatatttttttctagaaaacaggtgacatttgtatctacgataaaaatttttatacagaacctactgcctcaaactgaatcccatcaagaaaactagtttctattgtattagtaactcaaaataaattatcacttcgaaaacttgctttcccacactaaggtaagttcagactagattgaacactccagaattttttactacagactgtttttaagttagaagtgatggcaattttataaatagagaatatacttccactgatgcccttactgtgccaaaacaaaaatcttaagaaaagcaagtagacaccttcataactatgaatgaagctgctgaagtagtgtttaggatcctccatggcagttagtgaatgtaagaagtacagtgttaaagtgttgtaaacagttactcagtgcaatgtatagcctgagtctatccatgatggctatatccaatttgacatcacgttatggatcagtacacaatgaaaaaccaaagaaccacagtatatcttattcttaacttttgtaaaccatgttttatgggtaactttttagttttcccaaaaggctgataaatttcaatattttgaatacatcattgttaattttgagttggcagaggtaaactaaccaactaccattatgttttagtactaagggatatacctttcaataaagttaatgaaattcaa

SEQ ID NO: 302224 - DNA, 2349 bp, Homo sapiens
gctagtacgaggcctggtgtgaatcggccgaggcaggccgagttgtctcggcggcgctgccgaggcctcccccggggagggtggttaccgctgaggagctgcagtctctgtcaagatgatagaggtactgacaacaactgactctcagaaactgctacaccagctgaatgccctgttggaacaggagtctagatgtcagccaaaggtctgtggtttgagactaattgagtctgcacacgataatggcctcagaatgactgcaagactaagggactttgaagtaaaagatcttcttagtctaactcagttctttggctttgacacagagacattttctctagctgtgaatttactggacagattcctgtctaaaatgaaggtacagcccaagcaccttgggtgtgttggactgagctgcttttatttggctgtaaaatcaatagaagaggaaaggaatgtcccattggcaactgacttgatccgaataagtcaatataggtttacggtttcagacttgatgagaatggaaaagattgtattggagaaggtgtgttggaaagtcaaagctactactgcctttcaatttctgcaactgtattattcactccttcaagagaacttgccacttgaaaggagaaatagcattaattttgaaagactagaagctcaactgaaggcatgtcattgcaggatcatattttctaaagcaaagccttctgtgttggcattgtctatcattgcattagagatccaagcacagaagtgtgtagagttaacagaaggaatagaatgtcttcagaaacattccaagataaatggcagagatctgaccttctggcaagagcttgtatccaaatgtttaactgaatattcatcaaataagtgttccaaaccaaatgttcagaagttgaaatggattgtttctgggcgtactgcacggcaattgaagcatagctactacagaataactcaccttccaacaattcctgaaatggtcccttaactggattattacagcaccaaaaaacttctctgaagcctttctccacaaccttgttctatggattccataatgttacaatggatttaagctatgaagcctcaaaacatcacgagataagcatgatggtctcagacttgggaaaactgcctaatattatgctgtagtggaattatgtttagatttgaattcatctgtgaagcattcaaatcaaagctaaaagcctaaatgtgaaatgctaatgacaagcctgagaaggtaaactgtgaatcttcatttctatcattgatctaactttagatattggatcaatatatttaggtggtattgaaaatgctattggaggagtcacactaatactatcaactatcagtcttcccacagcttcaatcactgtcattattctaatcctactcctacttaaattttaagttatgaggtttatgtcaaaagcaacatttcacaaatgtacttttaaggcataataagggttaacattctaggcagtataaacacaccccataatgcaagtaataggtaatctagagatgtggactttattgctatatgggaattacatttaaatttgagggcattttatataaagaaaaatacagacctataaagtttggcatattcattaagttatcttttaatatttttttctagaaaacaggtgacatttgtatctacgataaaaatttttatacagaacctactgcctcaaactgaatcccatcaagaaaactagtttctattgtattagtaactcaaaataaattatcacttcgaaaacttgctttcccacactaaggtaagttcagactagattgaacactccagaattttttactacagactgtttttaagttagaagtgatggcaattttataaatagagaatatacttccactgatgcccttactgtgccaaaacaaaaatcttaagaaaagcaagtagacaccttcataactatgaatgaagctgctgaagtagtgtttaggatcctccatggcagttagtgaatgtaagaagtacagtgttaaagtgttgtaaacagttactcagtgcaatgtatagcctgagtctatccatgatggctatatccaatttgacatcacgttatggatcagtacacaatgaaaaaccaaagaaccacagtatatcttattcttaacttttgtaaaccatgttttatgggtaactttttagttttcccaaaaggctgataaatttcaatattttgaatacatcattgttaattttgagttggcagaggtaaactaaccaactaccattatgttttagtactaagggatatacctttcaataaagttaatgaaattcaa

SEQ ID NO: 302225 - DNA, 2062 bp, Homo sapiens
caatatattcctcgttagggcaggcgcggcccttcggctccgagctgaccctgatcagggccgagttgtctcggcggcgctgccgaggcctccacccaggacagtccccctccccgggcctctctcctcttgcctacgagtcccctctcctcgtaggcctctcggatctgatatcgtggggtgaggtgagcaggcccggggagggtggttaccgctgaggagctgcagtctctgtcaagatgatagaggtactgacaacaactgactctcagaaactgctacaccagctgaatgccctgttggaacaggagtctagatgtcagccaaaggtctgtggtttgagactaattgagtctgcacacgataatggcctcagaatgactgcaagactaagggactttgaagtaaaagatcttcttagtctaactcagttctttggctttgacacagagacattttctctagctgtgaatttactggacagattcctgtctaaaatgaaggtacagcccaagcaccttgggtgtgttggactgagctgcttttatttggctgtaaaatcaatagaagaggaaaggaatgtcccattggcaactgacttgatccgaataagtcaatataggtttacggtttcagacttgatgagaatggaaaagattgtattggagaaggtgtgttggaaagtcaaagctactactgcctttcaatttctgcaactgtattattcactccttcaagagaacttgccacttgaaaggagaaatagcattaattttgaaagactagaagctcaactgaaggcatgtcattgcaggatcatattttctaaagcaaagccttctgtgttggcattgtctatcattgcattagagatccaagcacagaagtgtgtagagttaacagaaggaatagaatgtcttcagaaacattccaagataaatggcagagatctgaccttctggcaagagcttgtatccaaatgtttaactgaatattcatcaaataagtgttccaaaccaaatgttcagaagttgaaatggattgtttctgggcgtactgcacggcaattgaagcatagctactacagaataactcaccttccaacaattcctgaaatggtcccttaactggattattacagcaccaaaaaacttctctgaagcctttctccacaaccttgttctatggattccataatgttacaatggatttaagctatgaagcctcaaaacatcacgagataagcatgatggtctcagacttgggaaaactgcctaatattatgctgtagtggaattatgtttagatttgaattcatctgtgaagcattcaaatcaaagctaaaagcctaaatgtgaaatgctaatgacaagcctgagaagaaaacaggtgacatttgtatctacgataaaaatttttatacagaacctactgcctcaaactgaatcccatcaagaaaactagtttctattgtattagtaactcaaaataaattatcacttcgaaaacttgctttcccacactaaggtaagttcagactagattgaacactccagaattttttactacagactgtttttaagttagaagtgatggcaattttataaatagagaatatacttccactgatgcccttactgtgccaaaacaaaaatcttaagaaaagcaagtagacaccttcataactatgaatgaagctgctgaagtagtgtttaggatcctccatggcagttagtgaatgtaagaagtacagtgttaaagtgttgtaaacagttactcagtgcaatgtatagcctgagtctatccatgatggctatatccaatttgacatcacgttatggatcagtacacaatgaaaaaccaaagaaccacagtatatcttattcttaacttttgtaaaccatgttttatgggtaactttttagttttcccaaaaggctgataaatttcaatattttgaatacatcattgttaattttgagttggcagaggtaaactaaccaactaccattatgttttagtactaagggatatacctttcaataaagttaatgaaattcaa

SEQ ID NO: 302226 - DNA, 2278 bp, Homo sapiens
caatatattcctcgttagggcaggcgcggcccttcggctccgagctgaccctgatcagggccgagttgtctcggcggcgctgccgaggcctccacccaggacagtccccctccccgggcctctctcctcttgcctacgagtcccctctcctcgtaggcctctcggatctgatatcgtggggtgaggtgagcaggcccggggagggtggttaccgctgaggagctgcagtctctgtcaagatgatagaggtactgacaacaactgactctcagaaactgctacaccagctgaatgccctgttggaacaggagtctagatgtcagccaaaggtctgtggtttgagactaattgagtctgcacacgataatggcctcagaatgactgcaagactaagggactttgaagtaaaagatcttcttagtctaactcagttctttggctttgacacagagacattttctctagctgtgaatttactggacagattcctgtctaaaatgaaggtacagcccaagcaccttgggtgtgttggactgagctgcttttatttggctgtaaaatcaatagaagaggaaaggaatgtcccattggcaactgacttgatccgaataagtcaatataggtttacggtttcagacttgatgagaatggaaaagattgtattggagaaggtgtgttggaaagtcaaagctactactgcctttcaatttctgcaactgtattattcactccttcaagagaacttgccacttgaaaggagaaatagcattaattttgaaagactagaagctcaactgaaggcatgtcattgcaggatcatattttctaaagcaaagccttctgtgttggcattgtctatcattgcattagagatccaagcacagaagtgtgtagagttaacagaaggaatagaatgtcttcagaaacattccaaggattattacagcaccaaaaaacttctctgaagcctttctccacaaccttgttctatggattccataatgttacaatggatttaagctatgaagcctcaaaacatcacgagataagcatgatggtctcagacttgggaaaactgcctaatattatgctgtagtggaattatgtttagatttgaattcatctgtgaagcattcaaatcaaagctaaaagcctaaatgtgaaatgctaatgacaagcctgagaaggtaaactgtgaatcttcatttctatcattgatctaactttagatattggatcaatatatttaggtggtattgaaaatgctattggaggagtcacactaatactatcaactatcagtcttcccacagcttcaatcactgtcattattctaatcctactcctacttaaattttaagttatgaggtttatgtcaaaagcaacatttcacaaatgtacttttaaggcataataagggttaacattctaggcagtataaacacaccccataatgcaagtaataggtaatctagagatgtggactttattgctatatgggaattacatttaaatttgagggcattttatataaagaaaaatacagacctataaagtttggcatattcattaagttatcttttaatatttttttctagaaaacaggtgacatttgtatctacgataaaaatttttatacagaacctactgcctcaaactgaatcccatcaagaaaactagtttctattgtattagtaactcaaaataaattatcacttcgaaaacttgctttcccacactaaggtaagttcagactagattgaacactccagaattttttactacagactgtttttaagttagaagtgatggcaattttataaatagagaatatacttccactgatgcccttactgtgccaaaacaaaaatcttaagaaaagcaagtagacaccttcataactatgaatgaagctgctgaagtagtgtttaggatcctccatggcagttagtgaatgtaagaagtacagtgttaaagtgttgtaaacagttactcagtgcaatgtatagcctgagtctatccatgatggctatatccaatttgacatcacgttatggatcagtacacaatgaaaaaccaaagaaccacagtatatcttattcttaacttttgtaaaccatgttttatgggtaactttttagttttcccaaaaggctgataaatttcaatattttgaatacatcattgttaattttgagttggcagaggtaaactaaccaactaccattatgttttagtactaagggatatacctttcaataaagttaatgaaattcaa

SEQ ID NO: 302227 - DNA, 2552 bp, Homo sapiens
caatatattcctcgttagggcaggcgcggcccttcggctccgagctgaccctgatcagggccgagttgtctcggcggcgctgccgaggcctccacccaggacagtccccctccccgggcctctctcctcttgcctacgagtcccctctcctcgtaggcctctcggatctgatatcgtggggtgaggtgagcaggcccggggagggtggttaccgctgaggagctgcagtctctgtcaagatgatagaggtactgacaacaactgactctcagaaactgctacaccagctgaatgccctgttggaacaggagtctagatgtcagccaaaggtctgtggtttgagactaattgagtctgcacacgataatggcctcagaatgactgcaagactaagggactttgaagtaaaagatcttcttagtctaactcagttctttggctttgacacagagacattttctctagctgtgaatttactggacagattcctgtctaaaatgaaggtacagcccaagcaccttgggtgtgttggactgagctgcttttatttggctgtaaaatcaatagaagaggaaaggaatgtcccattggcaactgacttgatccgaataagtcaatataggtttacggtttcagacttgatgagaatggaaaagattgtattggagaaggtgtgttggaaagtcaaagctactactgcctttcaatttctgcaactgtattattcactccttcaagagaacttgccacttgaaaggagaaatagcattaattttgaaagactagaagctcaactgaaggcatgtcattgcaggatcatattttctaaagcaaagccttctgtgttggcattgtctatcattgcattagagatccaagcacagaagtgtgtagagttaacagaaggaatagaatgtcttcagaaacattccaagataaatggcagagatctgaccttctggcaagagcttgtatccaaatgtttaactgaatattcatcaaataagtgttccaaaccaaatgttcagaagttgaaatggattgtttctgggcgtactgcacggcaattgaagcatagctactacagaataactcaccttccaacaattcctgaaatggtcccttaactggattattacagcaccaaaaaacttctctgaagcctttctccacaaccttgttctatggattccataatgttacaatggatttaagctatgaagcctcaaaacatcacgagataagcatgatggtctcagacttgggaaaactgcctaatattatgctgtagtggaattatgtttagatttgaattcatctgtgaagcattcaaatcaaagctaaaagcctaaatgtgaaatgctaatgacaagcctgagaaggtaaactgtgaatcttcatttctatcattgatctaactttagatattggatcaatatatttaggtggtattgaaaatgctattggaggagtcacactaatactatcaactatcagtcttcccacagcttcaatcactgtcattattctaatcctactcctacttaaattttaagttatgaggtttatgtcaaaagcaacatttcacaaatgtacttttaaggcataataagggttaacattctaggcagtataaacacaccccataatgcaagtaataggtaatctagagatgtggactttattgctatatgggaattacatttaaatttgagggcattttatataaagaaaaatacagacctataaagtttggcatattcattaagttatcttttaatatttttttctagaaaacaggtgacatttgtatctacgataaaaatttttatacagaacctactgcctcaaactgaatcccatcaagaaaactagtttctattgtattagtaactcaaaataaattatcacttcgaaaacttgctttcccacactaagtttcagcccacttgaagttttgtgccagccttcttacctaattaaacaacacttcagcagcgtggttgctaatgccaggtaaccaccatgtgttatgttagcctgcttggatcaattgtaattattactggaattgaattaattaatatgattttgaacagttcatgttcaaactaacatcctgtaaagtagacactgcaaggagttactgatgaaagaaaagttgttcataaaagaagcctccttttataattgacttgccttagacttatttaataatgtttcatagtattttttaaaaagtatctgaaccttgtacatatttacaattatgagacatcctatctaaaaatttatattttcgatttaacatttgtggctggcagtgataatttttactctctggtactatgaatcatctcattaaaatcctctcaactgaatgacattatcccaatttgcaaatgaaagagagacagagaacctaatgatttgcccctggtctatacctggtacttggaggtaggattcaaagccaggcagttctgactccagaggctgtgctcttaaccactctatacattacctctcaaaatagaagattaattggactc

SEQ ID NO: 302228 - DNA, 2419 bp, Homo sapiens
caatatattcctcgttagggcaggcgcggcccttcggctccgagctgaccctgatcagggccgagttgtctcggcggcgctgccgaggcctccacccaggacagtccccctccccgggcctctctcctcttgcctacgagtcccctctcctcgtaggcctctcggatctgatatcgtggggtgaggtgagcaggcccggggagggtggttaccgctgaggagctgcagtctctgtcaagatgatagaggtactgacaacaactgactctcagaaactgctacaccagctgaatgccctgttggaacaggagtctagatgtcagccaaaggtctgtggtttgagactaattgagtctgcacacgataatggcctcagaatgactgcaagactaagggactttgaagtaaaagatcttcttagtctaactcagttctttggctttgacacagagacattttctctagctgtgaatttactggacagattcctgtctaaaatgaaggtacagcccaagcaccttgggtgtgttggactgagctgcttttatttggctgtaaaatcaatagaagaggaaaggaatgtcccattggcaactgacttgatccgaataagtcaatataggtttacggtttcagacttgatgagaatggaatttctgcaactgtattattcactccttcaagagaacttgccacttgaaaggagaaatagcattaattttgaaagactagaagctcaactgaaggcatgtcattgcaggatcatattttctaaagcaaagccttctgtgttggcattgtctatcattgcattagagatccaagcacagaagtgtgtagagttaacagaaggaatagaatgtcttcagaaacattccaagataaatggcagagatctgaccttctggcaagagcttgtatccaaatgtttaactgaatattcatcaaataagtgttccaaaccaaatgttcagaagttgaaatggattgtttctgggcgtactgcacggcaattgaagcatagctactacagaataactcaccttccaacaattcctgaaatggtcccttaactggattattacagcaccaaaaaacttctctgaagcctttctccacaaccttgttctatggattccataatgttacaatggatttaagctatgaagcctcaaaacatcacgagataagcatgatggtctcagacttgggaaaactgcctaatattatgctgtagtggaattatgtttagatttgaattcatctgtgaagcattcaaatcaaagctaaaagcctaaatgtgaaatgctaatgacaagcctgagaaggtaaactgtgaatcttcatttctatcattgatctaactttagatattggatcaatatatttaggtggtattgaaaatgctattggaggagtcacactaatactatcaactatcagtcttcccacagcttcaatcactgtcattattctaatcctactcctacttaaattttaagttatgaggtttatgtcaaaagcaacatttcacaaatgtacttttaaggcataataagggttaacattctaggcagtataaacacaccccataatgcaagtaataggtaatctagagatgtggactttattgctatatgggaattacatttaaatttgagggcattttatataaagaaaaatacagacctataaagtttggcatattcattaagttatcttttaatatttttttctagaaaacaggtgacatttgtatctacgataaaaatttttatacagaacctactgcctcaaactgaatcccatcaagaaaactagtttctattgtattagtaactcaaaataaattatcacttcgaaaacttgctttcccacactaaggtaagttcagactagattgaacactccagaattttttactacagactgtttttaagttagaagtgatggcaattttataaatagagaatatacttccactgatgcccttactgtgccaaaacaaaaatcttaagaaaagcaagtagacaccttcataactatgaatgaagctgctgaagtagtgtttaggatcctccatggcagttagtgaatgtaagaagtacagtgttaaagtgttgtaaacagttactcagtgcaatgtatagcctgagtctatccatgatggctatatccaatttgacatcacgttatggatcagtacacaatgaaaaaccaaagaaccacagtatatcttattcttaacttttgtaaaccatgttttatgggtaactttttagttttcccaaaaggctgataaatttcaatattttgaatacatcattgttaattttgagttggcagaggtaaactaaccaactaccattatgttttagtactaagggatatacctttcaataaagttaatgaaattcaa

SEQ ID NO: 302229 - DNA, 2141 bp, Homo sapiens
caatatattcctcgttagggcaggcgcggcccttcggctccgagctgaccctgatcagggccgagttgtctcggcggcgctgccgaggcctccacccaggacagtccccctccccgggcctctctcctcttgcctacgagtcccctctcctcgtaggcctctcggatctgatatcgtggggtgaggtgagcaggcccggggagggtggttaccgctgaggagctgcagtctctgtcaagatgatagaggtactgacaacaactgactctcagaaactgctacaccagctgaatgccctgttggaacaggagtctagatgtcagccaaaggtctgtggtttgagactaattgagtctgcacacgataatggcctcagaatgactgcaagactaagggactttgaagtaaaagatcttcttagtctaactcagttctttggctttgacacagagacattttctctagctgtgaatttactggacagattcctgtctaaaatgaaggtacagcccaagcaccttgggtgtgttggactgagctgcttttatttggctgtaaaatcaatagaagaggaaaggaatgtcccattggcaactgacttgatccgaataagtcaatataggtttacggtttcagacttgatgagaatggaaaagattgtattggagaaggtgtgttggaaagtcaaagctactactgcctttcaatttctgcaactgtattattcactccttcaagagaacttgccacttgaaaggagaaatagcattaattttgaaagactagaagctcaactgaaggcatgtcattgcaggatcatattttctaaagcaaagccttctgtgttggcattgtctatcattgcattagagatccaagcacagaagtgtgtagagttaacagaaggaatagaatgtcttcagaaacattccaagataaatggcagagatctgaccttctggcaagagcttgtatccaaatgtttaactgaatattcatcaaataagtgttccaaaccaaatgttcagaagttgaaatggattgtttctgggcgtactgcacggcaattgaagcatagctactacagaataactcaccttccaacaattcctgaaatggtcccttaactggattattacagcaccaaaaaacttctctgaagcctttctccacaaccttgttctatggattccataatgttacaatggatttaagctatgaagcctcaaaacatcacgagataagcatgatggtctcagacttgggaaaactgcctaatattatgctgtagtggaattatgtttagatttgaattcatctgtgaagcattcaaatcaaagctaaaagcctaaatgtgaaatgctaatgacaagcctgagaagaaaacaggtgacatttgtatctacgataaaaatttttatacagaacctactgcctcaaactgaatcccatcaagaaaactagtttctattgtattagtaactcaaaataaattatcacttcgaaaacttgctttcccacactaagtttcagcccacttgaagttttgtgccagccttcttacctaattaaacaacacttcagcagcgtggttgctaatgccaggtaaccaccatgtgttatgttagcctgcttggatcaattgtaattattactggaattgaattaattaatatgattttgaacagttcatgttcaaactaacatcctgtaaagtagacactgcaaggagttactgatgaaagaaaagttgttcataaaagaagcctccttttataattgacttgccttagacttatttaataatgtttcatagtattttttaaaaagtatctgaaccttgtacatatttacaattatgagacatcctatctaaaaatttatattttcgatttaacatttgtggctggcagtgataatttttactctctggtactatgaatcatctcattaaaatcctctcaactgaatgacattatcccaatttgcaaatgaaagagagacagagaacctaatgatttgcccctggtctatacctggtacttggaggtaggattcaaagccaggcagttctgactccagaggctgtgctcttaaccactctatacattacctctcaaaatagaagattaattggactc

SEQ ID NO: 302230 - DNA, 877 bp, Homo sapiens
cggacgcgtgggtcgacccacgcgtccctaggcagtataaacacaccccataatgcaagtaataggtaatctagagatgtggactttattgctatatgggaattacatttaaatttgagggcattttatataaagaaaaatacagacctataaagtttggcatattcattaagttatcttttaatatttttttctagaaaacaggtgacatttgtatctacgataaaaatttttatacagaacctactgcctcaaactgaatcccatcaagaaaactagtttctattgtattagtaactcaaaataaattatcacttcgaaaacttgctttcccacactaaggtaagttcagactagattgaacactccagaattttttactacagactgtttttaagttagaagtgatggcaattttataaatagagaatatacttccactgatgcccttactgtgccaaaacaaaaatcttaagaaaagcaagtagacaccttcataactatgaatgaagctgctgaagtagtgtttaggatcctccatggcagttagtgaatgtaagaagtacagtgttaaagtgttgtaaacagttactcagtgcaatgtatagcctgagtctatccatgatggctatatccaatttgacatcacgttatggatcagtacacaatgaaaaaccaaagaaccacagtatatcttattcttaacttttgtaaaccatgttttatgggtaactttttagttttcccaaaaggctgataaatttcaatattttgaatacatcattgttaattttgagttggcagaggtaaactaaccaactaccattatgttttagtactaagggatatacctttcaataaagttaatgaaattcaa

SEQ ID NO: 302231 - DNA, 1407 bp, Homo sapiens
  misc_feature (418)..(418): n is a, c, g, or t
aaggttaaaaccctggttttttttaacccattatacaaaccgtgttttaagaagccatccttgttaagacttttgcttgataaaccaagtttttacactcttaaaatcttgggacccattttggaaagggaaattccccctttatagaaaccattcttaaatcttttttcaaggccaaggcctttttcaaagatgttctaaattaaggttttaattggacagggggtgctcctttacctttgtgggccttttttttcctgttcaaagcatcttttttggattttttggggggcaaaaccaaaggtttaaaagggggcccaattccccaagttggaaaaggttaattaatttttgcctgccgtgaagtgtttaattaagaaaaaattttgccccaattcagctttctaacttaaaaacnagtctgtagtaaaaaattctggagtgttcaatctagtctgaacttaccttagtgtgggaaagcaagttttcgaagtgataatttattttgagttactaatacaatagaaactagttttcttgatgggattcagtttgagctaggcagtataaacacaccccataatgcaagtaataggtaatctagagatgtggactttattgctatatgggaattacatttaaatttgagggcattttatataaagaaaaatacagacctataaagtttggcatattcattaagttatcttttaatatttttttctagaaaacaggtgacatttgtatctacgataaaaatttttatacagaacctactgcctcaaactgaatcccatcaagaaaactagtttctattgtattagtaactcaaaataaattatcacttcgaaaacttgctttcccacactaaggtaagttcagactagattgaacactccagaattttttactacagactgtttttaagttagaagtgatggcaattttataaatagagaatatacttccactgatgcccttactgtgccaaaacaaaaatcttaagaaaagcaagtagacaccttcataactatgaatgaagctgctgaagtagtgtttaggatcctccatggcagttagtgaatgtaagaagtacagtgttaaagtgttgtaaacagttactcagtgcaatgtatagcctgagtctatccatgatggctatatccaatttgacatcacgttatggatcagtacacaatgaaaaaccaaagaaccacagtatatcttattcttaacttttgtaaaccatgttttatgggtaactttttagttttcccaaaaggctgataaatttcaatattttgaatacatcattgttaattttgagttggcagaggtaaactaaccaactaccattatgttttagtactaagggatatacctttcaataaagttaatgaaattcaa

SEQ ID NO: 302232 - DNA, 312 bp, Homo sapiens
ttaggatgtgaccaacttgtagaagggaaataaataacagatggcactttgcaatgacttagatgcactagccgcattgggggatgggaggcttataaatcatttcttggcccagtgcaaagatggccaaggaaagcaggaaggactactcttacactccttgctggtctttttttctatatatagatgatagaggtactgacaacaactgactctcagaaactgctacaccagctgaatgccctgttggaacaggagtctagatgtcagccaaaggtctgtggtttgagactaattgagtctgcacacgat

SEQ ID NO: 302233 - DNA, 446 bp, Homo sapiens
cggagttctagattatcctttatgttttaattgaaataaggtagagtcatgggcttactggttttgtttttgattttttaggtacagcccaagcaccttgggtgtgttggactgagctgcttttatttggctgtaaaatcaatagaagaggaaaggaatgtcccattggcaactgacttgatccgaataagtcaatataggtttacggtttcagacttgatgagaatggaaaagattgtattggagaaggtgtgttggaaagtcaaagctactactgcctttcaatttctgcaactgtattattcactccttcaagagaacttgccacttgaaaggtaagtgacctttgttttgaacaagagacatttggaaatcagaatggtattgtatggatattgcataaaatcagtatcctcatagaattctaataaaaataagtaaaatga

SEQ ID NO: 302234 - DNA, 429 bp, Homo sapiens
gggtcggagttctagattatcctttatgttttaattgaaataaggtagagtcatgggcttactggttttgtttttgattttttaggtacagcccaagcaccttgggtgtgttggactgagctgcttttatttggctgtaaaatcaatagaagaggaaaggaatgtcccattggcaactgacttgatccgaataagtcaatataggtttacggtttcagacttgatgagaatggaaaagattgtattggagaaggtgtgttggaaagtcaaagctactactgcctttcaatttctgcaactgtattattcactccttcaagagaacttgccacttgaaaggtaagtgacctttgttttgaacaagagacatttggaaatcagaatggtattgtatggatattgcataaaatcagtatcctcatagaattc

SEQ ID NO: 302235 - DNA, 490 bp, Homo sapiens
tgtagaggcagtgttgtcactgtgttgcccaggcggatctcaaactcttgggctcaagtgatctgcccacctcgttctcccaaagtgctgagattacaggcataagccaccgtgcctagcctctaatgtttttttaatagacatagaatgatgacaaataattgtttaatgtgtattaaaagttggtgtttatgcattattaatcccttttatcacttagattcatcactgctatggatgctatccttaatatatatttacttttagtttcagcccacttgaagttttgtgccagccttcttacctaattaaacaacacttcagcagcgtggttgctaatgccaggtaaccaccatgtgttatgttagcctgcttggatcaattgtaattattactggaattgaattaattaatatgattttgaacagttcatgttcaaactaacatcctgtaaagtagacactgcaaggagttactgatgaaagaaaag

SEQ ID NO: 302236 - DNA, 6927 bp, Homo sapiens
  misc_feature (2607)..(2607): n is a, c, g, or t
tgccagggcgacgggagctttccggagctgctggtactcccgattggagacgtagaaccgttacttgtcgagggccttagcggccgccgtgaccctctcggggatcccacgatgttcttctacctgagcaagaaaatttccattcccaataacgtgaagctgcagtgtgtatcctggaacaaggaacaagggttcatagcatgcggtggtgaagatggattactgaaagttttgaaattagagacgcagacagatgatgcaaaattgaggggccttgcagcccccagtaacctttctatgaatcagactcttgaaggtcatagtggttctgttcaagttgtaacatggaatgagcagtatcagaagttgactaccagtgatgaaaacgggcttatcattgtgtggatgttatataaaggctcttggattgaggagatgatcaacaatcgaaataaatcagttgttcgcagtatgagctggaatgctgacggacagaagatctgcattgtatatgaagatggggctgtgatagttggttcagtggatggcaatcgtatttggggaaaagacctgaagggtatacagctatcccatgtaacatggtctgcggacagtaaagtcttactttttggaatggcaaatggggaaatacacatttacgataatcaaggaaattttatgataaaaatgaaactgagttgtttggtgaatgtcactggagctatcagcattgctggaattcattggtaccatggcacagaaggctacgtggagcctgattgcccttgccttgctgtttgctttgataatggaagatgccaaataatgagacatgagaatgaccaaaatcccgttttgattgacactggcatgtacgtagtaggcatccagtggaaccacatgggcagcgtgttagctgtggcaggcttccagaaggcagccatgcaggacaaagatgtgaacattgtgcagttttacactccgtttggtgagcatctgggtactttgaaagttcctggaaaggaaatatctgcactatcttgggaaggaggtggactgaaaattgcactagctgttgattcctttatatattttgcaaacattcgacctaattataagtggggttattgctcaaacactgtagtttatgcatataccagacctgatcgtccagaatattgtgttgtcttctgggatacgaaaaacaatgaaaaatatgttaaatatgtgaagggtctcatttctattactacctgtggagatttctgcattttggctacaaaagctgatgaaaatcatcctcagtttgtactagttctttgtaattctattggtacacccttggatcccaaatacattgatattgtaccattgtttgttgcaatgaccaaaacccatgtgatagcagcctcgaaagaagcattttatacctggcaatatcgtgtggcaaagaagctcacagcattggaaattaatcagatcacacggtctcgaaaagaagggagagaaagaatttatcatgttgatgataccccttctggatcaatggatggtgtgcttgattatagtaaaaccattcaaggcacaagggatccaatttgtgccataactgcatcagataagatattgattgtgggtcgtgaatctggcaccattcagagatacagtctacctaatgttggtttgattcaaaaatattcccttaattgtcgagcctaccagttatccttgaattgcaactctagccgtcttgctatcatagacatctcaggagttctgactttctttgacttggatgctcgagtaacggacagtacgggacagcaagtagttggagagttgttaaaattggaacgaagagatgtctgggatatgaagtgggccaaagataatcctgatttgtttgcaatgatggagaagacaagaatgtatgttttcagaaacttggatcctgaggaacccattcagacctctggatatatttgtaattttgaggatttagaaattaaatctgttcttttggatgagatattaaaggatccagaacatccaaacaaggattacctaattaactttgagattcggtctctgcgagatagccgagcactgattgagaaggttggaattaaagatgcatctcagttcatagaggacaatccacacccccgactttggcgcctactggctgaagcagctcttcagaaactggatctatacactgcagagcaagcatttgtgcgctgcaaagattaccaaggcattaagtttgtgaagcgcttgggcaaactactgagtgagtcaatgaaacaggctgaagttgttggctacttcggcaggtttgaagaggctgaaagaacgtatctcgagatggacagaagggatcttgctattggcctccggctgaaattgggggattggtttagagtactccagctcctgaaaactggatctggtgatgcagatgacagtctcctggaacaagccaacaatgccattggagactactttgctgatcgacaaaagtggttgaatgctgtacaatattatgtacaaggacggaaccaggaacgcttagctgaatgttactatatgttagaggattatgangggttagagaaccttgccatttcacttccagaaaaccacaagttacttccagaaatagcacaaatgtttgtcagagttggaatgtgtgaacaagcagtgactgcatttttgaaatgtagtcaaccaaaggcagcagtagatacctgcgtacatctcaaccaatggaacaaagctgttgaattggctaaaaatcatagtatgaaagaaattggatctctgttagctaggtatgcatctcatttactggaaaagaataaaactcttgatgccatagaactctatcggaaagccaattacttttttgatgcagctaaactgatgtttaagattgcagatgaagaggcaaagaaaggaagtaaacctttacgtgtcaagaagctctatgtactgtcagccttacttatagagcaataccatgaacagatgaagaatgcccagcgaggaaaagttaaaggaaaaagttcagaggccacttctgccttggctggtttgctggaagaagaagttctgtctacaacagatcgtttcacagataatgcatggagaggggcagaggcttaccacttctttatacttgcacagaggcagctctatgagggatgtgtggacactgcactgaagacagctcttcacctgaaagactatgaagacatcatccctcctgtggagatctactctctgctagcactctgcgcatgcgccagcagagcctttgggacttgttcaaaagctttcattaaacttaaatctttagagaccctcagttcagaacagaaacagcagtatgaagaccttgctttagaaatcttcaccaaacatacttcaaaagataacagaaaacctgaattggacagccttatggaaggtggagaagggaaactgccaacatgcgttgccacaggaagcccaatcactgagtatcaattctggatgtgcagtgtatgcaaacacggtgtccttgctcaggaaataagccactacagcttctgccccttatgccatagtccagtgggataaaggaatgataaactgtatataactgtaaaatatatgtagcatatatacatggctatatgctgtatatgtaataaggtttatttctgtgagttttgtatgaaaatcagcctcattatttatagttgaatttttgcacaaaatatatgttaataaaataatttttatggcaatacaactgtgaaataataaggccgattttcatataaatgtatgaaaatcaaccatgttttctctcaccctctctcttttgtttatcttgtttttggttacatgataccatggaaatattccaaataaatttttttctcacagtgtcaaggtaactgaattcattaaaaaatcttgaagggagtagggagtgggggaagcatgggagtggggcaaagttgaatttagagaatttttataacccatgttacaaggaagttaaacaattgtaataatgaaatgagctttctctatagccatatttaattaaataagtgtcgaatgtcttctttattgtattttcagaagtgaggcgatggcattttaagacattttttacaatctgaattgtttctaatagccctattcttctattttaaaacctgtccttttagtctcatttaagagatggcatttggaatttacactttcatatgattgtgcagaaaacttgcctctatttataatgaagataacttaaacagaaatatccattttgtagttatagcttctgttgaaacattgtcactaagttggaccgtttatttacacaagtattgttgagggagtgattttttcttgatatgcgtctgttttcatttattattaatttgaaagataaacagttgtgatccataatggatcatttcttatgtcttttacatagctaataatgttctctgtttatttctcatgaattcccattttgtggctaaagaccagacctttgcactatttcatcaagattattttattgaggtttggcttacatatagtagaggcaatacatagagatacgcaactttgtttttgcagctacaatacactttctcaatctcatatgtttttgtcttgtagagacagagacaagttcagcatgttgcagattgggaatagtgagctatgagaagagatttagagcctagatgagcttaggatagagagtgggctcattggcctaaataaaaagagaagaccagaagtctttgaggtctctgtctctattcatgcgcctcgtggaaaattaccttggtacaatggtagcctctaaatagactgcctcgcaagctattccagaggtcatggaacagaaagccttataaaccaaataaaaattctcaaaatacattggtttattgaaccaatttgcaatacacagtgaggaacaaggagaaagcaatgatagattaacactgttagtgtaacgtgccagtggagtggaaagaccgcaacacctgaatcctgggttttgtaatgtttttatgtcctgactcacattctgtcacatacgctttcccctaatagtcgggttacaaaaaggaccagagtggccgcttgagccagatgactcaatcagatgaaatgtgcctgaggccaacgatgtacacttgctctatagaagggtgtcaggggcaagtacacttcaccacagcaatagcttgcctattagtctgctgagcagtcatgaattttattgtatttcttgggtaaggacaggccagaatgagtgtcaccagtgggtaattgaatcaacttctcacacatactgaaggctttatatgtctcatgcatacttagtgtatcatgaatatttggtatctttgtggcttttcatatttttagtgcttcatgaatatttggtatctcttgctcctttctatctgtggtcacacatacacgctctattaactttgcctaataagtctcctaggttactaacttacttacctaaatgtaacacaatgaattccagctttctcatttgttctataccagaatgggaaatttccccaaatcagaaaatcacatcctaacaaagaagtctgtctaagacagtacatctcctgttgaacttgcatctttccacaggactttctgtttttagggatgagactattctctgcttcatcaaggaaagagaaatgttcagggttgtagggatggcacacttattagttctgcctgtctgaaaggttcctgcaggacagtttggtcagagctgcaattcttagtccatggtctaatgcttgagtatctcttctttccctttcctgtctcaggaatcagctgagaattcattcgattgtcatgcctctagccccttactgtgatttgttggttgcactttcatttgctttagttctagaatcacctgttgactcctcagacttcacctaactttggaaactctcttttggaggcttctcatttccccctaattctgtgctgcctgagccctagaattttcccaccaacgaattattccaggtagatcctaagttgctggatctagttgatatttaaacaatatctagttgatatttctcattcagttggatccagaaaccagtatctctaaaaacaacctctcataccttgtggacctaattttgtgtgcgtgtgtgtgtgcgcgcatatgtatatagacaggcacatcttttttacttttgtaaaagcttatgcctctttggtatctatatctgtgaaagttttaatgatctgccataatgtcttggggacctttgtcttctgtgtaaatggtactagagaaaacacctatattatgagtcaatctagttggttttattcgacatgaaggaaatttccagataacaacactaacaaactctcccttgactagggggacaaagaaaagcaaaactgaccataaaaaacaattacctggtgagaagttgcataaacagaattaggtagtatattgaagacagcatcattaaacagttatgttgttctccttgcaaaaaacatgtactgacttcccgttgagtaatgccaagttgttttttttattataaaacttgcccttcattacatgtttcaaagtggtgtggtgggccaaaatattgaaatgatggaactgactgataaagctgtacaaataagcagtgtgcctaacaagcaacacagtaatgttgacatgcttaattcacaaatgctaatttcattataaattgttttgctaaaatacactttgaaactatttttctgtattccaagagctgagatcttagattttatgtagtattaagtgaaaaaatacgaaaataataaacattgaagaaaaaaaaaaaatgt

SEQ ID NO: 302237 - DNA, 6866 bp, Homo sapiens
  misc_feature (2546)..(2546): n is a, c, g, or t
tgccagggcgacgggagctttccggagctgctggtactcccgattggagacgtagaaccgttacttgtcgagggccttagcggccgccgtgaccctctcggggatcccacgatgttcttctacctgagcaagaaaatttccattcccaataacgtgaagctgcagtgtgtatcctggaacaaggaacaagggttcatagcatgcggtggtgaagatggattactgaaagttttgaaattagagacgcagacagatgatgcaaaattgaggggccttgcagcccccagtaacctttctatgaatcagactcttgaaggtcatagtggttctgttcaagttgtaacatggaatgagcagtatcagaagttgactaccagtgatgaaaacgggcttatcattgtgtggatgttatataaaggctcttggattgaggagatgatcaacaatcgaaataaatcagttgttcgcagtatgagctggaatgctgacggacagaagatctgcattgtatatgaagatggggctgtgatagttggttcagtggatggcaatcgtatttggggaaaagacctgaagggtatacagctatcccatgtaacatggtctgcggacagtaaagtcttactttttggaatggcaaatggggaaatacacatttacgataatcaaggaaattttatgataaaaatgaaactgagttgtttggtgaatgtcactggagctatcagcattgctggaattcattggtaccatggcacagaaggctacgtggagcctgattgcccttgccttgctgtttgctttgataatggaagatgccaaataatgagacatgagaatgaccaaaatcccgttttgattgacactggcatgtacgtagtaggcatccagtggaaccacatgggcagcgtgttagctgtggcaggcttccagaaggcagccatgcaggacaaagatgtgaacattgtgcagttttacactccgtttggtgagcatctgggtactttgaaagttcctggaaaggaaatatctgcactatcttgggaaggaggtggactgaaaattgcactagctgttgattcctttatatattttgcaaacattcgacctaattataagtggggttattgctcaaacactgtagtttatgcatataccagacctgatcgtccagaatattgtgttgtcttctgggatacgaaaaacaatgaaaaatatgttaaatatgtgaagggtctcatttctattactacctgtggagatttctgcattttggctacaaaagctgatgaaaatcatcctcagtaccattgtttgttgcaatgaccaaaacccatgtgatagcagcctcgaaagaagcattttatacctggcaatatcgtgtggcaaagaagctcacagcattggaaattaatcagatcacacggtctcgaaaagaagggagagaaagaatttatcatgttgatgataccccttctggatcaatggatggtgtgcttgattatagtaaaaccattcaaggcacaagggatccaatttgtgccataactgcatcagataagatattgattgtgggtcgtgaatctggcaccattcagagatacagtctacctaatgttggtttgattcaaaaatattcccttaattgtcgagcctaccagttatccttgaattgcaactctagccgtcttgctatcatagacatctcaggagttctgactttctttgacttggatgctcgagtaacggacagtacgggacagcaagtagttggagagttgttaaaattggaacgaagagatgtctgggatatgaagtgggccaaagataatcctgatttgtttgcaatgatggagaagacaagaatgtatgttttcagaaacttggatcctgaggaacccattcagacctctggatatatttgtaattttgaggatttagaaattaaatctgttcttttggatgagatattaaaggatccagaacatccaaacaaggattacctaattaactttgagattcggtctctgcgagatagccgagcactgattgagaaggttggaattaaagatgcatctcagttcatagaggacaatccacacccccgactttggcgcctactggctgaagcagctcttcagaaactggatctatacactgcagagcaagcatttgtgcgctgcaaagattaccaaggcattaagtttgtgaagcgcttgggcaaactactgagtgagtcaatgaaacaggctgaagttgttggctacttcggcaggtttgaagaggctgaaagaacgtatctcgagatggacagaagggatcttgctattggcctccggctgaaattgggggattggtttagagtactccagctcctgaaaactggatctggtgatgcagatgacagtctcctggaacaagccaacaatgccattggagactactttgctgatcgacaaaagtggttgaatgctgtacaatattatgtacaaggacggaaccaggaacgcttagctgaatgttactatatgttagaggattatgangggttagagaaccttgccatttcacttccagaaaaccacaagttacttccagaaatagcacaaatgtttgtcagagttggaatgtgtgaacaagcagtgactgcatttttgaaatgtagtcaaccaaaggcagcagtagatacctgcgtacatctcaaccaatggaacaaagctgttgaattggctaaaaatcatagtatgaaagaaattggatctctgttagctaggtatgcatctcatttactggaaaagaataaaactcttgatgccatagaactctatcggaaagccaattacttttttgatgcagctaaactgatgtttaagattgcagatgaagaggcaaagaaaggaagtaaacctttacgtgtcaagaagctctatgtactgtcagccttacttatagagcaataccatgaacagatgaagaatgcccagcgaggaaaagttaaaggaaaaagttcagaggccacttctgccttggctggtttgctggaagaagaagttctgtctacaacagatcgtttcacagataatgcatggagaggggcagaggcttaccacttctttatacttgcacagaggcagctctatgagggatgtgtggacactgcactgaagacagctcttcacctgaaagactatgaagacatcatccctcctgtggagatctactctctgctagcactctgcgcatgcgccagcagagcctttgggacttgttcaaaagctttcattaaacttaaatctttagagaccctcagttcagaacagaaacagcagtatgaagaccttgctttagaaatcttcaccaaacatacttcaaaagataacagaaaacctgaattggacagccttatggaaggtggagaagggaaactgccaacatgcgttgccacaggaagcccaatcactgagtatcaattctggatgtgcagtgtatgcaaacacggtgtccttgctcaggaaataagccactacagcttctgccccttatgccatagtccagtgggataaaggaatgataaactgtatataactgtaaaatatatgtagcatatatacatggctatatgctgtatatgtaataaggtttatttctgtgagttttgtatgaaaatcagcctcattatttatagttgaatttttgcacaaaatatatgttaataaaataatttttatggcaatacaactgtgaaataataaggccgattttcatataaatgtatgaaaatcaaccatgttttctctcaccctctctcttttgtttatcttgtttttggttacatgataccatggaaatattccaaataaatttttttctcacagtgtcaaggtaactgaattcattaaaaaatcttgaagggagtagggagtgggggaagcatgggagtggggcaaagttgaatttagagaatttttataacccatgttacaaggaagttaaacaattgtaataatgaaatgagctttctctatagccatatttaattaaataagtgtcgaatgtcttctttattgtattttcagaagtgaggcgatggcattttaagacattttttacaatctgaattgtttctaatagccctattcttctattttaaaacctgtccttttagtctcatttaagagatggcatttggaatttacactttcatatgattgtgcagaaaacttgcctctatttataatgaagataacttaaacagaaatatccattttgtagttatagcttctgttgaaacattgtcactaagttggaccgtttatttacacaagtattgttgagggagtgattttttcttgatatgcgtctgttttcatttattattaatttgaaagataaacagttgtgatccataatggatcatttcttatgtcttttacatagctaataatgttctctgtttatttctcatgaattcccattttgtggctaaagaccagacctttgcactatttcatcaagattattttattgaggtttggcttacatatagtagaggcaatacatagagatacgcaactttgtttttgcagctacaatacactttctcaatctcatatgtttttgtcttgtagagacagagacaagttcagcatgttgcagattgggaatagtgagctatgagaagagatttagagcctagatgagcttaggatagagagtgggctcattggcctaaataaaaagagaagaccagaagtctttgaggtctctgtctctattcatgcgcctcgtggaaaattaccttggtacaatggtagcctctaaatagactgcctcgcaagctattccagaggtcatggaacagaaagccttataaaccaaataaaaattctcaaaatacattggtttattgaaccaatttgcaatacacagtgaggaacaaggagaaagcaatgatagattaacactgttagtgtaacgtgccagtggagtggaaagaccgcaacacctgaatcctgggttttgtaatgtttttatgtcctgactcacattctgtcacatacgctttcccctaatagtcgggttacaaaaaggaccagagtggccgcttgagccagatgactcaatcagatgaaatgtgcctgaggccaacgatgtacacttgctctatagaagggtgtcaggggcaagtacacttcaccacagcaatagcttgcctattagtctgctgagcagtcatgaattttattgtatttcttgggtaaggacaggccagaatgagtgtcaccagtgggtaattgaatcaacttctcacacatactgaaggctttatatgtctcatgcatacttagtgtatcatgaatatttggtatctttgtggcttttcatatttttagtgcttcatgaatatttggtatctcttgctcctttctatctgtggtcacacatacacgctctattaactttgcctaataagtctcctaggttactaacttacttacctaaatgtaacacaatgaattccagctttctcatttgttctataccagaatgggaaatttccccaaatcagaaaatcacatcctaacaaagaagtctgtctaagacagtacatctcctgttgaacttgcatctttccacaggactttctgtttttagggatgagactattctctgcttcatcaaggaaagagaaatgttcagggttgtagggatggcacacttattagttctgcctgtctgaaaggttcctgcaggacagtttggtcagagctgcaattcttagtccatggtctaatgcttgagtatctcttctttccctttcctgtctcaggaatcagctgagaattcattcgattgtcatgcctctagccccttactgtgatttgttggttgcactttcatttgctttagttctagaatcacctgttgactcctcagacttcacctaactttggaaactctcttttggaggcttctcatttccccctaattctgtgctgcctgagccctagaattttcccaccaacgaattattccaggtagatcctaagttgctggatctagttgatatttaaacaatatctagttgatatttctcattcagttggatccagaaaccagtatctctaaaaacaacctctcataccttgtggacctaattttgtgtgcgtgtgtgtgtgcgcgcatatgtatatagacaggcacatcttttttacttttgtaaaagcttatgcctctttggtatctatatctgtgaaagttttaatgatctgccataatgtcttggggacctttgtcttctgtgtaaatggtactagagaaaacacctatattatgagtcaatctagttggttttattcgacatgaaggaaatttccagataacaacactaacaaactctcccttgactagggggacaaagaaaagcaaaactgaccataaaaaacaattacctggtgagaagttgcataaacagaattaggtagtatattgaagacagcatcattaaacagttatgttgttctccttgcaaaaaacatgtactgacttcccgttgagtaatgccaagttgttttttttattataaaacttgcccttcattacatgtttcaaagtggtgtggtgggccaaaatattgaaatgatggaactgactgataaagctgtacaaataagcagtgtgcctaacaagcaacacagtaatgttgacatgcttaattcacaaatgctaatttcattataaattgttttgctaaaatacactttgaaactatttttctgtattccaagagctgagatcttagattttatgtagtattaagtgaaaaaatacgaaaataataaacattgaagaaaaaaaaaaaatgt

SEQ ID NO: 302238 - DNA, 4956 bp, Homo sapiens
  misc_feature (38)..(38): n is a, c, g, or t
  misc_feature (56)..(56): n is a, c, g, or t
  misc_feature (636)..(636): n is a, c, g, or t
ttaatagacgtttttgttttgacgagcccgccgcgtgntatgtttaagggtttggnaggattctgggatccagaacatccaaacaaggattacctaattaactttgagattcggtctctgcgagatagccgagcactgattgagaaggttggaattaaagatgcatctcagttcatagaggacaatccacacccccgactttggcgcctactggctgaagcagctcttcagaaactggatctatacactgcagagcaagcatttgtgcgctgcaaagattaccaaggcattaagtttgtgaagcgcttgggcaaactactgagtgagtcaatgaaacaggctgaagttgttggctacttcggcaggtttgaagaggctgaaagaacgtatctcgagatggacagaagggatcttgctattggcctccggctgaaattgggggattggtttagagtactccagctcctgaaaactggatctggtgatgcagatgacagtctcctggaacaagccaacaatgccattggagactactttgctgatcgacaaaagtggttgaatgctgtacaatattatgtacaaggacggaaccaggaacgcttagctgaatgttactatatgttagaggattatgangggttagagaaccttgccatttcacttccagaaaaccacaagttacttccagaaatagcacaaatgtttgtcagagttggaatgtgtgaacaagcagtgactgcatttttgaaatgtagtcaaccaaaggcagcagtagatacctgcgtacatctcaaccaatggaacaaagctgttgaattggctaaaaatcatagtatgaaagaaattggatctctgttagctaggtatgcatctcatttactggaaaagaataaaactcttgatgccatagaactctatcggaaagccaattacttttttgatgcagctaaactgatgtttaagattgcagatgaagaggcaaagaaaggaagtaaacctttacgtgtcaagaagctctatgtactgtcagccttacttatagagcaataccatgaacagatgaagaatgcccagcgaggaaaagttaaaggaaaaagttcagaggccacttctgccttggctggtttgctggaagaagaagttctgtctacaacagatcgtttcacagataatgcatggagaggggcagaggcttaccacttctttatacttgcacagaggcagctctatgagggatgtgtggacactgcactgaagacagctcttcacctgaaagactatgaagacatcatccctcctgtggagatctactctctgctagcactctgcgcatgcgccagcagagcctttgggacttgttcaaaagctttcattaaacttaaatctttagagaccctcagttcagaacagaaacagcagtatgaagaccttgctttagaaatcttcaccaaacatacttcaaaagataacagaaaacctgaattggacagccttatggaaggtggagaagggaaactgccaacatgcgttgccacaggaagcccaatcactgagtatcaattctggatgtgcagtgtatgcaaacacggtgtccttgctcaggaaataagccactacagcttctgccccttatgccatagtccagtgggataaaggaatgataaactgtatataactgtaaaatatatgtagcatatatacatggctatatgctgtatatgtaataaggtttatttctgtgagttttgtatgaaaatcagcctcattatttatagttgaatttttgcacaaaatatatgttaataaaataatttttatggcaatacaactgtgaaataataaggccgattttcatataaatgtatgaaaatcaaccatgttttctctcaccctctctcttttgtttatcttgtttttggttacatgataccatggaaatattccaaataaatttttttctcacagtgtcaaggtaactgaattcattaaaaaatcttgaagggagtagggagtgggggaagcatgggagtggggcaaagttgaatttagagaatttttataacccatgttacaaggaagttaaacaattgtaataatgaaatgagctttctctatagccatatttaattaaataagtgtcgaatgtcttctttattgtattttcagaagtgaggcgatggcattttaagacattttttacaatctgaattgtttctaatagccctattcttctattttaaaacctgtccttttagtctcatttaagagatggcatttggaatttacactttcatatgattgtgcagaaaacttgcctctatttataatgaagataacttaaacagaaatatccattttgtagttatagcttctgttgaaacattgtcactaagttggaccgtttatttacacaagtattgttgagggagtgattttttcttgatatgcgtctgttttcatttattattaatttgaaagataaacagttgtgatccataatggatcatttcttatgtcttttacatagctaataatgttctctgtttatttctcatgaattcccattttgtggctaaagaccagacctttgcactatttcatcaagattattttattgaggtttggcttacatatagtagaggcaatacatagagatacgcaactttgtttttgcagctacaatacactttctcaatctcatatgtttttgtcttgtagagacagagacaagttcagcatgttgcagattgggaatagtgagctatgagaagagatttagagcctagatgagcttaggatagagagtgggctcattggcctaaataaaaagagaagaccagaagtctttgaggtctctgtctctattcatgcgcctcgtggaaaattaccttggtacaatggtagcctctaaatagactgcctcgcaagctattccagaggtcatggaacagaaagccttataaaccaaataaaaattctcaaaatacattggtttattgaaccaatttgcaatacacagtgaggaacaaggagaaagcaatgatagattaacactgttagtgtaacgtgccagtggagtggaaagaccgcaacacctgaatcctgggttttgtaatgtttttatgtcctgactcacattctgtcacatacgctttcccctaatagtcgggttacaaaaaggaccagagtggccgcttgagccagatgactcaatcagatgaaatgtgcctgaggccaacgatgtacacttgctctatagaagggtgtcaggggcaagtacacttcaccacagcaatagcttgcctattagtctgctgagcagtcatgaattttattgtatttcttgggtaaggacaggccagaatgagtgtcaccagtgggtaattgaatcaacttctcacacatactgaaggctttatatgtctcatgcatacttagtgtatcatgaatatttggtatctttgtggcttttcatatttttagtgcttcatgaatatttggtatctcttgctcctttctatctgtggtcacacatacacgctctattaactttgcctaataagtctcctaggttactaacttacttacctaaatgtaacacaatgaattccagctttctcatttgttctataccagaatgggaaatttccccaaatcagaaaatcacatcctaacaaagaagtctgtctaagacagtacatctcctgttgaacttgcatctttccacaggactttctgtttttagggatgagactattctctgcttcatcaaggaaagagaaatgttcagggttgtagggatggcacacttattagttctgcctgtctgaaaggttcctgcaggacagtttggtcagagctgcaattcttagtccatggtctaatgcttgagtatctcttctttccctttcctgtctcaggaatcagctgagaattcattcgattgtcatgcctctagccccttactgtgatttgttggttgcactttcatttgctttagttctagaatcacctgttgactcctcagacttcacctaactttggaaactctcttttggaggcttctcatttccccctaattctgtgctgcctgagccctagaattttcccaccaacgaattattccaggtagatcctaagttgctggatctagttgatatttaaacaatatctagttgatatttctcattcagttggatccagaaaccagtatctctaaaaacaacctctcataccttgtggacctaattttgtgtgcgtgtgtgtgtgcgcgcatatgtatatagacaggcacatcttttttacttttgtaaaagcttatgcctctttggtatctatatctgtgaaagttttaatgatctgccataatgtcttggggacctttgtcttctgtgtaaatggtactagagaaaacacctatattatgagtcaatctagttggttttattcgacatgaaggaaatttccagataacaacactaacaaactctcccttgactagggggacaaagaaaagcaaaactgaccataaaaaacaattacctggtgagaagttgcataaacagaattaggtagtatattgaagacagcatcattaaacagttatgttgttctccttgcaaaaaacatgtactgacttcccgttgagtaatgccaagttgttttttttattataaaacttgcccttcattacatgtttcaaagtggtgtggtgggccaaaatattgaaatgatggaactgactgataaagctgtacaaataagcagtgtgcctaacaagcaacacagtaatgttgacatgcttaattcacaaatgctaatttcattataaattgttttgctaaaatacactttgaaactatttttctgtattccaagagctgagatcttagattttatgtagtattaagtgaaaaaatacgaaaataataaacattgaagaaaaaaaaaaaatgt

SEQ ID NO: 302239 - DNA, 1533 bp, Homo sapiens
tgccagggcgacgggagctttccggagctgctggtactcccgattggagacgtagaaccgttacttgtcgagggccttagcggccgccgtgaccctctcggggatcccacgatgttcttctacctgagcaagaaaatttccattcccaataacgtgaagctgcagtgtgtatcctggaacaaggaacaagggttcatagcatgcggtggtgaagatggattactgaaagttttgaaattagagacgcagacagatgatgcaaaattgaggggccttgcagcccccagtaacctttctatgaatcagactcttgaaggtcatagtggttctgttcaagttgtaacatggaatgagcagtatcagaagttgactaccagtgatgaaaacgggcttatcattgtgtggatgttatataaaggctcttggattgaggagatgatcaacaatcgaaataaatcagttgttcgcagtatgagctggaatgctgacggacagaagatctgcattgtatatgaagatggggctgtgatagttggttcagtggatggcaatcgtatttggggaaaagacctgaagggtatacagctatcccatgtaacatggtctgcggacagtaaagtcttactttttggaatggcaaatggggaaatacacatttacgataatcaaggaaattttatgataaaaatgaaactgagttgtttggtgaatgtcactggagctatcagcattgctggaattcattggtaccatggcacagaaggctacgtggagcctgattgcccttgccttgctgtttgctttgataatggaagatgccaaataatgagacatgagaatgaccaaaatcccgttttgattgacactggcatgtacgtagtaggcatccagtggaaccacatgggcagcgtgttagctgtggcaggcttccagaaggcagccatgcaggacaaagatgtgaacattgtgcagttttacactccgtttggtgagcatctgggtactttgaaagttcctggaaaggaaatatctgcactatcttgggaaggaggtggactgaaaattgcactagctgttgattcctttatatattttgcaaacattcgacctaattataagtggggttattgctcaaacactgtagtttatgcatataccagacctgatcgtccagaatattgtgttgtcttctgggatacgaaaaacaatgaaaaatatgttaaatatgtgaagggtctcatttctattactacctgtggagatttctgcattttggctacaaaagctgatgaaaatcatcctcaggtaggtgtttcttgatatcttaagacatagctgggctaactgcttgggttatagttttctaccttttcaagcatggcctctacactggcaagtacatcaaaacattgggtctgttggcactattggtctagaccaattttggaaaactctgtgactccattgatgctgtgtccctgattttttttttcttcaagcagctaatcttatggcaattcatactgactggtt

SEQ ID NO: 302240 - DNA, 1952 bp, Homo sapiens
tgccagggcgacgggagctttccggagctgctggtactcccgattggagacgtagaaccgttacttgtcgagggccttagcggccgccgtgaccctctcggggatcccacgatgttcttctacctgagcaagaaaatttccattcccaataacgtgaagctgcagtgtgtatcctggaacaaggaacaagggttcatagcatgcggtggtgaagatggattactgaaagttttgaaattagagacgcagacagatgatgcaaaattgaggggccttgcagcccccagtaacctttctatgaatcagactcttgaaggtcatagtggttctgttcaagttgtaacatggaatgagcagtatcagaagttgactaccagtgatgaaaacgggcttatcattgtgtggatgttatataaaggctcttggattgaggagatgatcaacaatcgaaataaatcagttgttcgcagtatgagctggaatgctgacggacagaagatctgcattgtatatgaagatggggctgtgatagttggttcagtggatggcaatcgtatttggggaaaagacctgaagggtatacagctatcccatgtaacatggtctgcggacagtaaagtcttactttttggaatggcaaatggggaaatacacatttacgataatcaaggaaattttatgataaaaatgaaactgagttgtttggtgaatgtcactggagctatcagcattgctggaattcattggtaccatggcacagaaggctacgtggagcctgattgcccttgccttgctgtttgctttgataatggaagatgccaaataatgagacatgagaatgaccaaaatcccgttttgattgacactggcatgtacgtagtaggcatccagtggaaccacatgggcagcgtgttagctgtggcaggcttccagaaggcagccatgcaggacaaagatgtgaacattgtgcagttttacactccgtttggtgagcatctgggtactttgaaagttcctggaaaggaaatatctgcactatcttgggaaggaggtggactgaaaattgcactagctgttgattcctttatatattttgcaaacattcgacctaattataagtggggttattgctcaaacactgtagtttatgcatataccagacctgatcgtccagaatattgtgttgtcttctgggatacgaaaaacaatgaaaaatatgttaaatatgtgaagggtctcatttctattactacctgtggagatttctgcattttggctacaaaagctgatgaaaatcatcctcagtaccattgtttgttgcaatgaccaaaacccatgtgatagcagcctcgaaagaagcattttatacctggcaatatcgtgtggcaaagaagctcacagcattggaaattaatcagatcacacggtctcgaaaagaagggagagaaagaatttatcatgttgatgataccccttctggatcaatggatggtgtgcttgattatagtaaaaccattcaaggcacaagggatccaatttgtgccataactgcatcagataagatattgattgtgggtcgtgaatctggcaccattcagagatacagtctacctaatgttggtttgattcaaaaatattcccttaattgtcgagcctaccagttatccttgaattgcaactctagccgtcttgctatcatagacatctcaggagttctgactttctttgacttggatgctcgagtaacggacagtacgggacagcaagtagttggagagttgttaaaattggaacgaagagatgtctgggatatgaagtgggccaaagataatcctgatttgtttgcaatgatggagaagacaagaatgtatgttttcagaaacttggatcctgaggtaaaaacaagaaatgagtgttaacagtctataaataatgagccaaatataaaaacc

SEQ ID NO: 302241 - DNA, 655 bp, Homo sapiens
gtgttaaacttcctaatttgtaatatgattatggaagagaatgtctttatttttaggaaatgtacactaaagtatttagggattaaaaaattaaaagtcatcaattattcacgtaccctagaggtttaagatatgctcaagagtgttttactaatagaatggaaaacgagtgagaggtgggcagaagagagattataggacatatctaccaaaaatgataaaagtcccctaaacaagtacttgttatggtgtcctttgaacatcattatttttgggagtcaggccaattgagtaaaccatgcttgtatttgtttctgtcatcaggtatatggtagttctggtagctagccatgattggtgtctttactgggatgaaatagggatagatatgaaaaatagtattatgcattgttgtagaaaattagtgatatcaataactgcatcttatgaataggttttgaggaatattaaagactagttagctgtacaggaaccatattgattttaacatgatcttggtgtttatataaaaatgtgaatttgaaattaattgtaacctttaagtttctaaattgttttataatgttctaggttctgttcaagttgtaacatggaatgagcagtatcagaagttgactaccagtgatgaaaacgg

SEQ ID NO: 302242 - DNA, 522 bp, Homo sapiens
  misc_feature (33)..(33): n is a, c, g, or t
gctgaatgttactatatgttagaggattatgangggttagagaaccttgccatttcacttccagaaaaccacaagttacttccagtaggtattgcaaattttagtttttggaattgttaggttactttataaaattttatgttatagtcaggaaatatctcccacaataaagaaaattaaaaatctataatgttacagtttcttagacatggaatgatgcttttaattataaagtaatatataaataatatagaatgcttgaaaatggaggaggaaaagtcagtcacattcttactactttaatatgatcacagtcttgtgtagtctgttaagatttataaagttactttttaaatgttagctgaatacatgaaatatttacagatgaaatgatatgttgctagggatttgcttcaaaataatctgaaattgtttgaaatttgctataacttaagtttaaaaagatagctcaacttttattatgttatattaacaataaagtatttcaagttaaaagagaaa

SEQ ID NO: 302243 - DNA, 1169 bp, Homo sapiens
tccccgcccaccggcaagtcacatgagccaccaaaatggtggtgttcgggtatgaggctgggactaagccaagggattcaggtgtggtgccggtgggaactgaggaagcgcccaaggaaatgaaacacgatttccaaaatgaacttaatctttcatgagaaactgaggatagagatgtcaataagcagccactgtttccacctccccacctgaagagctaggaggacaactacaaagagcctgactgccttctcggaatgaggagagaggaaaacagcaacagtatcagttttcaagatggcagcatctatgcatggtcagcccagtccttctctagaagatgcaaaactcagaagaccaatggtcatagaaatcatagaaaaaaattttgactatcttagaaaagaaatgacacaaaatatatatcaaatggcgacatttggaacaacagctggtttctctggaatattctcaaacttcctgttcagacgctgcttcaaggttaaacatgatgctttgaagacatatgcatcattggctacacttccatttttgtctactgttgttactgacaagctttttgtaattgatgctttgtattcagataatataagcaaggaaaactgtgttttcagaagctcactgattggcatagtttgtggtgttttctatcccagttctttggcttttactaaaaatggacgcctggcaaccaagtatcataccgttccactgccaccaaaaggaagggttttaatccattggatgacgctttgtcaaacacaaatgaaattaatggcgattcctctagtctttcagattatgtttggaatattaaatggtctataccattatgcagtatttgaagagacacttgagaaaactatacatgaagagtaaccaaaaaaatgaatggttgctaacttagcaaaatgaagtttctataaagaggactcaggcattgctgaaagagttaaaagtaactgtgaacaaataatttgttctgtgccttttgcctggtatatagcaaatactcaaaaagtattcaataattcaatcaataaatataagtttcatcttacacgtaagatacaggtcttatctcctgatggtgtgtccattttgcctggtatataacagataataaatatccagtgtcaataaatgta

SEQ ID NO: 302244 - DNA, 1206 bp, Homo sapiens
tccccgcccaccggcaagtcacatgagccaccaaaatggtggtgttcgggtatgaggctgggactaagccaagggattcaggtgtggtgccggtgggaactgaggaagcgcccaaggaaatgaaacacgatttccaaaatgaacttaatctttcatgagaaactgaggatagagatgtcaataagcagccactgtttccacctccccacctgaagagctaggaggacaactacaaagagcctgactgccttctcggaatgaggagagaggaaaacagcaacagtatcagttttcaagatggcagcatctatgcatggtcagcccagtccttctctagaagatgcaaaactcagaagaccaatggtcatagaaatcatagaaaaaaattttgactatcttagaaaagaaatgacacaaaatatatatcaaatggcgacatttggaacaacagctggtttctctggaatattctcaaacttcctgttcagacgctgcttcaaggttaaacatgatgctttgaagacatatgcatcattggctacacttccatttttgtctactgttgttactgacaagctttttgtaattgatgctttgtattcagataatataagcaaggaaaactgtgttttcagaagctcactgattggcatagtttgtggtgttttctatcccagttctttggcttttactaaaaatggacgcctggcaaccaagtatcataccgttccactgccaccaaaaggaagggttttaatccattggatgacgctttgtcaaacacaaatgaaattaatggcgattcctctagtctttcagattatgtttggaatattaaatggtctataccattatgcagtatttgaagagacacttgagaaaactatacatgaagagtaaccaaaaaaatgaatggttgctaacttagcaaaatgaagtttctataaagaggactcaggcattgctgaaagagttaaaagtaactgtgaacaaataatttgttctgtgccttttgcctggtatatagcaaatactcaaaaagtattcaataattcaatcaataaatataagtttcatcttacacgtaagatacaggtcttatctcctgatggtgtgtccattttgcctggtatataacagataataaatatccagtgtcaataaatgtaacaataaaagtttcatctttcctctttgtatgtggaa

SEQ ID NO: 302245 - DNA, 1173 bp, Homo sapiens
  misc_feature (18)..(18): n is a, c, g, or t
gtatcaacgcagagtgcnattacggccggggagaccaaaatggtggtgttcgggtatgaggctgggactaagccaagggattcaggtgtggtgccggtgggaactgaggaagcgcccaaggaaatgaaacacgatttccaaaatgaacttaatctttcatgagaaactgaggatagagatgtcaataagcagccactgtttccacctccccacctgaagagctaggaggacaactacaaagagcctgactgccttctcggaatgaggagagaggaaaacagcaacagtatcagttttcaagatggcagcatctatgcatggtcagcccagtccttctctagaagatgcaaaactcagaagaccaatggtcatagaaatcatagaaaaaaattttgactatcttagaaaagaaatgacacaaaatatatatcaaatggcgacatttggaacaacagctggtttctctggaatattctcaaacttcctgttcagacgctgcttcaaggttaaacatgatgctttgaagacatatgcatcattggctacacttccatttttgtctactgttgttactgacaagctttttgtaattgatgctttgtattcagataatataagcaaggaaaactgtgttttcagaagctcactgattggcatagtttgtggtgttttctatcccagttctttggcttttactaaaaatggacgcctggcaaccaagtatcataccgttccactgccaccaaaaggaagggttttaatccattggatgacgctttgtcaaacacaaatgaaattaatggcgattcctctagtctttcagattatgtttggaatattaaatggtctataccattatgcagtatttgaagagacacttgagaaaactatacatgaagagtaaccaaaaaaatgaatggttgctaacttagcaaaatgaagtttctataaagaggactcaggcattgctgaaagagttaaaagtaactgtgaacaaataatttgttctgtgccttttgcctggtatatagcaaatactcaaaaagtattcaataattcaatcaataaatataagtttcatcttacacgtaagatacaggtcttatctcctgatggtgtgtccattttgcctggtatataacagataataaatatccagtgtcaataaatgta

SEQ ID NO: 302246 - DNA, 1241 bp, Homo sapiens
tccccgcccaccggcaagtcacatgagccaccaaaatggtggtgttcgggtatgaggctgggactaagccaagggattcaggtgtggtgccggtgggaactgaggaagcgcccaaggaaatgaaacacgatttccaaaatgaacttaatctttcatgagaaactgaggatagagatgtcaataagcagccactgtttccacctccccacctgaagagctaggaggacaactacaaagagcctgactgccttctcggaatgaggagagaggaaaacagcaacagtatcagttttcaagatggcagcatctatgcatggtcagcccagtccttctctagaagatgcaaaactcagaagaccaatggtcatagaaatcatagaaaaaaattttgactatcttagaaaagaaatgacacaaaatatatatcaaatggcgacatttggaacaacagctggtttctctggaatattctcaaacttcctgttcagacgctgcttcaaggttaaacatgatgctttgaagacatatgcatcattggctacacttccatttttgtctactgttgttactgacaagctttttgtaattgatgctttgtattcagataatataagcaaggaaaactgtgttttcagaagctcactgattggcatagtttgtggtgttttctatcccagttctttggcttttactaaaaatggacgcctggcaaccaagtatcataccgttccactgccaccaaaaggaagggttttaatccattggatgacgctttgtcaaacacaaatgaaattaatggcgattcctctagtctttcagattatgtttggaatattaaatggtctataccattatgcagtatttgaagagacacttgagaaaactatacatgaagagtaaccaaaaaaatgaatggttgctaacttagcaaaatgaagtttctataaagaggactcaggcattgctgaaagagttaaaagtaactgtgaacaaataatttgttctgtgccttttgcctggtatatagcaaatactcaaaaagtattcaataattcaatcaataaatataagtttcatcttacacgtaagatacaggtcttatctcctgatggtgtgtccattttgcctggtatataacagataataaatatccagtgtcaataaatgtaaaatgtctctattgcccacacgggggactctgggccattccttttaagagggaattaatgaccgctctccac

SEQ ID NO: 302247 - DNA, 997 bp, Homo sapiens
tccccgcccaccggcaagtcacatgagccaccaaaatggtggtgttcgggtatgaggctgggactaagccaagggattcaggtgtggtgccggtgggaactgaggaagcgcccaaggttttcaagatggcagcatctatgcatggtcagcccagtccttctctagaagatgcaaaactcagaagaccaatggtcatagaaatcatagaaaaaaattttgactatcttagaaaagaaatgacacaaaatatatatcaaatggcgacatttggaacaacagctggtttctctggaatattctcaaacttcctgttcagacgctgcttcaaggttaaacatgatgctttgaagacatatgcatcattggctacacttccatttttgtctactgttgttactgacaagctttttgtaattgatgctttgtattcagataatataagcaaggaaaactgtgttttcagaagctcactgattggcatagtttgtggtgttttctatcccagttctttggcttttactaaaaatggacgcctggcaaccaagtatcataccgttccactgccaccaaaaggaagggttttaatccattggatgacgctttgtcaaacacaaatgaaattaatggcgattcctctagtctttcagattatgtttggaatattaaatggtctataccattatgcagtatttgaagagacacttgagaaaactatacatgaagagtaaccaaaaaaatgaatggttgctaacttagcaaaatgaagtttctataaagaggactcaggcattgctgaaagagttaaaagtaactgtgaacaaataatttgttctgtgccttttgcctggtatatagcaaatactcaaaaagtattcaataattcaatcaataaatataagtttcatcttacacgtaagatacaggtcttatctcctgatggtgtgtccattttgcctggtatataacagataataaatatccagtgtcaataaatgta

SEQ ID NO: 302248 - DNA, 1034 bp, Homo sapiens
tccccgcccaccggcaagtcacatgagccaccaaaatggtggtgttcgggtatgaggctgggactaagccaagggattcaggtgtggtgccggtgggaactgaggaagcgcccaaggttttcaagatggcagcatctatgcatggtcagcccagtccttctctagaagatgcaaaactcagaagaccaatggtcatagaaatcatagaaaaaaattttgactatcttagaaaagaaatgacacaaaatatatatcaaatggcgacatttggaacaacagctggtttctctggaatattctcaaacttcctgttcagacgctgcttcaaggttaaacatgatgctttgaagacatatgcatcattggctacacttccatttttgtctactgttgttactgacaagctttttgtaattgatgctttgtattcagataatataagcaaggaaaactgtgttttcagaagctcactgattggcatagtttgtggtgttttctatcccagttctttggcttttactaaaaatggacgcctggcaaccaagtatcataccgttccactgccaccaaaaggaagggttttaatccattggatgacgctttgtcaaacacaaatgaaattaatggcgattcctctagtctttcagattatgtttggaatattaaatggtctataccattatgcagtatttgaagagacacttgagaaaactatacatgaagagtaaccaaaaaaatgaatggttgctaacttagcaaaatgaagtttctataaagaggactcaggcattgctgaaagagttaaaagtaactgtgaacaaataatttgttctgtgccttttgcctggtatatagcaaatactcaaaaagtattcaataattcaatcaataaatataagtttcatcttacacgtaagatacaggtcttatctcctgatggtgtgtccattttgcctggtatataacagataataaatatccagtgtcaataaatgtaacaataaaagtttcatctttcctctttgtatgtggaa

SEQ ID NO: 302249 - DNA, 1130 bp, Homo sapiens
  misc_feature (1110)..(1110): n is a, c, g, or t
tccccgcccaccggcaagtcacatgagccaccaaaatggtggtgttcgggtatgaggctgggactaagccaagggattcaggtgtggtgccggtgggaactgaggaagcgcccaaggaaatgaaacacgatttccaaaatgaacttaatctttcatgagaaactgaggatagagatgtcaataagcagccactgtttccacctccccacctgaagagctaggaggacaactacaaagagcctgactgccttctcggaatgaggagagaggaaaacagcaacagtatcagttttcaagatggcagcatctatgcatggtcagcccagtccttctctagaagatgcaaaactcagaagaccaatggtcatagaaatcatagaaaaaaattttgactatcttagaaaagaaatgacacaaaatatatatcaaatggcgacatttggaacaacagctggtttctctggaatattctcaaacttcctgttcagacgctgcttcaaggttaaacatgatgctttgaagacatatgcatcattggctacacttccatttttgtctactgttgttactgacaagctttttgtaattgatgctttgtattcagataatataagcaaggaaaactgtgttttcagaagctcactgattggcatagtttgtggtgttttctatcccagttctttggcttttactaaaaatggacgcctggcaaccaagtatcataccgttccactgccaccaaaaggaagggttttaatccattggatgacgctttgtcaaacacaaatgaaattaatggcgattcctctagtctttcagattatgtttggaatattaaatggtctataccattatgcagtatttgaagagacacttgagaaaactatacatgaagagtaaccaaaaaaatgaatggttgctaacttagcaaaatgaagtttctataaagaggactcaggcattgctgaaagagttaaaagtaactgtgaacaaataatttgttctgtgccttttgcctggtatatagcaaatactcaaaaagtattcaataattcaatcaataaatataagtttaaaaaaaatagaaaaaaaatacctacattgcctcgngtgtggcctcgttggcctca

SEQ ID NO: 302250 - DNA, 1137 bp, Homo sapiens
  misc_feature (1080)..(1080): n is a, c, g, or t
tccccgcccaccggcaagtcacatgagccaccaaaatggtggtgttcgggtatgaggctgggactaagccaagggattcaggtgtggtgccggtgggaactgaggaagcgcccaaggaaatgaaacacgatttccaaaatgaacttaatctttcatgagaaactgaggatagagatgtcaataagcagccactgtttccacctccccacctgaagagctaggaggacaactacaaagagcctgactgccttctcggaatgaggagagaggaaaacagcaacagtatcagttttcaagatggcagcatctatgcatggtcagcccagtccttctctagaagatgcaaaactcagaagaccaatggtcatagaaatcatagaaaaaaattttgactatcttagaaaagaaatgacacaaaatatatatcaaatggcgacatttggaacaacagctggtttctctggaatattctcaaacttcctgttcagacgctgcttcaaggttaaacatgatgctttgaagacatatgcatcattggctacacttccatttttgtctactgttgttactgacaagctttttgtaattgatgctttgtattcagataatataagcaaggaaaactgtgttttcagaagctcactgattggcatagtttgtggtgttttctatcccagttctttggcttttactaaaaatggacgcctggcaaccaagtatcataccgttccactgccaccaaaaggaagggttttaatccattggatgacgctttgtcaaacacaaatgaaattaatggcgattcctctagtctttcagattatgtttggaatattaaatggtctataccattatgcagtatttgaagagacacttgagaaaactatacatgaagagtaaccaaaaaaatgaatggttgctaacttagcaaaatgaagtttctataaagaggactcaggcattgctgaaagagttaaaagtaactgtgaacaaataatttgttctgtgccttttgcctggtatatagcaaatactcaaaaagtattcaataattcaatcaataaatataagtttccgttngcgcgccaagccttcctccccctctctcgaccccgcgttacaatccgctcggatccc

SEQ ID NO: 302251 - DNA, 1472 bp, Homo sapiens
tccccgcccaccggcaagtcacatgagccaccaaaatggtggtgttcgggtatgaggctgggactaagccaagggattcaggtgtggtgccggtgggaactgaggaagcgcccaaggaaatgaaacacgatttccaaaatgaacttaatctttcatgagaaactgaggatagagatgtcaataagcagccactgtttccacctccccacctgaagagctaggaggacaactacaaagagcctgactgccttctcggaatgaggagagaggaaaacagcaacagtatcagttttcaagatggcagcatctatgcatggtcagcccagtccttctctagaagatgcaaaactcagaagaccaatggtcatagaaatcatagaaaaaaattttgactatcttagaaaagaaatgacacaaaatatatatcaaatggcgacatttggaacaacagctggtttctctggaatattctcaaacttcctgttcagacgctgcttcaaggttaaacatgatgctttgaagacatatgcatcattggctacacttccatttttgtctactgttgttactgacaagctttttgtaattgatgctttgtattcagataatataagcaaggaaaactgtgttttcagaagctcactgattggcatagtttgtggtgttttctatcccagttctttggcttttactaaaaatggacgcctggcaaccaaaagttcttccttttccttcttttttcttttcttttcttttcttttttttttttttttttaaggttaataaactctctttcttctttagctgtctatgatatatttgaatcaaaatgtggtagtttggtatttcagatagctaacttttaacttttttgctctctacattatagatctagaaaggcaattatcaatttaggagaagtcaacaaacttctaatagcattcatatccaggagaggtgattaactcttttttctttttaggtatcataccgttccactgccaccaaaaggaagggttttaatccattggatgacgctttgtcaaacacaaatgaaattaatggcgattcctctagtctttcagattatgtttggaatattaaatggtctataccattatgcagtatttgaagagacacttgagaaaactatacatgaagagtaaccaaaaaaatgaatggttgctaacttagcaaaatgaagtttctataaagaggactcaggcattgctgaaagagttaaaagtaactgtgaacaaataatttgttctgtgccttttgcctggtatatagcaaatactcaaaaagtattcaataattcaatcaataaatataagtttcatcttacacgtaagatacaggtcttatctcctgatggtgtgtccattttgcctggtatataacagataataaatatccagtgtcaataaatgtaacaataaaagtttcatctttcctctttgtatgtggaa

SEQ ID NO: 302252 - DNA, 1131 bp, Homo sapiens
  misc_feature (18)..(18): n is a, c, g, or t
gtatcaacgcagagtgcnattacggccggggagaccaaaatggtggtgttcgggtatgaggctgggactaagccaagggattcaggtgtggtgccggtgggaactgaggaagcgcccaagctttttgttctgaactcccactgcgttgtggattcctgaggatgggatgactgtatcttgattacccggaggtctggcatataccacgtgctccctaaattatgagcgaatgttgaataaaattctaaaggttttcaagatggcagcatctatgcatggtcagcccagtccttctctagaagatgcaaaactcagaagaccaatggtcatagaaatcatagaaaaaaattttgactatcttagaaaagaaatgacacaaaatatatatcaaatggcgacatttggaacaacagctggtttctctggaatattctcaaacttcctgttcagacgctgcttcaaggttaaacatgatgctttgaagacatatgcatcattggctacacttccatttttgtctactgttgttactgacaagctttttgtaattgatgctttgtattcagataatataagcaaggaaaactgtgttttcagaagctcactgattggcatagtttgtggtgttttctatcccagttctttggcttttactaaaaatggacgcctggcaaccaagtatcataccgttccactgccaccaaaaggaagggttttaatccattggatgacgctttgtcaaacacaaatgaaattaatggcgattcctctagtctttcagattatgtttggaatattaaatggtctataccattatgcagtatttgaagagacacttgagaaaactatacatgaagagtaaccaaaaaaatgaatggttgctaacttagcaaaatgaagtttctataaagaggactcaggcattgctgaaagagttaaaagtaactgtgaacaaataatttgttctgtgccttttgcctggtatatagcaaatactcaaaaagtattcaataattcaatcaataaatataagtttcatcttacacgtaagatacaggtcttatctcctgatggtgtgtccattttgcctggtatataacagataataaatatccagtgtcaataaatgta

SEQ ID NO: 302253 - DNA, 1435 bp, Homo sapiens
tccccgcccaccggcaagtcacatgagccaccaaaatggtggtgttcgggtatgaggctgggactaagccaagggattcaggtgtggtgccggtgggaactgaggaagcgcccaaggaaatgaaacacgatttccaaaatgaacttaatctttcatgagaaactgaggatagagatgtcaataagcagccactgtttccacctccccacctgaagagctaggaggacaactacaaagagcctgactgccttctcggaatgaggagagaggaaaacagcaacagtatcagttttcaagatggcagcatctatgcatggtcagcccagtccttctctagaagatgcaaaactcagaagaccaatggtcatagaaatcatagaaaaaaattttgactatcttagaaaagaaatgacacaaaatatatatcaaatggcgacatttggaacaacagctggtttctctggaatattctcaaacttcctgttcagacgctgcttcaaggttaaacatgatgctttgaagacatatgcatcattggctacacttccatttttgtctactgttgttactgacaagctttttgtaattgatgctttgtattcagataatataagcaaggaaaactgtgttttcagaagctcactgattggcatagtttgtggtgttttctatcccagttctttggcttttactaaaaatggacgcctggcaaccaaaagttcttccttttccttcttttttcttttcttttcttttcttttttttttttttttttaaggttaataaactctctttcttctttagctgtctatgatatatttgaatcaaaatgtggtagtttggtatttcagatagctaacttttaacttttttgctctctacattatagatctagaaaggcaattatcaatttaggagaagtcaacaaacttctaatagcattcatatccaggagaggtgattaactcttttttctttttaggtatcataccgttccactgccaccaaaaggaagggttttaatccattggatgacgctttgtcaaacacaaatgaaattaatggcgattcctctagtctttcagattatgtttggaatattaaatggtctataccattatgcagtatttgaagagacacttgagaaaactatacatgaagagtaaccaaaaaaatgaatggttgctaacttagcaaaatgaagtttctataaagaggactcaggcattgctgaaagagttaaaagtaactgtgaacaaataatttgttctgtgccttttgcctggtatatagcaaatactcaaaaagtattcaataattcaatcaataaatataagtttcatcttacacgtaagatacaggtcttatctcctgatggtgtgtccattttgcctggtatataacagataataaatatccagtgtcaataaatgta

SEQ ID NO: 302254 - DNA, 1303 bp, Homo sapiens
  misc_feature (18)..(18): n is a, c, g, or t
gtatcaacgcagagtgcnattacggccggggagaccaaaatggtggtgttcgggtatgaggctgggactaagccaagggattcaggtgtggtgccggtgggaactgaggaagcgcccaagctttttgttctgaactcccactgcgttgtggattcctgaggatgggatgactgtatcttgattacccggaggtctggcatataccacgtgctccctaaattatgagcgaatgttgaataaaattctaaaggaaatgaaacacgatttccaaaatgaacttaatctttcatgagaaactgaggatagagatgtcaataagcagccactgtttccacctccccacctgaagagctaggaggacaactacaaagagcctgactgccttctcggaatgaggagagaggaaaacagcaacagtatcagttttcaagatggcagcatctatgcatggtcagcccagtccttctctagaagatgcaaaactcagaagaccaatggtcatagaaatcatagaaaaaaattttgactatcttagaaaagaaatgacacaaaatatatatcaaatggcgacatttggaacaacagctggtttctctggaatattctcaaacttcctgttcagacgctgcttcaaggttaaacatgatgctttgaagacatatgcatcattggctacacttccatttttgtctactgttgttactgacaagctttttgtaattgatgctttgtattcagataatataagcaaggaaaactgtgttttcagaagctcactgattggcatagtttgtggtgttttctatcccagttctttggcttttactaaaaatggacgcctggcaaccaagtatcataccgttccactgccaccaaaaggaagggttttaatccattggatgacgctttgtcaaacacaaatgaaattaatggcgattcctctagtctttcagattatgtttggaatattaaatggtctataccattatgcagtatttgaagagacacttgagaaaactatacatgaagagtaaccaaaaaaatgaatggttgctaacttagcaaaatgaagtttctataaagaggactcaggcattgctgaaagagttaaaagtaactgtgaacaaataatttgttctgtgccttttgcctggtatatagcaaatactcaaaaagtattcaataattcaatcaataaatataagtttcatcttacacgtaagatacaggtcttatctcctgatggtgtgtccattttgcctggtatataacagataataaatatccagtgtcaataaatgta

SEQ ID NO: 302255 - DNA, 1072 bp, Homo sapiens
  misc_feature (18)..(18): n is a, c, g, or t
gtatcaacgcagagtgcnattacggccggggagaccaaaatggtggtgttcgggtatgaggctgggactaagccaagggattcaggtgtggtgccggtgggaactgaggaagcgcccaagctttttgttctgaactcccactgcgttgtggattcctgaggatgggatgactgtatcttgattacccggaggttttcaagatggcagcatctatgcatggtcagcccagtccttctctagaagatgcaaaactcagaagaccaatggtcatagaaatcatagaaaaaaattttgactatcttagaaaagaaatgacacaaaatatatatcaaatggcgacatttggaacaacagctggtttctctggaatattctcaaacttcctgttcagacgctgcttcaaggttaaacatgatgctttgaagacatatgcatcattggctacacttccatttttgtctactgttgttactgacaagctttttgtaattgatgctttgtattcagataatataagcaaggaaaactgtgttttcagaagctcactgattggcatagtttgtggtgttttctatcccagttctttggcttttactaaaaatggacgcctggcaaccaagtatcataccgttccactgccaccaaaaggaagggttttaatccattggatgacgctttgtcaaacacaaatgaaattaatggcgattcctctagtctttcagattatgtttggaatattaaatggtctataccattatgcagtatttgaagagacacttgagaaaactatacatgaagagtaaccaaaaaaatgaatggttgctaacttagcaaaatgaagtttctataaagaggactcaggcattgctgaaagagttaaaagtaactgtgaacaaataatttgttctgtgccttttgcctggtatatagcaaatactcaaaaagtattcaataattcaatcaataaatataagtttcatcttacacgtaagatacaggtcttatctcctgatggtgtgtccattttgcctggtatataacagataataaatatccagtgtcaataaatgta

SEQ ID NO: 302256 - DNA, 879 bp, Homo sapiens
  misc_feature (18)..(18): n is a, c, g, or t
gtatcaacgcagagtgcnattacggccggggagaccaaaatggtggtgttcgggtatgaggctgggactaagccaagggattcaggtgtggtgccggtgggaactgaggaagcgcccaaggacacaaaatatatatcaaatggcgacatttggaacaacagctggtttctctggaatattctcaaacttcctgttcagacgctgcttcaaggttaaacatgatgctttgaagacatatgcatcattggctacacttccatttttgtctactgttgttactgacaagctttttgtaattgatgctttgtattcagataatataagcaaggaaaactgtgttttcagaagctcactgattggcatagtttgtggtgttttctatcccagttctttggcttttactaaaaatggacgcctggcaaccaagtatcataccgttccactgccaccaaaaggaagggttttaatccattggatgacgctttgtcaaacacaaatgaaattaatggcgattcctctagtctttcagattatgtttggaatattaaatggtctataccattatgcagtatttgaagagacacttgagaaaactatacatgaagagtaaccaaaaaaatgaatggttgctaacttagcaaaatgaagtttctataaagaggactcaggcattgctgaaagagttaaaagtaactgtgaacaaataatttgttctgtgccttttgcctggtatatagcaaatactcaaaaagtattcaataattcaatcaataaatataagtttcatcttacacgtaagatacaggtcttatctcctgatggtgtgtccattttgcctggtatataacagataataaatatccagtgtcaataaatgta

SEQ ID NO: 302257 - DNA, 965 bp, Homo sapiens
  misc_feature (54)..(54): n is a, c, g, or t
  misc_feature (69)..(69): n is a, c, g, or t
  misc_feature (75)..(75): n is a, c, g, or t
  misc_feature (131)..(131): n is a, c, g, or t
  misc_feature (133)..(133): n is a, c, g, or t
  misc_feature (136)..(136): n is a, c, g, or t
  misc_feature (139)..(139): n is a, c, g, or t
  misc_feature (149)..(150): n is a, c, g, or t
  misc_feature (152)..(152): n is a, c, g, or t
  misc_feature (159)..(159): n is a, c, g, or t
  misc_feature (162)..(162): n is a, c, g, or t
  misc_feature (169)..(169): n is a, c, g, or t
  misc_feature (177)..(177): n is a, c, g, or t
  misc_feature (182)..(182): n is a, c, g, or t
  misc_feature (186)..(186): n is a, c, g, or t
  misc_feature (192)..(192): n is a, c, g, or t
  misc_feature (195)..(195): n is a, c, g, or t
  misc_feature (200)..(200): n is a, c, g, or t
  misc_feature (203)..(203): n is a, c, g, or t
cccacctttatatctattattacaactacatatatcctcacttccttctcttanttattatatattaanacatcnacattttcatttttcaatatttcatcatctattcattttcatcccattccttctcnanaanatncaaaactcannanaccaatntanatataanacatatantattntttngactgncanagaanagnaaagacacaaaatatatatcaaatggcgacatttggaacaacagctggtttctctggaatattctcaaacttcctgttcagacgctgcttcaaggttaaacatgatgctttgaagacatatgcatcattggctacacttccatttttgtctactgttgttactgacaagctttttgtaattgatgctttgtattcagataatataagcaaggaaaactgtgttttcagaagctcactgattggcatagtttgtggtgttttctatcccagttctttggcttttactaaaaatggacgcctggcaaccaagtatcataccgttccactgccaccaaaaggaagggttttaatccattggatgacgctttgtcaaacacaaatgaaattaatggcgattcctctagtctttcagattatgtttggaatattaaatggtctataccattatgcagtatttgaagagacacttgagaaaactatacatgaagagtaaccaaaaaaatgaatggttgctaacttagcaaaatgaagtttctataaagaggactcaggcattgctgaaagagttaaaagtaactgtgaacaaataatttgttctgtgccttttgcctggtatatagcaaatactcaaaaagtattcaataattcaatcaataaatataagtttcatcttacacgtaagatacaggtcttatctcctgatggtgtgtccattttgcctggtatataacagataataaatatccagtgtcaataaatgta

SEQ ID NO: 302258 - DNA, 828 bp, Homo sapiens
ttcagaggatccccctttggggtcttgctggcactcatgaaaaaaatttgactatcttagaaaagaaatgacacaaaatatatatcaaatggcgacatttggaacaacagctggtttctctggaatattctcaaacttcctgttcagacgctgcttcaaggttaaacatgatgctttgaagacatatgcatcattggctacacttccatttttgtctactgttgttactgacaagctttttgtaattgatgctttgtattcagataatataagcaaggaaaactgtgttttcagaagctcactgattggcatagtttgtggtgttttctatcccagttctttggcttttactaaaaatggacgcctggcaaccaagtatcataccgttccactgccaccaaaaggaagggttttaatccattggatgacgctttgtcaaacacaaatgaaattaatggcgattcctctagtctttcagattatgtttggaatattaaatggtctataccattatgcagtatttgaagagacacttgagaaaactatacatgaagagtaaccaaaaaaatgaatggttgctaacttagcaaaatgaagtttctataaagaggactcaggcattgctgaaagagttaaaagtaactgtgaacaaataatttgttctgtgccttttgcctggtatatagcaaatactcaaaaagtattcaataattcaatcaataaatataagtttcatcttacacgtaagatacaggtcttatctcctgatggtgtgtccattttgcctggtatataacagataataaatatccagtgtcaataaatgta

SEQ ID NO: 302259 - DNA, 1102 bp, Homo sapiens
  misc_feature (18)..(18): n is a, c, g, or t
gtatcaacgcagagtgcnattacggccggggagaccaaaatggtggtgttcgggtatgaggctgggactaagccaagggattcaggtgtggtgccggtgggaactgaggaagcgcccaaggaaatgaaacacgatttccaaaatgaacttaatctttcatgagaaactgaggatagagatgtcaataagcagccactgtttccacctccccacctgaagagctaggaggacaactacaaagagcctgactgccttctcggaatgaggagagaggaaaacagcaacagtatcagttttcaagatggcagcatctatgcatggtcagcccagtccttctctagaagatgcaaaactcagaagaccaatggtcatagaaatcatagaaaaaaattttgactatcttagaaaagaaatgacacaaaatatatatcaaatggcgacatttggaacaacagctggtttctctggaatattctcaaacttcctgttcagacgctgctataatataagcaaggaaaactgtgttttcagaagctcactgattggcatagtttgtggtgttttctatcccagttctttggcttttactaaaaatggacgcctggcaaccaagtatcataccgttccactgccaccaaaaggaagggttttaatccattggatgacgctttgtcaaacacaaatgaaattaatggcgattcctctagtctttcagattatgtttggaatattaaatggtctataccattatgcagtatttgaagagacacttgagaaaactatacatgaagagtaaccaaaaaaatgaatggttgctaacttagcaaaatgaagtttctataaagaggactcaggcattgctgaaagagttaaaagtaactgtgaacaaataatttgttctgtgccttttgcctggtatatagcaaatactcaaaaagtattcaataattcaatcaataaatataagtttcatcttacacgtaagatacaggtcttatctcctgatggtgtgtccattttgcctggtatataacagataataaatatccagtgtcaataaatgtaacaataaaagtttcatctttcctctttgtatgtggaa

SEQ ID NO: 302260 - DNA, 1304 bp, Homo sapiens
  misc_feature (18)..(18): n is a, c, g, or t
gtatcaacgcagagtgcnattacggccggggagaccaaaatggtggtgttcgggtatgaggctgggactaagccaagggattcaggtgtggtgccggtgggaactgaggaagcgcccaaggttttcaagatggcagcatctatgcatggtcagcccagtccttctctagaagatgcaaaactcagaagaccaatggtcatagaaatcatagaaaaaaattttgactatcttagaaaagaaatgacacaaaatatatatcaaatggcgacatttggaacaacagctggtttctctggaatattctcaaacttcctgttcagacgctgcttcaaggttaaacatgatgctttgaagacatatgcatcattggctacacttccatttttgtctactgttgttactgacaagctttttgtaattgatgctttgtattcagataatataagcaaggaaaactgtgttttcagaagctcactgattggcatagtttgtggtgttttctatcccagttctttggcttttactaaaaatggacgcctggcaaccaaaagttcttccttttccttcttttttcttttcttttcttttcttttttttttttttttttaaggttaataaactctctttcttctttagctgtctatgatatatttgaatcaaaatgtggtagtttggtatttcagatagctaacttttaacttttttgctctctacattatagatctagaaaggcaattatcaatttaggagaagtcaacaaacttctaatagcattcatatccaggagaggtgattaactcttttttctttttaggtatcataccgttccactgccaccaaaaggaagggttttaatccattggatgacgctttgtcaaacacaaatgaaattaatggcgattcctctagtctttcagattatgtttggaatattaaatggtctataccattatgcagtatttgaagagacacttgagaaaactatacatgaagagtaaccaaaaaaatgaatggttgctaacttagcaaaatgaagtttctataaagaggactcaggcattgctgaaagagttaaaagtaactgtgaacaaataatttgttctgtgccttttgcctggtatatagcaaatactcaaaaagtattcaataattcaatcaataaatataagtttcatcttacacgtaagatacaggtcttatctcctgatggtgtgtccattttgcctggtatataacagataataaatatccagtgtcaataaatgtaacaataaaagtttcatctttcctctttgtatgtggaa

SEQ ID NO: 302261 - DNA, 808 bp, Homo sapiens
  misc_feature (18)..(18): n is a, c, g, or t
gtatcaacgcagagtgcnattacggccggggagaccaaaatggtggtgttcgggtatgaggctgggactaagccaagggattcaggtgtggtgccggtgggaactgaggaagcgcccaaggacacaaaatatatatcaaatggcgacatttggaacaacagctggtttctctggaatattctcaaacttcctgttcagacgctgctataatataagcaaggaaaactgtgttttcagaagctcactgattggcatagtttgtggtgttttctatcccagttctttggcttttactaaaaatggacgcctggcaaccaagtatcataccgttccactgccaccaaaaggaagggttttaatccattggatgacgctttgtcaaacacaaatgaaattaatggcgattcctctagtctttcagattatgtttggaatattaaatggtctataccattatgcagtatttgaagagacacttgagaaaactatacatgaagagtaaccaaaaaaatgaatggttgctaacttagcaaaatgaagtttctataaagaggactcaggcattgctgaaagagttaaaagtaactgtgaacaaataatttgttctgtgccttttgcctggtatatagcaaatactcaaaaagtattcaataattcaatcaataaatataagtttcatcttacacgtaagatacaggtcttatctcctgatggtgtgtccattttgcctggtatataacagataataaatatccagtgtcaataaatgtaacaataaaagtttcatctttcctctttgtatgtggaa

SEQ ID NO: 302262 - DNA, 1198 bp, Homo sapiens
ataaaaatgtattaacctagaatccaggtctggtttgctagtttagtattgtcattataaaattgtttctggctgggcacggtggctcatgcctataatcccaacactttgggaggccaagacaggcagatcacttgaggtcaggagttcgagaccagcctggccaacacagtctctactaaaaatagaaaaacagttgagcatggtggtgcaagcttataatcccagctacttgggaggctgaggcatgagaattgcttgaaccctggaggcagaggttgcagtgagccgagatcgtgccactgtactctagcctgggcaacagagtgagactccgtctccaaaaaataaaataaaattgcttctacaacaaccacatacgttagaggtaattctctatgtgataaagtataataaaaactttttaaaatgtgctgcatttggcctgttatatgccacagagtttgaatttctaatattctttctatggtttagttgtggttgaggatagtgcagataactactctgtgaggtacaacactgtcttaatagctcttgagttttaaaggaaaaccaaatttacttttgttttccagataatataagcaaggaaaactgtgttttcagaagctcactgattggcatagtttgtggtgttttctatcccagttctttggcttttactaaaaatggacgcctggcaaccaagtatcataccgttccactgccaccaaaaggaagggttttaatccattggatgacgctttgtcaaacacaaatgaaattaatggcgattcctctagtctttcagattatgtttggaatattaaatggtctataccattatgcagtatttgaagagacacttgagaaaactatacatgaagagtaaccaaaaaaatgaatggttgctaacttagcaaaatgaagtttctataaagaggactcaggcattgctgaaagagttaaaagtaactgtgaacaaataatttgttctgtgccttttgcctggtatatagcaaatactcaaaaagtattcaataattcaatcaataaatataagtttcatcttacacgtaagatacaggtcttatctcctgatggtgtgtccattttgcctggtatataacagataataaatatccagtgtcaataaatgtaacaataaaagtttcatctttcctctttgtatgtggaa

SEQ ID NO: 302263 - DNA, 1464 bp, Homo sapiens
ataaaaatgtattaacctagaatccaggtctggtttgctagtttagtattgtcattataaaattgtttctggctgggcacggtggctcatgcctataatcccaacactttgggaggccaagacaggcagatcacttgaggtcaggagttcgagaccagcctggccaacacagtctctactaaaaatagaaaaacagttgagcatggtggtgcaagcttataatcccagctacttgggaggctgaggcatgagaattgcttgaaccctggaggcagaggttgcagtgagccgagatcgtgccactgtactctagcctgggcaacagagtgagactccgtctccaaaaaataaaataaaattgcttctacaacaaccacatacgttagaggtaattctctatgtgataaagtataataaaaactttttaaaatgtgctgcatttggcctgttatatgccacagagtttgaatttctaatattctttctatggtttagttgtggttgaggatagtgcagataactactctgtgaggtacaacactgtcttaatagctcttgagttttaaaggaaaaccaaatttacttttgttttccagataatataagcaaggaaaactgtgttttcagaagctcactgattggcatagtttgtggtgttttctatcccagttctttggcttttactaaaaatggacgcctggcaaccaaaagttcttccttttccttcttttttcttttcttttcttttcttttttttttttttttttaaggttaataaactctctttcttctttagctgtctatgatatatttgaatcaaaatgtggtagtttggtatttcagatagctaacttttaacttttttgctctctacattatagatctagaaaggcaattatcaatttaggagaagtcaacaaacttctaatagcattcatatccaggagaggtgattaactcttttttctttttaggtatcataccgttccactgccaccaaaaggaagggttttaatccattggatgacgctttgtcaaacacaaatgaaattaatggcgattcctctagtctttcagattatgtttggaatattaaatggtctataccattatgcagtatttgaagagacacttgagaaaactatacatgaagagtaaccaaaaaaatgaatggttgctaacttagcaaaatgaagtttctataaagaggactcaggcattgctgaaagagttaaaagtaactgtgaacaaataatttgttctgtgccttttgcctggtatatagcaaatactcaaaaagtattcaataattcaatcaataaatataagtttcatcttacacgtaagatacaggtcttatctcctgatggtgtgtccattttgcctggtatataacagataataaatatccagtgtcaataaatgtaacaataaaagtttcatctttcctctttgtatgtggaa

SEQ ID NO: 302264 - DNA, 948 bp, Homo sapiens
tccccgcccaccggcaagtcacatgagccaccaaaatggtggtgttcgggtatgaggctgggactaagccaagggattcaggtgtggtgccggtgggaactgaggaagcgcccaaggaaatgaaacacgatttccaaaatgaacttaatctttcatgagaaactgaggatagagatgtcaataagcagccactgtttccacctccccacctgaagagctaggaggacaactacaaagagcctgactgccttctcggaatgaggagagaggaaaacagcaacagtatcagttttcaagatggcagcatctatgcatggtcagcccagtccttctctagaagatgcaaaactcagaagaccaatggtcatagaaatcatagaaaaaaattttgactatcttagaaaagaaatgacacaaaatatatatcaaatggcgacatttggaacaacagctggtttctctggaatattctcaaacttcctgttcagacgctgcttcaaggttaaacatgatgctttgaagacatatgcatcattggctacacttccatttttgtctactgttgttactgacaagctttttgtaattgatgctttgtattcaggtgaatttaaattcactaatgtataacgtagttatgtctaagtaaagttacttattaacatatactgttgctactgctaataataattctttacatttatatattgctatacagtttacaaagtccatataccttgtcatatttaatccctgcaacaatcctcctaatcaggtaaactgtatttttttatttctgtagataagcaacccaaactgaggcatgttcaagtacgctaataagcaacatactgggaaaagaattggctgtggcatacaacgcacatcatttcagtatgctacctcctgccacttaagttttgtgacattcagtaaggcatttcatct

SEQ ID NO: 302265 - DNA, 855 bp, Homo sapiens
  misc_feature (18)..(18): n is a, c, g, or t
gtatcaacgcagagtgcnattacggccggggagaccaaaatggtggtgttcgggtatgaggctgggactaagccaagggattcaggtgtggtgccggtgggaactgaggaagcgcccaaggacacaaaatatatatcaaatggcgacatttggaacaacagctggtttctctggaatattctcaaacttcctgttcagacgctgcttcaaggttaaacatgatgctttgaagacatatgcatcattggctacacttccatttttgtctactgttgttactgacaagctttttgtaattgatgctttgtattcagataatataagcaaggaaaactgtgttttcagaagctcactgattggcatagtttgtggtgttttctatcccagttctttggcttttactaaaaatggacgcctggcaaccaacaaacacaaatgaaattaatggcgattcctctagtctttcagattatgtttggaatattaaatggtctataccattatgcagtatttgaagagacacttgagaaaactatacatgaagagtaaccaaaaaaatgaatggttgctaacttagcaaaatgaagtttctataaagaggactcaggcattgctgaaagagttaaaagtaactgtgaacaaataatttgttctgtgccttttgcctggtatatagcaaatactcaaaaagtattcaataattcaatcaataaatataagtttcatcttacacgtaagatacaggtcttatctcctgatggtgtgtccattttgcctggtatataacagataataaatatccagtgtcaataaatgtaacaataaaagtttcatctttcctctttgtatgtggaa

SEQ ID NO: 302266 - DNA, 1139 bp, Homo sapiens
  misc_feature (18)..(18): n is a, c, g, or t
gtatcaacgcagagtgcnattacggccggggagaccaaaatggtggtgttcgggtatgaggctgggactaagccaagggattcaggtgtggtgccggtgggaactgaggaagcgcccaaggaaatgaaacacgatttccaaaatgaacttaatctttcatgagaaactgaggatagagatgtcaataagcagccactgtttccacctccccacctgaagagctaggaggacaactacaaagagcctgactgccttctcggaatgaggagagaggaaaacagcaacagtatcagttttcaagatggcagcatctatgcatggtcagcccagtccttctctagaagatgcaaaactcagaagaccaatggtcatagaaatcatagaaaaaaattttgactatcttagaaaagaaatgacacaaaatatatatcaaatggcgacatttggaacaacagctggtttctctggaatatttcaaggttaaacatgatgctttgaagacatatgcatcattggctacacttccatttttgtctactgttgttaaatttacttttgttttccagataatataagcaaggaaaactgtgttttcagaagctcactgattggcatagtttgtggttttggcttttactaaaaatggacgcctggcaaccaagtatcataccgttccactgccaccaaaaggaagggttttaatccattggatgacgctttgtaaattaatggcgattcctctagtctttcagattatgtttggaatattaaatggtctataccattatgcagtatttgaagagacacttgagaaaactatacatgaagagtaaccaaaaaaatgaatggttgctaacttagcaaaatgaagtttctataaagaggactcaggcattgctgaaagagttaaaagtaactgtgaacaaataatttgttctgtgccttttgcctggtatatagcaaatactcaaaaagtattcaataattcaatcaataaatataagtttcatcttacacgtaagatacaggtcttatctcctgatggtgtgtccattttgcctggtatataacagataataaatatccagtgtcaataaatgtaacaataaaagtttcatctttcctctttgtatgtggaa

SEQ ID NO: 302267 - DNA, 910 bp, Homo sapiens
  misc_feature (18)..(18): n is a, c, g, or t
gtatcaacgcagagtgcnattacggccggggagaccaaaatggtggtgttcgggtatgaggctgggactaagccaagggattcaggtgtggtgccggtgggaactgaggaagcgcccaagctttttgttctgaactcccactgcgttgtggattcctgaggatgggatgactgtatcttgattacccggaggtctggcatataccacgtgctccctaaattatgagcgaatgttgaataaaattctaaaggttttcaagatggcagcatctatgcatggtcagcccagtccttctctagaagatgcaaaactcagaagaccaatggtcatagaaatcatagaaaaaaattttgactatcttagaaaagaaatgacacaaaatatatatcaaatggcgacatttggaacaacagctggtttctctggaatattctcaaacttcctgttcagacgctgcttcaaggttaaacatgatgctttgaagacatatgcatcattggctacacttccatttttgtctactgttgttactgacaagctttttgtaattgatgctttgtattcaggtgaatttaaattcactaatgtataacgtagttatgtctaagtaaagttacttattaacatatactgttgctactgctaataataattctttacatttatatattgctatacagtttacaaagtccatataccttgtcatatttaatccctgcaacaatcctcctaatcaggtaaactgtatttttttatttctgtagataagcaacccaaactgaggcatgttcaagtacgctaataagcaacatactgggaaaagaattggctgtggcatacaacgcacatcatttcagtatgctacctcctgccacttaagttttgtgacattcagtaaggcatttcatct

SEQ ID NO: 302268 - DNA, 780 bp, Homo sapiens
  misc_feature (18)..(18): n is a, c, g, or t
gtatcaacgcagagtgcnattacggccggggagaccaaaatggtggtgttcgggtatgaggctgggactaagccaagggattcaggtgtggtgccggtgggaactgaggaagcgcccaaggttttcaagatggcagcatctatgcatggtcagcccagtccttctctagaagatgcaaaactcagaagaccaatggtcatagaaatcatagaaaaaaattttgactatcttagaaaagaaatgacacaaaatatatatcaaatggcgacatttggaacaacagctggtttctctggaatattctcaaacttcctgttcagacgctgcttcaaggttaaacatgatgctttgaagacatatgcatcattggctacacttccatttttgtctactgttgttactgacaagctttttgtaattgatgctttgtattcaggtgaatttaaattcactaatgtataacgtagttatgtctaagtaaagttacttattaacatatactgttgctactgctaataataattctttacatttatatattgctatacagtttacaaagtccatataccttgtcatatttaatccctgcaacaatcctcctaatcaggtaaactgtatttttttatttctgtagataagcaacccaaactgaggcatgttcaagtacgctaataagcaacatactgggaaaagaattggctgtggcatacaacgcacatcatttcagtatgctacctcctgccacttaagttttgtgacattcagtaaggcatttcatct

SEQ ID NO: 302269 - DNA, 399 bp, Homo sapiens
  misc_feature (18)..(18): n is a, c, g, or t
gtatcaacgcagagtgcnattacggccggggagaccaaaatggtggtgttcgggtatgaggctgggactaagccaagggattcaggtgtggtgccggtgggaactgaggaagcgcccaaggaaatgaaacacgatttccaaaatgaacttaatctttcatgagaaactgaggatagagatgtcaataagcagccactgtttccacctccccacctgaagagctaggaggacaactacaaagagcctgactgccttctcggaatgaggagagaggaaaacagcaacagtatcagtatgttagccttctacactaaatctcaagcaagccaacctttcagaccttcagtttgctcatatgtatagaaataatcattatactaccatttctcaagttagtgt

SEQ ID NO: 302270 - DNA, 584 bp, Homo sapiens
agactcttctaagatgatacctttaaaggagatttgaaaagttaaaacagctcccaagtccatgcaaggagcagtcgattaagtctccagttgctgtggaaagaggcggagagaacgtagatgacctaaattctagtcctcattatctgcagtttgttttctcttgtctccaggcctttgcacaggctttttcttcaacttggagtatttccctgcttctatccgtcccaactcccctgccaaactgttctctttcggttattgatttaaatgtcacttcttccgggaagccttcccacgcttcctctggctagattgtttgctttttcttaggttgttgggtttttcgtttatgtcactctctcattctgtgtttaaattgccagctttttgttctgaactcccactgcgttgtggattcctgaggatgggatgactgtatcttgattacccggaggtctggcatataccacgtgctccctaaattatgagcgaatgttgaataaaattctaaaggtgaaatttattattaggtgaaaaatttattattaggtaaaataatacacatgaaagcactacaaaac

SEQ ID NO: 302271 - DNA, 1504 bp, Homo sapiens
ggaaacaaaagagtctcgccggcgtccccgcccgcacactcgcgcacactcgcgctcgggcgcacacggagcagggaccggcgcccggagcgagccagggagcggctaaccggggacccaccgcgcggagccagcctagctgccagcgagcccaacccgcgacgacccacgcccctgagccccgcagccgacccctgccggccggtgtccccaccgccatccctgacccatggcgctgaagaggattcagaaagaattgagtgatctacagcgcgatccacctgctcactgttcagctggacctgtgggagatgacttgttccactggcaagccactattatggggcctcctgatagcgcatatcaaggtggagtcttctttctcactgtacattttccgacagattatccttttaaaccaccaaagattgctttcacaacaaaaatttaccatccaaacataaacagtaatggaagtatttgtctcgatattctgaggtcacaatggtcaccagctctgactgtatcaaaagttttattgtccatatgttctctactttgtgatcctaatccagatgaccccttagtaccagatattgcacaaatctataaatcagacaaagaaaaatacaacagacatgcaagagaatggactcagaaatatgcaatgtaaaaatcaaaaacattttcatatataccagagtactgtaaaatctaggtttttttcaacattagcagtaaattgagcactgtttactgtttcattgtaccatgaaaccatttgatttttacccattttaaatgtgtttctgaagcaagacaaaacaaacttccaaaaatacccttaagactgtgatgagagcatttatcattttgtatgcattgagaaagacatttattatggtttttaagatacttggacatctgcatcttcagcttacaagatctacaatgcagctgaaaagcaaccaaattattttttgctgaaactagatgtttttacatgagaaatactgtatgtgttgtctaagatgtcagttttataaatctgtattcagatttcattctttgttagctcactttataatttgtatttttttactgtatagactaaatatattctatttacatgtatgtcaactcattacttttttcctgtgaacagtattgaaaaaccccaacggctgataattaagtgaattaactgtgtctcccttgtcttaggatattctgtagattgattgcagatttcttaaatctgaaatgatctttacactgtaattctcagcatactgattatggagaaacacttgttttgattttgttatacttgacttaactttattgcaatgtgaattaattgcactgctaagtaggaagatgtgtaacttttatttgttgctattcacatttgaattttttcctgtataggcaatattatattgacaccttttacagatcttactgtagctttttccatataaataaaatgctttttctacta

SEQ ID NO: 302272 - DNA, 2668 bp, Homo sapiens
ggaaacaaaagagtctcgccggcgtccccgcccgcacactcgcgcacactcgcgctcgggcgcacacggagcagggaccggcgcccggagcgagccagggagcggctaaccggggacccaccgcgcggagccagcctagctgccagcgagcccaacccgcgacgacccacgcccctgagccccgcagccgacccctgccggccggtgtccccaccgccatccctgacccatggcgctgaagaggattcagaaagaattgagtgatctacagcgcgatccacctgctcactgttcagctggacctgtgggagatgacttgttccactggcaagccactattatggggcctcctgatagcgcatatcaaggtggagtcttctttctcactgtacattttccgacagattatccttttaaaccaccaaagattgctttcacaacaaaaatttaccatccaaacataaacagtaatggaagtatttgtctcgatattctgaggtcacaatggtcaccagctctgactgtatcaaaagttttattgtccatatgttctctactttgtgatcctaatccagatgaccccttagtaccagatattgcacaaatctataaatcagacaaagaaaaatacaacagacatgcaagagaatggactcagaaatatgcaatgtaaaaatcaaaaacattttcatatataccagagtactgtaaaatctaggtttttttcaacattagcagtaaattgagcactgtttactgtttcattgtaccatgaaaccatttgatttttacccattttaaatgtgtttctgaagcaagacaaaacaaacttccaaaaatacccttaagactgtgatgagagcatttatcattttgtatgcattgagaaagacatttattatggtttttaagatacttggacatctgcatcttcagcttacaagatctacaatgcagctgaaaagcaaccaaattattttttgctgaaactagatgtttttacatgagaaatactgtatgtgttgtctaagatgtcagttttataaatctgtattcagatttcattctttgttagctcactttataatttgtatttttttactgtatagactaaatatattctatttacatgtatgtcaactcattacttttttcctgtgaacagtattgaaaaaccccaacggctgataattaagtgaattaactgtgtctcccttgtcttaggatattctgtagattgattgcagatttcttaaatctgaaatgatctttacactgtaattctcagcatactgattatggagaaacacttgttttgattttgttatacttgacttaactttattgcaatgtgaattaattgcactgctaagtaggaagatgtgtaacttttatttgttgctattcacatttgaattttttcctgtataggcaatattatattgacaccttttacagatcttactgtagctttttccatataaataaaatgctttttctactatttgtcttgattacttaaaaaaataaaaatataagtaaggatcaaaactctaaaattttgcatgaaaattacatccaaattgtgaaaatcagatctattttgttgccattagtcaccattagttatataaattttattgttttaggttagtatctctttactaaattgtcagtctataagataatatatgttgatcccttgctgtagaggagaatttagagtaatttggggtttgtcttggattatatctaaatggattatttgttaaaagtactgaaatgagtataaggcagtatcacccatccaaaagaaaggtctttatagacctgcacagtcactagattaattcattaaaatgcccccaccctgatgtaattgacattacatttcttaacattttaaaatctagaatttctaaaatggaatttaatgccatcacaatttgaaaaactttttttttttttttactatagaagttacaaaggaagttctaaaattatgcctccctctgtttttataagtggccatcgaaaagtgatttaaataagcaggttatctttatagattttaaagaaaactagaaagttttcaatgttttaactgggggaaaaatacatctctttaatgtttagcatgcttgtcaaccttgagtgagtgtcatttttaagaacagttgtagcccttctgattatggcagtagctgtagaagtatgtaagaatatgtgatgggtgtagtcattagcaaagcatttaaatcacttgagtattttgtcatggttcattattattaaagcacaaaataacctattgttagaaaatatgtgtttttataaatgaatgtaaaataattaaatgaattgtgaaatggatgtttaagaaaatataggcttaaaaagtaaatctataaaatgatgtcttaaaacagccatatcatgaaaaattctacttagctatattattataagctacatttgccctgaatttgaacactcaacatcactagatttaaatatttagtatattttgatagtaaagggttttgtttcttgaatatcttcactttaaacaaaaaaaaaaacaactttcatttgtgtggcatttatttttggaagtgtcttcttttttttctttattaaagtttttgaaacttgcctaacttgtttg

SEQ ID NO: 302273 - DNA, 1393 bp, Homo sapiens
ttatacagacataagtatacagcttgaccaatttttacaaagtgaacaaacctgtgaaaccagcacccagctcaagaaatagtattacaaggaccctagaaaccctttcttctcccttcttagctttacctctgtcgtcaaggaattgagtgatctacagcgcgatccacctgctcactgttcagctggacctgtgggagatgacttgttccactggcaagccactattatggggcctcctgatagcgcatatcaaggtggagtcttctttctcactgtacattttccgacagattatccttttaaaccaccaaagattgctttcacaacaaaaatttaccatccaaacataaacagtaatggaagtatttgtctcgatattctgaggtcacaatggtcaccagctctgactgtatcaaaagttttattgtccatatgttctctactttgtgatcctaatccagatgaccccttagtaccagatattgcacaaatctataaatcagacaaagaaaaatacaacagacatgcaagagaatggactcagaaatatgcaatgtaaaaatcaaaaacattttcatatataccagagtactgtaaaatctaggtttttttcaacattagcagtaaattgagcactgtttactgtttcattgtaccatgaaaccatttgatttttacccattttaaatgtgtttctgaagcaagacaaaacaaacttccaaaaatacccttaagactgtgatgagagcatttatcattttgtatgcattgagaaagacatttattatggtttttaagatacttggacatctgcatcttcagcttacaagatctacaatgcagctgaaaagcaaccaaattattttttgctgaaactagatgtttttacatgagaaatactgtatgtgttgtctaagatgtcagttttataaatctgtattcagatttcattctttgttagctcactttataatttgtatttttttactgtatagactaaatatattctatttacatgtatgtcaactcattacttttttcctgtgaacagtattgaaaaaccccaacggctgataattaagtgaattaactgtgtctcccttgtcttaggatattctgtagattgattgcagatttcttaaatctgaaatgatctttacactgtaattctcagcatactgattatggagaaacacttgttttgattttgttatacttgacttaactttattgcaatgtgaattaattgcactgctaagtaggaagatgtgtaacttttatttgttgctattcacatttgaattttttcctgtataggcaatattatattgacaccttttacagatcttactgtagctttttccatataaataaaatgctttttctacta

SEQ ID NO: 302274 - DNA, 2207 bp, Homo sapiens
ggaaacaaaagagtctcgccggcgtccccgcccgcacactcgcgcacactcgcgctcgggcgcacacggagcagggaccggcgcccggagcgagccagggagcggctaaccggggacccaccgcgcggagccagcctagctgccagcgagcccaacccgcgacgacccacgcccctgagccccgcagccgacccctgccggccggtgtccccaccgccatccctgacccatggcgctgaagaggattcagaaagaattgagtgatctacagcgcgatccacctgctcactgttcagctggacctgtgggagatgacttgttccactggcaagccactattatggggcctcctgatagcgcatatcaaggtggagtcttctttctcactgtacattttccgacagattatccttttaaaccaccaaagattgctttcacaacaaaaatttaccatccaaacataaacagtaatggaagtatttgtctcgatattctgaggtcacaatggtcaccagctctgactgtatcaaaagttttattgtccatatgttctctactttgtgatcctaatccagatgaccccttagtaccagatattgcacaaatctataaatcagacaaagaaaagtaagtgtttacttattttagtttctgtatggatacattcctatatagtatgccaaaacacgaatattatcaatatgttttaagtcaatttgattatggttgttatatgtatattgtttatctttttccaatggagtaaacctttctttgagaactctgttagaccttttatgataaatcttgttccttcccacttactgttcaatagtatatactctgtatttgaaaaatagatgtatatattctaggtgataaattaaaaatgaaagaatttaatcattggaaagtattaaatatatattgcttatcttctccaaggaagaggagttctctcgtacccatccaaactgacctaattctcaagctgcttcatcttgctagtactgtaggttcatttgcaatttgtagataatgctccttcaggattggcttttgtaaatttctgttagaagctggtttctgcattttgatttttgtgtatttggatacattttcatataggttgcagagaaatccatgagttaaaaaattatttttcctgttttatttctgcatgaacctaagtcacattgacccagtaattgatatatgtgtgattattgcaattaagtataagaaggtagaatatatagttttattagacagatgcttctgaaatattaattttgtatgtttttactatatcctttttgtgtatctacagatacaacagacatgcaagagaatggactcagaaatatgcaatgtaaaaatcaaaaacattttcatatataccagagtactgtaaaatctaggtttttttcaacattagcagtaaattgagcactgtttactgtttcattgtaccatgaaaccatttgatttttacccattttaaatgtgtttctgaagcaagacaaaacaaacttccaaaaatacccttaagactgtgatgagagcatttatcattttgtatgcattgagaaagacatttattatggtttttaagatacttggacatctgcatcttcagcttacaagatctacaatgcagctgaaaagcaaccaaattattttttgctgaaactagatgtttttacatgagaaatactgtatgtgttgtctaagatgtcagttttataaatctgtattcagatttcattctttgttagctcactttataatttgtatttttttactgtatagactaaatatattctatttacatgtatgtcaactcattacttttttcctgtgaacagtattgaaaaaccccaacggctgataattaagtgaattaactgtgtctcccttgtcttaggatattctgtagattgattgcagatttcttaaatctgaaatgatctttacactgtaattctcagcatactgattatggagaaacacttgttttgattttgttatacttgacttaactttattgcaatgtgaattaattgcactgctaagtaggaagatgtgtaacttttatttgttgctattcacatttgaattttttcctgtataggcaatattatattgacaccttttacagatcttactgtagctttttccatataaataaaatgctttttctacta

SEQ ID NO: 302275 - DNA, 1392 bp, Homo sapiens
agccatggttaattactttagatgctgctcaaccagtcataccggctactagagacttatttattacactgtccaaaatactcttcagttcctttgagggcaaaagaaggaagctgacttgtttgtgttcacattctcactagctagaactgtgtgtagcacaaagtagataattatttgatttgtgttgatgacttttctcctctaaagttatgtaaagttgaggatattttaccctagagcaaattggttctgttttattcatagttgattcaaaggtgattgtcatattttgttgttttgttttatgtttagattgctttcacaacaaaaatttaccatccaaacataaacagtaatggaagtatttgtctcgatattctgaggtcacaatggtcaccagctctgactgtatcaaaagttttattgtccatatgttctctactttgtgatcctaatccagatgaccccttagtaccagatattgcacaaatctataaatcagacaaagaaaaatacaacagacatgcaagagaatggactcagaaatatgcaatgtaaaaatcaaaaacattttcatatataccagagtactgtaaaatctaggtttttttcaacattagcagtaaattgagcactgtttactgtttcattgtaccatgaaaccatttgatttttacccattttaaatgtgtttctgaagcaagacaaaacaaacttccaaaaatacccttaagactgtgatgagagcatttatcattttgtatgcattgagaaagacatttattatggtttttaagatacttggacatctgcatcttcagcttacaagatctacaatgcagctgaaaagcaaccaaattattttttgctgaaactagatgtttttacatgagaaatactgtatgtgttgtctaagatgtcagttttataaatctgtattcagatttcattctttgttagctcactttataatttgtatttttttactgtatagactaaatatattctatttacatgtatgtcaactcattacttttttcctgtgaacagtattgaaaaaccccaacggctgataattaagtgaattaactgtgtctcccttgtcttaggatattctgtagattgattgcagatttcttaaatctgaaatgatctttacactgtaattctcagcatactgattatggagaaacacttgttttgattttgttatacttgacttaactttattgcaatgtgaattaattgcactgctaagtaggaagatgtgtaacttttatttgttgctattcacatttgaattttttcctgtataggcaatattatattgacaccttttacagatcttactgtagctttttccatataaataaaatgctttttctacta

SEQ ID NO: 302276 - DNA, 3231 bp, Homo sapiens
cgctgctctgcggggaggcgggcgctcccgcaggggttcctccaagatggcggcgcagaggaggagcttgctgcagagtgagcagcagccaagctggacagatgacctgcctctctgccacctctctggggttggctcagcctccaaccgcagctactctgctgatggcaagggcactgagagccacccgccagaggacagctggctcaagttcaggagtgagaacaactgcttcctgtatggggtcttcaacggctatgatggcaaccgagtgaccaacttcgtggcccagcggctgtccgcagagctcctgctgggccagctgaatgccgagcacgccgaggccgatgtgcggcgtgtgctgctgcaggccttcgatgtggtggagaggagcttcctggagtccattgacgacgccttggctgagaaggcaagcctccagtcgcaattgccagagggagtccctcagcaccagctgcctcctcagtatcagaagatccttgagagactcaagacgttagagagggaaatttcgggaggggccatggccgttgtggcggtccttctcaacaacaagctctacgtcgccaatgtcggtacaaaccgtgcacttttatgcaaatcgacagtggatgggttgcaggtgacacagctgaacgtggaccacaccacagagaacgaggatgagctcttccgtctttcgcagctgggcttggatgctggaaagatcaagcaggtggggatcatctgtgggcaggagagcacccggcggatcggggattacaaggttaaatatggctacacggacattgaccttctcagcgctgccaagtccaaaccaatcatcgcagagccagaaatccatggggcacagccgctggatggggtgacgggcttcttggtgctgatgtcggaggggttgtacaaggccctagaggcagcccatgggcctgggcaggccaaccaggagattgctgcgatgattgacactgagtttgccaagcagacctccctggacgcagtggcccaggccgtcgtggaccgggtgaagcgcatccacagcgacaccttcgccagtggtggggagcgtgccaggttctgcccccggcacgaggacatgaccctgctagtgaggaactttggctacccgctgggcgaaatgagccagcccacaccgagcccagccccagctgcaggaggacgagtgtaccctgtgtctgtgccatactccagcgcccagagcaccagcaagaccagcgtgaccctctcccttgtcatgccctcccagggccagatggtcaacggggctcacagtgcttccaccctggacgaagccacccccaccctcaccaaccaaagcccgaccttaaccctgcagtccaccaacacgcacacgcagagcagcagctccagctctgacggaggcctcttccgctcccggcccgcccactcgctcccgcctggcgaggacggtcgtgttgagccctatgtggactttgctgagttttaccgcctctggagcgtggaccatggcgagcagagcgtggtgacagcaccgtagggcagccggagaatgcagcccaagcagggcctggcatggggcaggacagggtccagccttttcctaacatctgcctgtgccacaacggccagcaggtgccccatcctctgcccacagcagactctgtcccatggctctccgggcagtagagtgtgtgagtgcagactggacctgtggttcataccttgtcaccacccgggaagctgaaggccacttcctcccagatggcctcagccaggaccatcgccctttctcagagcagagggccaggtatagaaaccgcagtgggcctgcaagccgcccgagcctccccagcagcctcctacagagcaggaagaggcgccctgtgaaccctgagtgttgcaggcccagcagaccctgctgtcccaagcccacccctcctcccaccatcacctccctcacctcgggacagtagccctccacttctccagcctctcagccctgtgctcctgcatccagagtggaacccaggctggtgtccgcatctgtccctgggccccacccctggacctgccttggttgtgtcatctgttgtaaacattcaggaggaccagggcagcatctggggcctgggatggccacagaaggggcaggccaggtggaaaggagccagggggaagtggtctaagagacctggaactgccagaggatggcggcctgggcttccccagagccaggcgtgcgggagaggtgaggactggccccggtgggctgaggcaggggccgctgtcgtcaggcctgagccagggtgagctggtgcctgccttgcattttccttctggtgctgtgaagaccataggctggcaggcagctgagatgaactgtctttaccactgatgaggggcctctgccggctgagggtagcaagcaggggttgtgagtcaggctgggggacttgtttgaaagaaagaggagtggaaaatggttccaggagggaagaggttctttgagacacagtaccctgggaggcataggagaagggtcgggccagcccagcccagggcctgagttagactatttcccacatgttctctgccttcagtggggagggggtgccaccagggctgtcggccaggattgccactcctgtttcagaggaagcaggccgagagacttgcaccttggccaagccacacaatcagtggggcagccagagctcagacctgagccattttgtcagtatccaggaccccccggattctccacgccctccccatctcccagtctccctgccccccatgccccagaccggcccaccagggactagccgctgtcgcacagcctctggggtgcttggtctctgcaaagtcaaaggcctgacagctctgtggcctgggaatccattttcctgcggcagagcagggcctggtgtggaaccagggagctgtgggaagccacagcagaaatggaagaaaaacaggtctcagcccagggtcctcgctcactccctcactccccactttgaagccatctctgttctgcaggtgagaggatttaaagtcagtcacaaaggcttgggaacaaaaggaattctcttccaagaatgcctctgtggtgctgtttggtctctagaaacagggtcacttttttaatgtagtaaagaagtaataaatggtggcattacacattgtgatattaaaaaaaaaaaa

SEQ ID NO: 302277 - DNA, 3177 bp, Homo sapiens
cgctgctctgcggggaggcgggcgctcccgcaggggttcctccaagatggcggcgcagaggaggagcttgctgcagagtgagcagcagccaagctggacagatgacctgcctctctgccacctctctggggttggctcagcctccaaccgcagctactctgctgatggcaagggcactgagagccacccgccagaggacagctggctcaagttcaggagtgagaacaactgcttcctgtatggggtcttcaacggctatgatggcaaccgagtgaccaacttcgtggcccagcggctgtccgcagagctcctgctgggccagctgaatgccgagcacgccgaggccgatgtgcggcgtgtgctgctgcaggccttcgatgtggtggagaggagcttcctggagtccattgacgacgccttggctgagaaggcaagcctccagtcgcaattgccagagggagtccctcagcaccagctgcctcctcagtatcagaagatccttgagagactcaagacgttagagagggaaatttcgggaggggccatggccgttgtggcggtccttctcaacaacaagctctacgtcgccaatgtcggtacaaaccgtgcacttttatgcaaatcgacagtggatgggttgcaggtgacacagctgaacgtggaccacaccacagagaacgaggatgagctcttccgtctttcgcagctgggcttggatgctggaaagatcaagcaggtggggatcatctgtgggcaggagagcacccggcggatcggggattacaaggttaaatatggctacacggacattgaccttctcagcgctgccaagtccaaaccaatcatcgcagagccagaaatccatggggcacagccgctggatggggtgacgggcttcttggtgctgatgtcggaggggttgtacaaggccctagaggcagcccatgggcctgggcaggccaaccaggagattgctgcgatgattgacactgagtttgccaagcagacctccctggacgcagtggcccaggccgtcgtggaccgggtgaagcgcatccacagcgacaccttcgccagtggtggggagcgtgccaggttctgcccccggcacgaggacatgaccctgctagtgaggaactttggctacccgctgggcgaaatgagccagcccacaccgagcccagccccagctgcaggaggacgagtgtaccctgtgtctgtgccatactccagcgcccagagcaccagcaagaccagcgtgaccctctcccttgtcatgccctcccagggccagatggtcaacggggctcacagtgcttccaccctggacgaagccacccccaccctcaccaaccaaagcccgaccttaaccctgcagtccaccaacacgcacacgcagagcagcagctccagctctgacggaggcctcttccgctcccggcccgcccactcgctcccgcctggcgaggacggtcgtgttgagccctatgtggactttgctgagttttaccgcctctggagcgtggaccatggcgagcagagcgtggtgacagcaccgtagggcagccggagaatgcagcccaagcagggcctggcatggggcaggacagggtccagccttttcctaacatctgcctgtgccacaacggccagcaggtgccccatcctctgcccacagcagactctgtcccatggctctccgggcagtagagtgtgtgagtgcagactggacctgtggttcataccttgtcaccacccgggaagctgaaggccacttcctcccagatggcctcagccaggaccatcgccctttctcagagcagagggccaggtatagaaaccgcagtgggcctgcaagccgcccgagcctccccagcagcctcctacagagcaggaagaggcgccctgtgaaccctgagtgttgcaggcccagcagaccctgctgtcccaagcccacccctcctcccaccatcacctccctcacctcgggacagtagccctccacttctccagcctctcagccctgtgctcctgcatccagagtggaacccaggctggtgtccgcatctgtccctgggccccacccctggacctgccttggttgtgtcatctgttgtaaacattcaggaggaccagggcagcatctggggcctgggatggccacagaaggggcaggccaggtggaaaggagccagggggaagtggtctaagagacctggaactgccagaggatggcggcctgggcttccccagagccaggcgtgcgggagaggtgaggactggccccggtgggctgaggcaggggccgctgtcgtcaggcctgagccagggtgagctggtgcctgccttgcattttccttctggtgctgtgaagaccataggctggcaggcagctgagatgaactgtctttaccactgatgaggggcctctgccggctgagggtagcaagcaggggttgtgagtcaggctgggggacttgtttgaaagaaagaggagtggaagagaagggtcgggccagcccagcccagggcctgagttagactatttcccacatgttctctgccttcagtggggagggggtgccaccagggctgtcggccaggattgccactcctgtttcagaggaagcaggccgagagacttgcaccttggccaagccacacaatcagtggggcagccagagctcagacctgagccattttgtcagtatccaggaccccccggattctccacgccctccccatctcccagtctccctgccccccatgccccagaccggcccaccagggactagccgctgtcgcacagcctctggggtgcttggtctctgcaaagtcaaaggcctgacagctctgtggcctgggaatccattttcctgcggcagagcagggcctggtgtggaaccagggagctgtgggaagccacagcagaaatggaagaaaaacaggtctcagcccagggtcctcgctcactccctcactccccactttgaagccatctctgttctgcaggtgagaggatttaaagtcagtcacaaaggcttgggaacaaaaggaattctcttccaagaatgcctctgtggtgctgtttggtctctagaaacagggtcacttttttaatgtagtaaagaagtaataaatggtggcattacacattgtgatattaaaaaaaaaaaa

SEQ ID NO: 302278 - DNA, 3213 bp, Homo sapiens
  misc_feature (21)..(21): n is a, c, g, or t
ttgagataccctgcgcccccntgagttaatgggatcgcagaggaggagcttgctgcagagtgagcagcagccaagctggacagatgacctgcctctctgccacctctctggggttggctcagcctccaaccgcagctactctgctgatggcaagggcactgagagccacccgccagaggacagctggctcaagttcaggagtgagaacaactgcttcctgtatggggtcttcaacggctatgatggcaaccgagtgaccaacttcgtggcccagcggctgtccgcagagctcctgctgggccagctgaatgccgagcacgccgaggccgatgtgcggcgtgtgctgctgcaggccttcgatgtggtggagaggagcttcctggagtccattgacgacgccttggctgagaaggcaagcctccagtcgcaattgccagagggagtccctcagcaccagctgcctcctcagtatcagaagatccttgagagactcaagacgttagagagggaaatttcgggaggggccatggccgttgtggcggtccttctcaacaacaagctctacgtcgccaatgtcggtacaaaccgtgcacttttatgcaaatcgacagtggatgggttgcaggtgacacagctgaacgtggaccacaccacagagaacgaggatgagctcttccgtctttcgcagctgggcttggatgctggaaagatcaagcaggtggggatcatctgtgggcaggagagcacccggcggatcggggattacaaggttaaatatggctacacggacattgaccttctcagcgctgccaagtccaaaccaatcatcgcagagccagaaatccatggggcacagccgctggatggggtgacgggcttcttggtgctgatgtcggaggggttgtacaaggccctagaggcagcccatgggcctgggcaggccaaccaggagattgctgcgatgattgacactgagtttgccaagcagacctccctggacgcagtggcccaggccgtcgtggaccgggtgaagcgcatccacagcgacaccttcgccagtggtggggagcgtgccaggttctgcccccggcacgaggacatgaccctgctagtgaggaactttggctacccgctgggcgaaatgagccagcccacaccgagcccagccccagctgcaggaggacgagtgtaccctgtgtctgtgccatactccagcgcccagagcaccagcaagaccagcgtgaccctctcccttgtcatgccctcccagggccagatggtcaacggggctcacagtgcttccaccctggacgaagccacccccaccctcaccaaccaaagcccgaccttaaccctgcagtccaccaacacgcacacgcagagcagcagctccagctctgacggaggcctcttccgctcccggcccgcccactcgctcccgcctggcgaggacggtcgtgttgagccctatgtggactttgctgagttttaccgcctctggagcgtggaccatggcgagcagagcgtggtgacagcaccgtagggcagccggagaatgcagcccaagcagggcctggcatggggcaggacagggtccagccttttcctaacatctgcctgtgccacaacggccagcaggtgccccatcctctgcccacagcagactctgtcccatggctctccgggcagtagagtgtgtgagtgcagactggacctgtggttcataccttgtcaccacccgggaagctgaaggccacttcctcccagatggcctcagccaggaccatcgccctttctcagagcagagggccaggtatagaaaccgcagtgggcctgcaagccgcccgagcctccccagcagcctcctacagagcaggaagaggcgccctgtgaaccctgagtgttgcaggcccagcagaccctgctgtcccaagcccacccctcctcccaccatcacctccctcacctcgggacagtagccctccacttctccagcctctcagccctgtgctcctgcatccagagtggaacccaggctggtgtccgcatctgtccctgggccccacccctggacctgccttggttgtgtcatctgttgtaaacattcaggaggaccagggcagcatctggggcctgggatggccacagaaggggcaggccaggtggaaaggagccagggggaagtggtctaagagacctggaactgccagaggatggcggcctgggcttccccagagccaggcgtgcgggagaggtgaggactggccccggtgggctgaggcaggggccgctgtcgtcaggcctgagccagggtgagctggtgcctgccttgcattttccttctggtgctgtgaagaccataggctggcaggcagctgagatgaactgtctttaccactgatgaggggcctctgccggctgagggtagcaagcaggggttgtgagtcaggctgggggacttgtttgaaagaaagaggagtggaaaatggttccaggagggaagaggttctttgagacacagtaccctgggaggcataggagaagggtcgggccagcccagcccagggcctgagttagactatttcccacatgttctctgccttcagtggggagggggtgccaccagggctgtcggccaggattgccactcctgtttcagaggaagcaggccgagagacttgcaccttggccaagccacacaatcagtggggcagccagagctcagacctgagccattttgtcagtatccaggaccccccggattctccacgccctccccatctcccagtctccctgccccccatgccccagaccggcccaccagggactagccgctgtcgcacagcctctggggtgcttggtctctgcaaagtcaaaggcctgacagctctgtggcctgggaatccattttcctgcggcagagcagggcctggtgtggaaccagggagctgtgggaagccacagcagaaatggaagaaaaacaggtctcagcccagggtcctcgctcactccctcactccccactttgaagccatctctgttctgcaggtgagaggatttaaagtcagtcacaaaggcttgggaacaaaaggaattctcttccaagaatgcctctgtggtgctgtttggtctctagaaacagggtcacttttttaatgtagtaaagaagtaataaatggtggcattacacattgtgatattaaaaaaaaaaaa

SEQ ID NO: 302279 - DNA, 2728 bp, Homo sapiens
gtgaaatgcctgccttttccctctctgccttcccggtatgccctatttctctctgtgtgtagtctttgcttagctgttcacattctgccacaggtacaaaccgtgcacttttatgcaaatcgacagtggatgggttgcaggtgacacagctgaacgtggaccacaccacagagaacgaggatgagctcttccgtctttcgcagctgggcttggatgctggaaagatcaagcaggtggggatcatctgtgggcaggagagcacccggcggatcggggattacaaggttaaatatggctacacggacattgaccttctcagcgctgccaagtccaaaccaatcatcgcagagccagaaatccatggggcacagccgctggatggggtgacgggcttcttggtgctgatgtcggaggggttgtacaaggccctagaggcagcccatgggcctgggcaggccaaccaggagattgctgcgatgattgacactgagtttgccaagcagacctccctggacgcagtggcccaggccgtcgtggaccgggtgaagcgcatccacagcgacaccttcgccagtggtggggagcgtgccaggttctgcccccggcacgaggacatgaccctgctagtgaggaactttggctacccgctgggcgaaatgagccagcccacaccgagcccagccccagctgcaggaggacgagtgtaccctgtgtctgtgccatactccagcgcccagagcaccagcaagaccagcgtgaccctctcccttgtcatgccctcccagggccagatggtcaacggggctcacagtgcttccaccctggacgaagccacccccaccctcaccaaccaaagcccgaccttaaccctgcagtccaccaacacgcacacgcagagcagcagctccagctctgacggaggcctcttccgctcccggcccgcccactcgctcccgcctggcgaggacggtcgtgttgagccctatgtggactttgctgagttttaccgcctctggagcgtggaccatggcgagcagagcgtggtgacagcaccgtagggcagccggagaatgcagcccaagcagggcctggcatggggcaggacagggtccagccttttcctaacatctgcctgtgccacaacggccagcaggtgccccatcctctgcccacagcagactctgtcccatggctctccgggcagtagagtgtgtgagtgcagactggacctgtggttcataccttgtcaccacccgggaagctgaaggccacttcctcccagatggcctcagccaggaccatcgccctttctcagagcagagggccaggtatagaaaccgcagtgggcctgcaagccgcccgagcctccccagcagcctcctacagagcaggaagaggcgccctgtgaaccctgagtgttgcaggcccagcagaccctgctgtcccaagcccacccctcctcccaccatcacctccctcacctcgggacagtagccctccacttctccagcctctcagccctgtgctcctgcatccagagtggaacccaggctggtgtccgcatctgtccctgggccccacccctggacctgccttggttgtgtcatctgttgtaaacattcaggaggaccagggcagcatctggggcctgggatggccacagaaggggcaggccaggtggaaaggagccagggggaagtggtctaagagacctggaactgccagaggatggcggcctgggcttccccagagccaggcgtgcgggagaggtgaggactggccccggtgggctgaggcaggggccgctgtcgtcaggcctgagccagggtgagctggtgcctgccttgcattttccttctggtgctgtgaagaccataggctggcaggcagctgagatgaactgtctttaccactgatgaggggcctctgccggctgagggtagcaagcaggggttgtgagtcaggctgggggacttgtttgaaagaaagaggagtggaaaatggttccaggagggaagaggttctttgagacacagtaccctgggaggcataggagaagggtcgggccagcccagcccagggcctgagttagactatttcccacatgttctctgccttcagtggggagggggtgccaccagggctgtcggccaggattgccactcctgtttcagaggaagcaggccgagagacttgcaccttggccaagccacacaatcagtggggcagccagagctcagacctgagccattttgtcagtatccaggaccccccggattctccacgccctccccatctcccagtctccctgccccccatgccccagaccggcccaccagggactagccgctgtcgcacagcctctggggtgcttggtctctgcaaagtcaaaggcctgacagctctgtggcctgggaatccattttcctgcggcagagcagggcctggtgtggaaccagggagctgtgggaagccacagcagaaatggaagaaaaacaggtctcagcccagggtcctcgctcactccctcactccccactttgaagccatctctgttctgcaggtgagaggatttaaagtcagtcacaaaggcttgggaacaaaaggaattctcttccaagaatgcctctgtggtgctgtttggtctctagaaacagggtcacttttttaatgtagtaaagaagtaataaatggtggcattacacattgtgatattaaaaaaaaaaaa

SEQ ID NO: 302280 - DNA, 2231 bp, Homo sapiens
cgctgctctgcggggaggcgggcgctcccgcaggggttcctccaagatggcggcgcagaggaggagcttgctgcagagtgagcagcagccaagctggacagatgacctgcctctctgccacctctctggggttggctcagcctccaaccgcagctactctgctgatggcaagggcactgagagccacccgccagaggacagctggctcaagttcaggagtgagaacaactgcttcctgtatggggtcttcaacggctatgatggcaaccgagtgaccaacttcgtggcccagcggctgtccgcagagctcctgctgggccagctgaatgccgagcacgccgaggccgatgtgcggcgtgtgctgctgcaggccttcgatgtggtggagaggagcttcctggagtccattgacgacgccttggctgagaaggcaagcctccagtcgcaattgccagagggagtccctcagcaccagctgcctcctcagtatcagaagatccttgagagactcaagacgttagagagggaaatttcgggaggggccatggccgttgtggcggtccttctcaacaacaagctctacgtcgccaatgtcggtacaaaccgtgcacttttatgcaaatcgacagtggatgggttgcaggtgacacagctgaacgtggaccacaccacagagaacgaggatgagctcttccgtctttcgcagctgggcttggatgctggaaagatcaagcaggtggggatcatctgtgggcaggagagcacccggcggatcggggattacaaggttaaatatggctacacggacattgaccttctcagcgctgccaagtccaaaccaatcatcgcagagccagaaatccatggggcacagccgctggatggggtgacgggcttcttggtgctgatgtcggaggggttgtacaaggccctagaggcagcccatgggcctgggcaggccaaccaggagattgctgcgatgattgacactgagtttgccaagcagacctccctggacgcagtggcccaggccgtcgtggaccgggtgaagcgcatccacagcgacaccttcgccagtggtggggagcgtgccaggttctgcccccggcacgaggacatgaccctgctagtgaggaactttggctacccgctgggcgaaatgagccagcccacaccgagcccagccccagctgcaggaggacgagtgtaccctgtgtctgtgccatactccagcgcccagagcaccagcaagaccagcgtgaccctctcccttgtcatgccctcccagggccagatggtcaacggggctcacagtgcttccaccctggacgaagccacccccaccctcaccaaccaaagcccgaccttaaccctgcagtccaccaacacgcacacgcagagcagcagctccagctctgacggaggcctcttccgctcccggcccgcccactcgctcccgcctggcgaggacggtcgtgttgagccctatgtggactttgctgagttttaccgcctctggagcgtggaccatggcgagcagagcgtggtgacagcaccgtagggcagccggagaatgcagcccaagcagggcctggcatggggcaggacagggtccagccttttcctaacatctgcctgtgccacaacggccagcaggtgccccatcctctgcccacagcagactctgtcccatggctctccgggcagtagagtgtgtgagtgcagactggacctgtggttcataccttgtcaccacccgggaagctgaaggccacttcctcccagatggcctcagccaggaccatcgccctttctcagagcagagggccaggtatagaaaccgcagtgggcctgcaagccgcccgagcctccccagcagcctcctacagagcaggaagaggcgccctgtgaaccctgggaatccattttcctgcggcagagcagggcctggtgtggaaccagggagctgtgggaagccacagcagaaatggaagaaaaacaggtctcagcccagggtcctcgctcactccctcactccccactttgaagccatctctgttctgcaggtgagaggatttaaagtcagtcacaaaggcttgggaacaaaaggaattctcttccaagaatgcctctgtggtgctgtttggtctctagaaacagggtcacttttttaatgtagtaaagaagtaataaatggtggcattacacattgtgatattaaaaaaaaaaaa

SEQ ID NO: 302281 - DNA, 1440 bp, Homo sapiens
cgctgctctgcggggaggcgggcgctcccgcaggggttcctccaagatggcggcgcagaggaggagcttgctgcagagtgagcagcagccaagctggacagatgacctgcctctctgccacctctctggggttggctcagcctccaaccgcagctactctgctgatggcaagggcactgagagccacccgccagaggacagctggctcaagttcaggagtgagaacaactgcttcctgtatggggtcttcaacggctatgatggcaaccgagtgaccaacttcgtggcccagcggctgtccgcagagctcctgctgggccagctgaatgccgagcacgccgaggccgatgtgcggcgtgtgctgctgcaggccttcgatgtggtggagaggagcttcctggagtccattgacgacgccttggctgagaaggcaagcctccagtcgcaattgccagagggagtccctcagcaccagctgcctcctcagtatcagaagatccttgagagactcaagacgttagagagggaaatttcgggaggggccatggccgttgtggcggtccttctcaacaacaagctctacgtcgccaatgtcggtacaaaccgtgcacttttatgcaaatcgacagtggatgggttgcaggtgacacagctgaacgtggaccacaccacagagaacgaggatgagctcttccgtctttcgcagctgggcttggatgctggaaagatcaagcaggtggggatcatctgtgggcaggagagcacccggcggatcggggattacaaggttaaatatggctacacggacattgaccttctcagcgctgccaagtccaaaccaatcatcgcagagccagaaatccatggggcacagccgctggatggggtgacgggcttcttggtgctgatgtcggaggggttgtacaaggccctagaggcagcccatgggcctgggcaggccaaccaggagattgctgcgatgattgacactgagtttgccaagcagacctccctggacgcagtggcccaggccgtcgtggaccgggtgaagcgcatccacagcgacaccttcgccagtggtggggagcgtgccaggttctgcccccggcacgaggacatgaccctgctagtgaggaactttggctacccgtgggcagcgctaacaggcagttccactgtgggaagccacagcagaaatggaagaaaaacaggtctcagcccagggtcctcgctcactccctcactccccactttgaagccatctctgttctgcaggtgagaggatttaaagtcagtcacaaaggcttgggaacaaaaggaattctcttccaagaatgcctctgtggtgctgtttggtctctagaaacagggtcacttttttaatgtagtaaagaagtaataaatggtggcattacacattgtgatattaaaaaaaaaaaa

SEQ ID NO: 302282 - DNA, 540 bp, Homo sapiens
atctcggctcactgtaacctccacctcccgggttcaagtcattcttctgcctcagcctcctgagtagctgggactacaggcatgtgccaccaccacacccggctaatttttgtatttttagtagagatggggttttgcctttttggccaggcttatcttgaactcgtaacctcagatgatccacctgccttggcctcccaaagttctgggattatagacatgagccactgcgcccagcctgtgttctgatttctttacctgttatataagcttaccattccttccagtagccttataacatagagggacaggggcttatttccaggtagagtagggaatttggggtccacggagttcaggttcttgccagaagtgacgttgctgcttagtgttgaaactgagcccaccaggaccaggtgcaggtcatttcctattacctgtccctgccctcctgccccgcccaaaagaaactttatgatggtgagaaagtgatacatattcagtgggaactgtgctcccatacccctacaaccattctgt

SEQ ID NO: 302283 - DNA, 376 bp, Homo sapiens
ggagagagcagtgaggccggagagaaagaagctgccgcggaggaagacaggctgcgggttcccgggactgcaggtccaggcagggtaggagccgcacctcgttccttaccaggttcttcctaccccctcccccaggagattgctgcgatgattgacactgagtttgccaagcagacctccctggacgcagtggcccaggccgtcgtggaccgggtgaagcgcatccacagcgacaccttcacacacccaggctggagagacactgcgctcagggacggcttgatggtagccaggacctcctctctactgcgggggtgggcgggggcggaggatgggaactggctagtgagcactgaaatataaattctaaatcctc

SEQ ID NO: 302284 - DNA, 3353 bp, Homo sapiens
cgctgctctgcggggaggcgggcgctcccgcaggggttcctccaagatggcggcgcagaggaggagcttgctgcagagtgagcagcagccaagctggacagatgacctgcctctctgccacctctctggggttggctcagcctccaaccgcagctactctgctgatggcaagggcactgagagccacccgccagaggacagctggctcaagttcaggagtgagaacaactgcttcctgtatggggtcttcaacggctatgatggcaaccgagtgaccaacttcgtggcccagcggctgtccgcagagctcctgctgggccagctgaatgccgagcacgccgaggccgatgtgcggcgtgtgctgctgcaggccttcgatgtggtggagaggagcttcctggagtccattgacgacgccttggctgagaaggcaagcctccagtcgcaattgccagagggagtccctcagcaccagctgcctcctcagtatcagaagatccttgagagactcaagacgttagagagggaaatttcgggaggggccatggccgttgtggcggtccttctcaacaacaagctctacgtcgccaatgtcggtacaaaccgtgcacttttatgcaaatcgacagtggatgggttgcaggtgacacagctgaacgtggaccacaccacagagaacgaggatgagctcttccgtctttcgcagctgggcttggatgctggaaagatcaagcaggtggggatcatctgtgggcaggagagcacccggcggatcggggattacaaggttaaatatggctacacggacattgaccttctcagcgctgccaagtccaaaccaatcatcgcagagccagaaatccatggggcacagccgctggatggggtgacgggcttcttggtgctgatgtcggaggggttgtacaaggccctagaggcagcccatgggcctgggcaggccaaccagatggagtcttgctctgttggccaagctggagtgcagtggtgcaatctcggctcactgtaacctccacctcccgggttcaagtcattcttctgcctcagcctcctgagtagctgggactacaggagattgctgcgatgattgacactgagtttgccaagcagacctccctggacgcagtggcccaggccgtcgtggaccgggtgaagcgcatccacagcgacaccttcgccagtggtggggagcgtgccaggttctgcccccggcacgaggacatgaccctgctagtgaggaactttggctacccgctgggcgaaatgagccagcccacaccgagcccagccccagctgcaggaggacgagtgtaccctgtgtctgtgccatactccagcgcccagagcaccagcaagaccagcgtgaccctctcccttgtcatgccctcccagggccagatggtcaacggggctcacagtgcttccaccctggacgaagccacccccaccctcaccaaccaaagcccgaccttaaccctgcagtccaccaacacgcacacgcagagcagcagctccagctctgacggaggcctcttccgctcccggcccgcccactcgctcccgcctggcgaggacggtcgtgttgagccctatgtggactttgctgagttttaccgcctctggagcgtggaccatggcgagcagagcgtggtgacagcaccgtagggcagccggagaatgcagcccaagcagggcctggcatggggcaggacagggtccagccttttcctaacatctgcctgtgccacaacggccagcaggtgccccatcctctgcccacagcagactctgtcccatggctctccgggcagtagagtgtgtgagtgcagactggacctgtggttcataccttgtcaccacccgggaagctgaaggccacttcctcccagatggcctcagccaggaccatcgccctttctcagagcagagggccaggtatagaaaccgcagtgggcctgcaagccgcccgagcctccccagcagcctcctacagagcaggaagaggcgccctgtgaaccctgagtgttgcaggcccagcagaccctgctgtcccaagcccacccctcctcccaccatcacctccctcacctcgggacagtagccctccacttctccagcctctcagccctgtgctcctgcatccagagtggaacccaggctggtgtccgcatctgtccctgggccccacccctggacctgccttggttgtgtcatctgttgtaaacattcaggaggaccagggcagcatctggggcctgggatggccacagaaggggcaggccaggtggaaaggagccagggggaagtggtctaagagacctggaactgccagaggatggcggcctgggcttccccagagccaggcgtgcgggagaggtgaggactggccccggtgggctgaggcaggggccgctgtcgtcaggcctgagccagggtgagctggtgcctgccttgcattttccttctggtgctgtgaagaccataggctggcaggcagctgagatgaactgtctttaccactgatgaggggcctctgccggctgagggtagcaagcaggggttgtgagtcaggctgggggacttgtttgaaagaaagaggagtggaaaatggttccaggagggaagaggttctttgagacacagtaccctgggaggcataggagaagggtcgggccagcccagcccagggcctgagttagactatttcccacatgttctctgccttcagtggggagggggtgccaccagggctgtcggccaggattgccactcctgtttcagaggaagcaggccgagagacttgcaccttggccaagccacacaatcagtggggcagccagagctcagacctgagccattttgtcagtatccaggaccccccggattctccacgccctccccatctcccagtctccctgccccccatgccccagaccggcccaccagggactagccgctgtcgcacagcctctggggtgcttggtctctgcaaagtcaaaggcctgacagctctgtggcctgggaatccattttcctgcggcagagcagggcctggtgtggaaccagggagctgtgggaagccacagcagaaatggaagaaaaacaggtctcagcccagggtcctcgctcactccctcactccccactttgaagccatctctgttctgcaggtgagaggatttaaagtcagtcacaaaggcttgggaacaaaaggaattctcttccaagaatgcctctgtggtgctgtttggtctctagaaacagggtcacttttttaatgtagtaaagaagtaataaatggtggcattacacattgtgatattaaaaaaaaaaaa

SEQ ID NO: 302285 - DNA, 2923 bp, Homo sapiens
attttggcaccagtgacagtggtgttttgaaccagcctttgccctgtcctgtgtccccctaggccttcgatgtggtggagaggagcttcctggagtccattgacgacgccttggctgagaaggcaagcctccagtcgcaattgccagagggagtccctcagcaccagctgcctcctcagtatcagaagatccttgagagactcaagacgttagagagggaaatttcgggaggggccatggccgttgtggcggtccttctcaacaacaagctctacgtcgccaatgtcggtacaaaccgtgcacttttatgcaaatcgacagtggatgggttgcaggtgacacagctgaacgtggaccacaccacagagaacgaggatgagctcttccgtctttcgcagctgggcttggatgctggaaagatcaagcaggtggggatcatctgtgggcaggagagcacccggcggatcggggattacaaggttaaatatggctacacggacattgaccttctcagcgctgccaagtccaaaccaatcatcgcagagccagaaatccatggggcacagccgctggatggggtgacgggcttcttggtgctgatgtcggaggggttgtacaaggccctagaggcagcccatgggcctgggcaggccaaccaggagattgctgcgatgattgacactgagtttgccaagcagacctccctggacgcagtggcccaggccgtcgtggaccgggtgaagcgcatccacagcgacaccttcgccagtggtggggagcgtgccaggttctgcccccggcacgaggacatgaccctgctagtgaggaactttggctacccgctgggcgaaatgagccagcccacaccgagcccagccccagctgcaggaggacgagtgtaccctgtgtctgtgccatactccagcgcccagagcaccagcaagaccagcgtgaccctctcccttgtcatgccctcccagggccagatggtcaacggggctcacagtgcttccaccctggacgaagccacccccaccctcaccaaccaaagcccgaccttaaccctgcagtccaccaacacgcacacgcagagcagcagctccagctctgacggaggcctcttccgctcccggcccgcccactcgctcccgcctggcgaggacggtcgtgttgagccctatgtggactttgctgagttttaccgcctctggagcgtggaccatggcgagcagagcgtggtgacagcaccgtagggcagccggagaatgcagcccaagcagggcctggcatggggcaggacagggtccagccttttcctaacatctgcctgtgccacaacggccagcaggtgccccatcctctgcccacagcagactctgtcccatggctctccgggcagtagagtgtgtgagtgcagactggacctgtggttcataccttgtcaccacccgggaagctgaaggccacttcctcccagatggcctcagccaggaccatcgccctttctcagagcagagggccaggtatagaaaccgcagtgggcctgcaagccgcccgagcctccccagcagcctcctacagagcaggaagaggcgccctgtgaaccctgagtgttgcaggcccagcagaccctgctgtcccaagcccacccctcctcccaccatcacctccctcacctcgggacagtagccctccacttctccagcctctcagccctgtgctcctgcatccagagtggaacccaggctggtgtccgcatctgtccctgggccccacccctggacctgccttggttgtgtcatctgttgtaaacattcaggaggaccagggcagcatctggggcctgggatggccacagaaggggcaggccaggtggaaaggagccagggggaagtggtctaagagacctggaactgccagaggatggcggcctgggcttccccagagccaggcgtgcgggagaggtgaggactggccccggtgggctgaggcaggggccgctgtcgtcaggcctgagccagggtgagctggtgcctgccttgcattttccttctggtgctgtgaagaccataggctggcaggcagctgagatgaactgtctttaccactgatgaggggcctctgccggctgagggtagcaagcaggggttgtgagtcaggctgggggacttgtttgaaagaaagaggagtggaaaatggttccaggagggaagaggttctttgagacacagtaccctgggaggcataggagaagggtcgggccagcccagcccagggcctgagttagactatttcccacatgttctctgccttcagtggggagggggtgccaccagggctgtcggccaggattgccactcctgtttcagaggaagcaggccgagagacttgcaccttggccaagccacacaatcagtggggcagccagagctcagacctgagccattttgtcagtatccaggaccccccggattctccacgccctccccatctcccagtctccctgccccccatgccccagaccggcccaccagggactagccgctgtcgcacagcctctggggtgcttggtctctgcaaagtcaaaggcctgacagctctgtggcctgggaatccattttcctgcggcagagcagggcctggtgtggaaccagggagctgtgggaagccacagcagaaatggaagaaaaacaggtctcagcccagggtcctcgctcactccctcactccccactttgaagccatctctgttctgcaggtgagaggatttaaagtcagtcacaaaggcttgggaacaaaaggaattctcttccaagaatgcctctgtggtgctgtttggtctctagaaacagggtcacttttttaatgtagtaaagaagtaataaatggtggcattacacattgtgatattaaaaaaaaaaaa

SEQ ID NO: 302286 - DNA, 2963 bp, Homo sapiens
cgctgctctgcggggaggcgggcgctcccgcaggggttcctccaagatggcggcgcagaggaggagcttgctgcagagtgagcagcagccaagctggacagatgacctgcctctctgccacctctctggggttggctcagcctccaaccgcagctactctgctgatggcaagggcactgagagccacccgccagaggacagctggctcaagttcaggagtgagaacaactgcttcctgtatggggtcttcaacggctatgatggcaaccgagtgaccaacttcgtggcccagcggctgtccgcagagctcctgctgggccagctgaatgccgagcacgccgaggccgatgtgcggcgtgtgctgctgcaggccttcgatgtggtggagaggagcttcctggagtccattgacgacgccttggctgagaaggcaagcctccagtcgcaattgccagagggagtccctcagcaccagctgcctcctcagtatcagaagatccttgagagactcaagacgttagagagggaaatttcgggaggggccatggccgttgtggcggtccttctcaacaacaagctctacgtcgccaatgtcggtacaaaccgtgcacttttatgcaaatcgacagtggatgggttgcaggtgacacagctgaacgtggaccacaccacagagaacgaggatgagctcttccgtctttcgcagctgggcttggatgctggaaagatcaagcaggtggggatcatctgtgggcaggagagcacccggcggatcggggattacaaggttaaatatggctacacggacattgaccttctcagcgctgccaagtccaaaccaatcatcgcagagccagaaatccatggggcacagccgctggatggggtgacgggcttcttggtgctgatgtcggaggggttgtacaaggccctagaggcagcccatgggcctgggcaggccaaccaggagattgctgcgatgattgacactgagtttgccaagcagacctccctggacgcagtggcccaggccgtcgtggaccgggtgaagcgcatccacagcgacaccttcgccagtggtggggagcgtgccaggttctgcccccggcacgaggacatgaccctgctagtgaggaactttggctacccgctgggcgaaatgagccagcccacaccgagcccagccccagctgcaggaggacgagtgtaccctgtgtctgtgccatactccagcgcccagagcaccagcaagaccagcgtgaccctctcccttgtcatgccctcccagggccagatggtcaacggggctcacagtgcttccaccctggacgaagccacccccaccctcaccaaccaaagcccgaccttaaccctgcagtccaccaacacgcacacgcagagcagcagctccagctctgacggaggcctcttccgctcccggcccgcccactcgctcccgcctggcgaggacggtcgtgttgagccctatgtggactttgctgagttttaccgcctctggagcgtggaccatggcgagcagagcgtggtgacagcaccgtagggcagccggagaatgcagcccaagcagggcctggcatggggcaggacagggtccagccttttcctaacatctgcctgtgccacaacggccagcaggtgccccatcctctgcccacagcagactctgtcccatggctctccgggcagtagagtgtgtgagtgcagactggacctgtggttcataccttgtcaccacccgggaagctgaaggccacttcctcccagatggcctcagccaggaccatcgccctttctcagagcagagggccaggtatagaaaccgcagtgggcctgcaagccgcccgagcctccccagcagcctcctacagagcaggaagaggcgccctgtgaaccctgagtgttgcaggcccagcagaccctgctgtcccaagcccacccctcctcccaccatcacctccctcacctcgggacagtagccctccacttctccagcctctcagccctgtgctcctgcatccagagtggaacccaggctggtgtccgcatctgtccctgggccccacccctggacctgccttggttgtgtcatctgttgtaaacattcaggaggaccagggcagcatctggggcctgggatggccacagaaggggcaggccaggtggaaaggagccagggggaagtggtctaagagacctggaactgccagaggatggcggcctgggcttccccagagccaggcgtgcgggagaggtgaggactggccccggtgggctgaggcaggggccgctgtcgtcaggcctgagccagggtgagctggtgcctgccttgcattttccttctggtgctgtgaagaccataggctggcaggcagctgagatgaactgtctttaccactgatgaggggcctctgccggctgagggtagcaagcaggggttgtgagtcaggctgggggacttgtttgaaagaaagaggagtggaaaatggttccaggagggaagaggttctttgagacacagtaccctgggaggcataggagaagggtcgggccagcccagcccagggcctgagttagactatttcccacatgttctctgcaaagtcaaaggcctgacagctctgtggcctgggaatccattttcctgcggcagagcagggcctggtgtggaaccagggagctgtgggaagccacagcagaaatggaagaaaaacaggtctcagcccagggtcctcgctcactccctcactccccactttgaagccatctctgttctgcaggtgagaggatttaaagtcagtcacaaaggcttgggaacaaaaggaattctcttccaagaatgcctctgtggtgctgtttggtctctagaaacagggtcacttttttaatgtagtaaagaagtaataaatggtggcattacacattgtgatattaaaaaaaaaaaa

SEQ ID NO: 302287 - DNA, 620 bp, Homo sapiens
  misc_feature (35)..(37): n is a, c, g, or t
  misc_feature (39)..(39): n is a, c, g, or t
  misc_feature (41)..(41): n is a, c, g, or t
aacgccaccgcccccgccacgcagatggggaaaannnanancctgagatggactgttacatgagtcagacatggaagtcaatgattgaacttaacaagcacctcccactagaagaagtctggggacctgagtttctgtaacctaacagctatgtttgcaatagagacatttggactgattcccagtccaagtgtctacctggtagcttctttcctcttcgtcctgatgctgctcttcttcactattcttgttttgagctactttcggtacatgaggatttatagacgatatatttatgaaccacttcacaaacctcaaagaaaacgtaagaagaattaggaaaactgaaagtttgtttattacagatatatgcatatagagaaacagtgtattacatagtgatattgagagtgtgtgtttgaccaagaaatactaaatataagctcgtagtagtaggcatcaccaaattcaagatctgaaaaatattcttgaactatctccaaaatagaaatgttttcatatatattgttattaaattaatcctttgtttgccttcattttaaagatactctatgtactctcacatggcatgaaaaaataaactaaatttgactattaca

SEQ ID NO: 302288 - DNA, 855 bp, Homo sapiens
gtttcaacctgtggttcaactatttgatgataatggctatgttaaagacgttgaagcaaatttcatagtgtgggaaatacacggcagggatgactatagctttaataatactatggcacagagtggttgtttacatgaagcacagacatggaagtcaatgattgaacttaacaagcacctcccactagaagaagtctggggacctgagaactataaacactgtttttcttatgctattggaaaaccaggagacttaaatcaaccatacgagattatcaacagttctaatggtaaccatatattttggcccatgggccattctggaatgtatgtatttcgtgtgaagatcctggatccaaactatagtttctgtaacctaacagctatgtttgcaatagagacatttggactgattcccagtccaagtgtctacctggtagcttctttcctcttcgtcctgatgctgctcttcttcactattcttgttttgagctactttcggtacatgaggatttatagacgatatatttatgaaccacttcacaaacctcaaagaaaacgtaagaagaattaggaaaactgaaagtttgtttattacagatatatgcatatagagaaacagtgtattacatagtgatattgagagtgtgtgtttgaccaagaaatactaaatataagctcgtagtagtaggcatcaccaaattcaagatctgaaaaatattcttgaactatctccaaaatagaaatgttttcatatatattgttattaaattaatcctttgtttgccttcattttaaagatactctatgtactctcacatggcatgaaaaaataaactaaatttgactattaca

SEQ ID NO: 302289 - DNA, 554 bp, Homo sapiens
aataacaatcaagaaatatcgataaaaaaactccagcgacccggccataaattaacccttcgatttttctgtaacctaacagctatgtttgcaatagagacatttggactgattcccagtccaagtgtctacctggtagcttctttcctcttcgtcctgatgctgctcttcttcactattcttgttttgagctactttcggtacatgaggatttatagacgatatatttatgaaccacttcacaaacctcaaagaaaacgtaagaagaattaggaaaactgaaagtttgtttattacagatatatgcatatagagaaacagtgtattacatagtgatattgagagtgtgtgtttgaccaagaaatactaaatataagctcgtagtagtaggcatcaccaaattcaagatctgaaaaatattcttgaactatctccaaaatagaaatgttttcatatatattgttattaaattaatcctttgtttgccttcattttaaagatactctatgtactctcacatggcatgaaaaaataaactaaatttgactattaca

SEQ ID NO: 302290 - DNA, 494 bp, Homo sapiens
gaaggtgactgatgtgatcctacagctgctgtagatagtacatttggactgattcccagtccaagtgtctacctggtagcttctttcctcttcgtcctgatgctgctcttcttcactattcttgttttgagctactttcggtacatgaggatttatagacgatatatttatgaaccacttcacaaacctcaaagaaaacgtaagaagaattaggaaaactgaaagtttgtttattacagatatatgcatatagagaaacagtgtattacatagtgatattgagagtgtgtgtttgaccaagaaatactaaatataagctcgtagtagtaggcatcaccaaattcaagatctgaaaaatattcttgaactatctccaaaatagaaatgttttcatatatattgttattaaattaatcctttgtttgccttcattttaaagatactctatgtactctcacatggcatgaaaaaataaactaaatttgactattaca

SEQ ID NO: 302291 - DNA, 752 bp, Homo sapiens
  misc_feature (35)..(37): n is a, c, g, or t
  misc_feature (39)..(39): n is a, c, g, or t
  misc_feature (41)..(41): n is a, c, g, or t
aacgccaccgcccccgccacgcagatggggaaaannnanancctgagatggactgttacatgagtcagacatggaagtcaatgattgaacttaacaagcacctcccactagaagaagtctggggacctgagtttctgtaacctaacagctatgtttgcaatagagacatttggactgattcccagtccaagtgtctacctggtagcttctttcctcttcgtcctgatgctgctcttcttcactattcttgttttgagctactttcggtacatgaggatttatagacgatatatttatgaaccacttcacaaacctcaaagaaaacgtaagaagaattaggaaaactgaaagtttgtttattacagatatatgcatatagagaaacagtgtattacatagtgatattgagagtgtgtgtttgaccaagaaatactaaatataagctcgtagtagtaggcatcaccaaattcaagatctgaaaaatattcttgaactatctccaaaatagaaatgttttcatatatattgttattaaattaatcctttgtttgccttcattttaaagatactctatgtactctcacatggcatgaaaaaataaactaaatttgactattacaatcctttgtaagaatgaaagtgaatttttgaaaatatatctatgtgtcaagtatcattttgcatgaaacttttcacatgaaaccttatatgactgtagttaatttatatataaaggatttaataaaggtgtg

SEQ ID NO: 302292 - DNA, 700 bp, Homo sapiens
  misc_feature (35)..(37): n is a, c, g, or t
  misc_feature (39)..(39): n is a, c, g, or t
  misc_feature (41)..(41): n is a, c, g, or t
aacgccaccgcccccgccacgcagatggggaaaannnanancctgagatggactgttacatgagtcagacatggaagtcaatgattgaacttaacaagcacctcccactagaagaagtctggggacctgagagtccaagtgtctacctggtagcttctttcctcttcgtcctgatgctgctcttcttcactattcttgttttgagctactttcggtacatgaggatttatagacgatatatttatgaaccacttcacaaacctcaaagaaaacgtaagaagaattaggaaaactgaaagtttgtttattacagatatatgcatatagagaaacagtgtattacatagtgatattgagagtgtgtgtttgaccaagaaatactaaatataagctcgtagtagtaggcatcaccaaattcaagatctgaaaaatattcttgaactatctccaaaatagaaatgttttcatatatattgttattaaattaatcctttgtttgccttcattttaaagatactctatgtactctcacatggcatgaaaaaataaactaaatttgactattacaatcctttgtaagaatgaaagtgaatttttgaaaatatatctatgtgtcaagtatcattttgcatgaaacttttcacatgaaaccttatatgactgtagttaatttatatataaaggatttaataaaggtgtg

SEQ ID NO: 302293 - DNA, 437 bp, Homo sapiens
aataacaatcaagaaatatcgataaaaaaactccagcgacccggccataaattaacccttcgatttttctgtaacctaacagctatgtttgcaatagagacatttggactgattcccagtccaagtgtctacctggtagcttctttcctcttcgtcctgatgctgctcttcttcactattcttgttttgagctactttcggtacatgaggatttatagacgatatatttatgaaccacttcacaaacctcaaagaaaactgcaggcaatcaagaatggaagatcacaagcaagatgaaattccacgggcactgatcaaagctgctgtccacaaagaattgctcatgtcaccaaaatcaagaataggacagagatacctgctggtcatcgctgttttgaaagttctgacgtcacaggagaaaaataaaataaacagta

SEQ ID NO: 302294 - DNA, 473 bp, Homo sapiens
  misc_feature (35)..(37): n is a, c, g, or t
  misc_feature (39)..(39): n is a, c, g, or t
  misc_feature (41)..(41): n is a, c, g, or t
aacgccaccgcccccgccacgcagatggggaaaannnanancctgagatggactgttacatgagtcagacatggaagtcaatgattgaacttaacaagcacctcccactagaagaagtctggggacctgagtttctgtaacctaacagctatgtttgcaatagagacatttggactgattcccagtccaagtgtctacctggtagcttctttcctcttcgtcctgatgctgctcttcttcactattcttgttttgagctactttcggtacatgaggatttatagacgattaaacaagtctgaaatccacagtgcaggcaatcaagaatggaagatcacaagcaagatgaaattccacgggcactgatcaaaaattgctcatgtcaccaaaatcaagaataggacagagatacctgctggtcatcgctgttttgaaagttctgacgtcacaggagaaaaataaaataaacagta

SEQ ID NO: 302295 - DNA, 2830 bp, Homo sapiens
  misc_feature (28)..(29): n is a, c, g, or t
acattgggctcctcctcctcgggcccanntccgagctgtagggaaacgcaggggcggcttctaggtgctgccgccgccaccgccaccaccacctccaccgccgcctcggaacccaggcctggggggcggtggggccgcgtatggagcccccgccccccggagctgccaacattgccaacgccaccgccacgctacacacaggtacccctgggatggcgtgagcactcccccagcgatggacccatctgtgacgctgtggcagtttctgctgcagctgctgagagagcaaggcaatggccacatcatctcctggacttcacgggatggtggtgaattcaagctggtggatgcagaggaggtggcccggctgtgggggctacgcaagaacaagaccaacatgaattacgacaagctcagccgggccttgcggtactactatgacaagaacatcatccgcaaggtgagcggccagaagttcgtctacaagtttgtgtcctaccctgaggtcgcagggtgctccactgaggactgcccgccccagccagaggtgtctgttacctccaccatgccaaatgtggcccctgctgctatacatgccgccccaggggacactgtctctggaaagccaggcacacccaagggtgcaggaatggcaggcccaggcggtttggcacgcagcagccggaacgagtacatgcgctcgggcctctattccaccttcaccatccagtctctgcagccgcagccaccccctcatcctcggcctgctgtggtgctccccagtgcagctcctgcaggggcagcagcgcccccctcggggagcaggagcaccagtccaagccccttggaggcctgtctggaggctgaagaggccggcttgcctctgcaggtcatcctgaccccgcccgaggccccaaacctgaaatcggaagagcttaatgtggagccgggtttgggccgggctttgcccccagaagtgaaagtagaagggcccaaggaagagttggaagttgcgggggagagagggtttgtgccagaaaccaccaaggccgagccagaagtccctccacaggagggcgtgccagcccggctgcccgcggttgttatggacaccgcagggcaggcgggcggccatgcggcttccagccctgagatctcccagccgcagaagggccggaagccccgggacctagagcttccactcagcccgagcctgctaggtgggccgggacccgaacggaccccaggatcgggaagtggctccggcctccaggctccggggccggcgctgaccccatccctgcttcctacgcatacattgaccccggtgctgctgacacccagctcgctgcctcctagcattcacttctggagcaccctgagtcccattgcgccccgtagcccggccaagctctccttccagtttccatccagtggcagcgcccaggtgcacatcccttctatcagcgtggatggcctctcgacccccgtggtgctctccccagggccccagaagccatgactactaccaccaccaccaccaccccttctggggtcactccatccatgctctctccagccagccatctcaaggagaaacatagttcaactgaaagactcatgctctgattgtggtggggtggggatccttgggaagaattactcccaagagtaactctcattatctcctccacagaaaacacacagcttccacaacttctctgttttctgtcagtcccccagtggccgcccttacacgtctcctacttcaatggtaggggcggtttatttatttattttttgaaggccactgggaggagcctgacctaaccttttagggtggttaggacatctcccccacctccccacttttttccccaagacaagacaatcgaggtctggcttgagaacgacctttctttctttatttctcagcctgcccttggggagatgagggagccctgtctgcgtttttggatgtgagtagaagagttagtttgttttgttttattattcctggccatactcaggggtccaggaagaatttgtaccatttaatgggttgggagtcttggccaaggaagaatcacacccttggaatagaaatttccacctccccaacctttctctcagacagcttatccttttcaaccaactttttggccagggaggaatgtcccttttgttcttccccctgagaagccattcctttgtctgccaacctccctggggtcctgcctgtttcctcccaatggagggtttttttggggggtggtccccgtctggggggcccctccagccagtactccaggtctccctgtctctcccccgctgccattttgatagtataatctatttttaaatggggcttttcaataggggagagggagtcatctcttcctatatttggtggggtgggtgggaaggaagggatttgggggggaatcttcctgccgcctcccccactccaagtgtttatttttgataccaaacatgaattttcagttccctccctcccagccccccaatttcctgcgggcgggtacaaaggaccctttcaatgtccctggagttgggagggaggaatgggggacataaagcctgtcctgtctctattctaggcaagagagagtgggttcaaaagactcctgggctcacctgttagcgctggcccagcccaggccttgggacctgggggttggtgatttgggggacagtgctacactcgtctccactgtttgttttacttccccaaaatggaccttttttttttctaaagagtcccagagaatggggaattgttcctgtaaatatatatttttcaaagtga

SEQ ID NO: 302296 - DNA, 2936 bp, Homo sapiens
  misc_feature (28)..(29): n is a, c, g, or t
acattgggctcctcctcctcgggcccanntccgagctgtagggaaacgcaggggcggcttctaggtgctgccgccgccaccgccaccaccacctccaccgccgcctcggaacccaggcctggggggcggtggggccgcgtatggagcccccgccccccggagctgccaacattgccaacgccaccgccacgctacacacagcctcaactttcaggagacccgtccgtggccttatttattccacccttcctgtacatcgtagcgaatcaatccgtggcgccgcactcctccgcatccctctttaacagtacccctgggatggcgtgagcactcccccagcgatggacccatctgtgacgctgtggcagtttctgctgcagctgctgagagagcaaggcaatggccacatcatctcctggacttcacgggatggtggtgaattcaagctggtggatgcagaggaggtggcccggctgtgggggctacgcaagaacaagaccaacatgaattacgacaagctcagccgggccttgcggtactactatgacaagaacatcatccgcaaggtgagcggccagaagttcgtctacaagtttgtgtcctaccctgaggtcgcagggtgctccactgaggactgcccgccccagccagaggtgtctgttacctccaccatgccaaatgtggcccctgctgctatacatgccgccccaggggacactgtctctggaaagccaggcacacccaagggtgcaggaatggcaggcccaggcggtttggcacgcagcagccggaacgagtacatgcgctcgggcctctattccaccttcaccatccagtctctgcagccgcagccaccccctcatcctcggcctgctgtggtgctccccagtgcagctcctgcaggggcagcagcgcccccctcggggagcaggagcaccagtccaagccccttggaggcctgtctggaggctgaagaggccggcttgcctctgcaggtcatcctgaccccgcccgaggccccaaacctgaaatcggaagagcttaatgtggagccgggtttgggccgggctttgcccccagaagtgaaagtagaagggcccaaggaagagttggaagttgcgggggagagagggtttgtgccagaaaccaccaaggccgagccagaagtccctccacaggagggcgtgccagcccggctgcccgcggttgttatggacaccgcagggcaggcgggcggccatgcggcttccagccctgagatctcccagccgcagaagggccggaagccccgggacctagagcttccactcagcccgagcctgctaggtgggccgggacccgaacggaccccaggatcgggaagtggctccggcctccaggctccggggccggcgctgaccccatccctgcttcctacgcatacattgaccccggtgctgctgacacccagctcgctgcctcctagcattcacttctggagcaccctgagtcccattgcgccccgtagcccggccaagctctccttccagtttccatccagtggcagcgcccaggtgcacatcccttctatcagcgtggatggcctctcgacccccgtggtgctctccccagggccccagaagccatgactactaccaccaccaccaccaccccttctggggtcactccatccatgctctctccagccagccatctcaaggagaaacatagttcaactgaaagactcatgctctgattgtggtggggtggggatccttgggaagaattactcccaagagtaactctcattatctcctccacagaaaacacacagcttccacaacttctctgttttctgtcagtcccccagtggccgcccttacacgtctcctacttcaatggtaggggcggtttatttatttattttttgaaggccactgggaggagcctgacctaaccttttagggtggttaggacatctcccccacctccccacttttttccccaagacaagacaatcgaggtctggcttgagaacgacctttctttctttatttctcagcctgcccttggggagatgagggagccctgtctgcgtttttggatgtgagtagaagagttagtttgttttgttttattattcctggccatactcaggggtccaggaagaatttgtaccatttaatgggttgggagtcttggccaaggaagaatcacacccttggaatagaaatttccacctccccaacctttctctcagacagcttatccttttcaaccaactttttggccagggaggaatgtcccttttgttcttccccctgagaagccattcctttgtctgccaacctccctggggtcctgcctgtttcctcccaatggagggtttttttggggggtggtccccgtctggggggcccctccagccagtactccaggtctccctgtctctcccccgctgccattttgatagtataatctatttttaaatggggcttttcaataggggagagggagtcatctcttcctatatttggtggggtgggtgggaaggaagggatttgggggggaatcttcctgccgcctcccccactccaagtgtttatttttgataccaaacatgaattttcagttccctccctcccagccccccaatttcctgcgggcgggtacaaaggaccctttcaatgtccctggagttgggagggaggaatgggggacataaagcctgtcctgtctctattctaggcaagagagagtgggttcaaaagactcctgggctcacctgttagcgctggcccagcccaggccttgggacctgggggttggtgatttgggggacagtgctacactcgtctccactgtttgttttacttccccaaaatggaccttttttttttctaaagagtcccagagaatggggaattgttcctgtaaatatatatttttcaaagtga

SEQ ID NO: 302297 - DNA, 2791 bp, Homo sapiens
  misc_feature (1)..(1): n is a, c, g, or t
ngtctagaggttcccctcaggggcgagctgccaacgccaccgccagctacacacagcctcaactttcaggagacccgtccgtggccttatttattccacccttcctgtacatcgtagcgaatcaatccgtggcgccgcactcctccgcatccctctttaacagtacccctgggatggcgtgagcactcccccagcgatggacccatctgtgacgctgtggcagtttctgctgcagctgctgagagagcaaggcaatggccacatcatctcctggacttcacgggatggtggtgaattcaagctggtggatgcagaggaggtggcccggctgtgggggctacgcaagaacaagaccaacatgaattacgacaagctcagccgggccttgcggtactactatgacaagaacatcatccgcaaggtgagcggccagaagttcgtctacaagtttgtgtcctaccctgaggtcgcagggtgctccactgaggactgcccgccccagccagaggtgtctgttacctccaccatgccaaatgtggcccctgctgctatacatgccgccccaggggacactgtctctggaaagccaggcacacccaagggtgcaggaatggcaggcccaggcggtttggcacgcagcagccggaacgagtacatgcgctcgggcctctattccaccttcaccatccagtctctgcagccgcagccaccccctcatcctcggcctgctgtggtgctccccagtgcagctcctgcaggggcagcagcgcccccctcggggagcaggagcaccagtccaagccccttggaggcctgtctggaggctgaagaggccggcttgcctctgcaggtcatcctgaccccgcccgaggccccaaacctgaaatcggaagagcttaatgtggagccgggtttgggccgggctttgcccccagaagtgaaagtagaagggcccaaggaagagttggaagttgcgggggagagagggtttgtgccagaaaccaccaaggccgagccagaagtccctccacaggagggcgtgccagcccggctgcccgcggttgttatggacaccgcagggcaggcgggcggccatgcggcttccagccctgagatctcccagccgcagaagggccggaagccccgggacctagagcttccactcagcccgagcctgctaggtgggccgggacccgaacggaccccaggatcgggaagtggctccggcctccaggctccggggccggcgctgaccccatccctgcttcctacgcatacattgaccccggtgctgctgacacccagctcgctgcctcctagcattcacttctggagcaccctgagtcccattgcgccccgtagcccggccaagctctccttccagtttccatccagtggcagcgcccaggtgcacatcccttctatcagcgtggatggcctctcgacccccgtggtgctctccccagggccccagaagccatgactactaccaccaccaccaccaccccttctggggtcactccatccatgctctctccagccagccatctcaaggagaaacatagttcaactgaaagactcatgctctgattgtggtggggtggggatccttgggaagaattactcccaagagtaactctcattatctcctccacagaaaacacacagcttccacaacttctctgttttctgtcagtcccccagtggccgcccttacacgtctcctacttcaatggtaggggcggtttatttatttattttttgaaggccactgggaggagcctgacctaaccttttagggtggttaggacatctcccccacctccccacttttttccccaagacaagacaatcgaggtctggcttgagaacgacctttctttctttatttctcagcctgcccttggggagatgagggagccctgtctgcgtttttggatgtgagtagaagagttagtttgttttgttttattattcctggccatactcaggggtccaggaagaatttgtaccatttaatgggttgggagtcttggccaaggaagaatcacacccttggaatagaaatttccacctccccaacctttctctcagacagcttatccttttcaaccaactttttggccagggaggaatgtcccttttgttcttccccctgagaagccattcctttgtctgccaacctccctggggtcctgcctgtttcctcccaatggagggtttttttggggggtggtccccgtctggggggcccctccagccagtactccaggtctccctgtctctcccccgctgccattttgatagtataatctatttttaaatggggcttttcaataggggagagggagtcatctcttcctatatttggtggggtgggtgggaaggaagggatttgggggggaatcttcctgccgcctcccccactccaagtgtttatttttgataccaaacatgaattttcagttccctccctcccagccccccaatttcctgcgggcgggtacaaaggaccctttcaatgtccctggagttgggagggaggaatgggggacataaagcctgtcctgtctctattctaggcaagagagagtgggttcaaaagactcctgggctcacctgttagcgctggcccagcccaggccttgggacctgggggttggtgatttgggggacagtgctacactcgtctccactgtttgttttacttccccaaaatggaccttttttttttctaaagagtcccagagaatggggaattgttcctgtaaatatatatttttcaaagtga

SEQ ID NO: 302298 - DNA, 3519 bp, Homo sapiens
  misc_feature (28)..(29): n is a, c, g, or t
acattgggctcctcctcctcgggcccanntccgagctgtagggaaacgcaggggcggcttctaggtgctgccgccgccaccgccaccaccacctccaccgccgcctcggaacccaggcctggggggcggtggggccgcgtatggagcccccgccccccggagctgccaacattgccaacgccaccgccacgctacacacagcctcaactttcaggagacccgtccgtggccttatttattccacccttcctgtacatcgtagcgaatcaatccgtggcgccgcactcctccgcatccctctttaacagtacccctgggatggcgtgagcactcccccagcgatggacccatctgtgacgctgtggcagtttctgctgcagctgctgagagagcaaggcaatggccacatcatctcctggacttcacgggatggtggtgaattcaagctggtggatgcagaggaggtggcccggctgtgggggctacgcaagaacaagaccaacatgaattacgacaagctcagccgggccttgcggtactactatgacaagaacatcatccgcaaggtgagcggccagaagttcgtctacaagtttgtgtcctaccctgaggtcgcagggtgctccactgaggactgcccgccccagccagaggtgtctgttacctccaccatgccaaatgtggcccctgctgctatacatgccgccccaggggacactgtctctggaaagccaggcacacccaagggtgcaggaatggcaggcccaggcggtttggcacgcagcagccggaacgagtacatgcgctcgggcctctattccaccttcaccatccagtctctgcagccgcagccaccccctcatcctcggcctgctgtggtgctccccagtgcagctcctgcaggggcagcagcgcccccctcggggagcaggagcaccagtccaagccccttggaggcctgtctggaggctgaagaggccggcttgcctctgcaggtcatcctgaccccgcccgaggccccaaacctgaaatcggaagagcttaatgtggagccgggtttgggccgggctttgcccccagaagtgaaagtagaagggcccaaggaagagttggaagttgcgggggagagagggtttgtgccagaaaccaccaaggccgagccagaagtccctccacaggagggcgtgccagcccggctgcccgcggttgttatggacaccgcagggcaggcgggcggccatgcggcttccagccctgagatctcccagccgcagaagggccggaagccccgggacctagagcttccactcagcccgagcctgctaggtgggccgggacccgaacggaccccaggatcgggaagtggctccggcctccaggctccggggccggcgctgaccccatccctgcttcctacgcatacattgaccccggtgctgctgacacccagctcgctgcctcctagcattcacttctggagcaccctgagtcccattgcgccccgtagcccggccaagctctccttccagtttccatccagtggcagcgcccaggtgcacatcccttctatcagcgtggatggcctctcgacccccgtggtgctctccccagggccccagaagccatgactactaccaccaccaccaccaccccttctggggtcactccatccatgctctctccagccagccatctcaaggagaaacatagttcaactgaaagactcatgctctgattgtggtggggtggggatccttgggaagaattactcccaagagtaactctcattatctcctccacagaaaacacacagcttccacaacttctctgttttctgtcagtcccccagtggccgcccttacacgtctcctacttcaatggtaggggcggtttatttatttattttttgaaggccactgggaggagcctgacctaaccttttagggtggttaggacatctcccccacctccccacttttttccccaagacaagacaatcgaggtctggcttgagaacgacctttctttctttatttctcagcctgcccttggggagatgagggagccctgtctgcgtttttggatgtgagtagaagagttagtttgttttgttttattattcctggccatactcaggggtccaggaagaatttgtaccatttaatgggttgggagtcttggccaaggaagaatcacacccttggaatagaaatttccacctccccaacctttctctcagacagcttatccttttcaaccaactttttggccagggaggaatgtcccttttgttcttccccctgagaagccattcctttgtctgccaacctccctggggtcctgcctgtttcctcccaatggagggtttttttggggggtggtccccgtctggggggcccctccagccagtactccaggtctccctgtctctcccccgctgccattttgatagtataatctatttttaaatggggcttttcaataggggagagggagtcatctcttcctatatttggtggggtgggtgggaaggaagggatttgggggggaatcttcctgccgcctcccccactccaagtgtttatttttgataccaaacatgaattttcagttccctccctcccagccccccaatttcctgcgggcgggtacaaaggaccctttcaatgtccctggagttgggagggaggaatgggggacataaagcctgtcctgtctctattctaggcaagagagagtgggttcaaaagactcctgggctcacctgttagcgctggcccagcccaggccttgggacctgggggttggtgatttgggggacagtgctacactcgtctccactgtttgttttacttccccaaaatggaccttttttttttctaaagagtcccagagaatggggaattgttcctgtaaatatatatttttcaaagtgatcaaaagctgaacaaaacaaaaaaaacaaacaaaaaagaaaacaaaaaacaaaagaggtgcggcgcgcgccacgcccagagaagggtatctccccctacggagtgtgtgcgcccacaaagtgtataaagcgggcggttaccccccagcgagctcttcggttggccgcccaagagtgggtgcccccctatatatgaggagagcggcagggataattatataataagcgcgctatagaggcggtcagtgaggcagccgagtcgatttatatatcaacaaagcggtttgcttcgtagtagagtgtgtgaggagaaaaacctgtgtcgtcaaaccgcgaggttggcgaagaacacctccgtgtggtgtgaaacacgaagtgatcacccctctatgatcgcctctgcccggtgaggtaggggtgatgcggccaacccatatacgtgtgggggccacaaaaaaacttctatccgcctcccgaggacggaagaagattatttatacaagaagacgcgcgtacttaaaggaggggattaaagaattgtcttatacaagaaatcttgtaacgaagggtggtggttaatcata

SEQ ID NO: 302299 - DNA, 2058 bp, Homo sapiens
  misc_feature (28)..(29): n is a, c, g, or t
acattgggctcctcctcctcgggcccanntccgagctgtagggaaacgcaggggcggcttctaggtgctgccgccgccaccgccaccaccacctccaccgccgcctcggaacccaggcctggggggcggtggggccgcgtatggagcccccgccccccggagctgccaacattgccaacgccaccgccacgctacacacagcctcaactttcaggagacccgtccgtggccttatttattccacccttcctgtacatcgtagcgaatcaatccgtggcgccgcactcctccgcatccctctttaacagtacccctgggatggcgtgagcactcccccagcgatggacccatctgtgacgctgtggcagtttctgctgcagctgctgagagagcaaggcaatggccacatcatctcctggacttcacgggatggtggtgaattcaagctggtggatgcagaggaggtggcccggctgtgggggctacgcaagaacaagaccaacatgaattacgacaagctcagccgggccttgcggtactactatgacaagaacatcatccgcaaggtgagcggccagaagttcgtctacaagtttgtgtcctaccctgagtcccattgcgccccgtagcccggccaagctctccttccagtttccatccagtggcagcgcccaggtgcacatcccttctatcagcgtggatggcctctcgacccccgtggtgctctccccagggccccagaagccatgactactaccaccaccaccaccaccccttctggggtcactccatccatgctctctccagccagccatctcaaggagaaacatagttcaactgaaagactcatgctctgattgtggtggggtggggatccttgggaagaattactcccaagagtaactctcattatctcctccacagaaaacacacagcttccacaacttctctgttttctgtcagtcccccagtggccgcccttacacgtctcctacttcaatggtaggggcggtttatttatttattttttgaaggccactgggaggagcctgacctaaccttttagggtggttaggacatctcccccacctccccacttttttccccaagacaagacaatcgaggtctggcttgagaacgacctttctttctttatttctcagcctgcccttggggagatgagggagccctgtctgcgtttttggatgtgagtagaagagttagtttgttttgttttattattcctggccatactcaggggtccaggaagaatttgtaccatttaatgggttgggagtcttggccaaggaagaatcacacccttggaatagaaatttccacctccccaacctttctctcagacagcttatccttttcaaccaactttttggccagggaggaatgtcccttttgttcttccccctgagaagccattcctttgtctgccaacctccctggggtcctgcctgtttcctcccaatggagggtttttttggggggtggtccccgtctggggggcccctccagccagtactccaggtctccctgtctctcccccgctgccattttgatagtataatctatttttaaatggggcttttcaataggggagagggagtcatctcttcctatatttggtggggtgggtgggaaggaagggatttgggggggaatcttcctgccgcctcccccactccaagtgtttatttttgataccaaacatgaattttcagttccctccctcccagccccccaatttcctgcgggcgggtacaaaggaccctttcaatgtccctggagttgggagggaggaatgggggacataaagcctgtcctgtctctattctaggcaagagagagtgggttcaaaagactcctgggctcacctgttagcgctggcccagcccaggccttgggacctgggggttggtgatttgggggacagtgctacactcgtctccactgtttgttttacttccccaaaatggaccttttttttttctaaagagtcccagagaatggggaattgttcctgtaaatatatatttttcaaagtga

SEQ ID NO: 302300 - DNA, 2857 bp, Homo sapiens
  misc_feature (28)..(29): n is a, c, g, or t
acattgggctcctcctcctcgggcccanntccgagctgtagggaaacgcaggggcggcttctaggtgctgccgccgccaccgccaccaccacctccaccgccgcctcggaacccaggcctggggggcggtggggccgcgtatggagcccccgccccccggagctgccaacattgccaacgccaccgccacgctacacacagcctcaactttcaggagacccgtccgtggccttatttattccacccttcctgtacatcgtagcgaatcaatccgtggcgccgcactcctccgcatccctctttaacagtacccctgggatggcgtgagcactcccccagcgatggacccatctgtgacgctgtggcagtttctgctgcagctgctgagagagcaaggcaatggccacatcatctcctggacttcacgggatggtggtgaattcaagctggtggatgcagaggaggtggcccggctgtgggggctacgcaagaacaagaccaacatgaattacgacaagctcagccgggccttgcggtactactatgacaagaacatcatccgcaaggtgagcggccagaagttcgtctacaagtttgtgtcctaccctgaggtcgcagggtgctccactgaggactgcccgccccagccagaggtgtctgttacctccaccatgccaaatgtggcccctgctgctatacatgccgccccaggggacactgtctctggaaagccaggcacacccaagggtgcaggaatggcaggcccaggcggtttggcacgcagcagccggaacgagtacatgcgctcgggcctctattccaccttcaccatccagtctctgcagccgcagccaccccctcatcctcggcctgctgtggtgctccccagtgcagctcctgcaggggcagcagcgcccccctcggggagcaggagcaccagtccaagccccttggaggcctgtctggaggctgaagaggccggcttgcctctgcaggtcatcctgaccccgcccgaggccccaaacctgaaatcggaagagcttaatgtggagccgggtttgggccgggctttgcccccagaagtgaaagtagaagggcccaaggaagagttggaagttgcgggggagagagggtttgtgccagaaaccaccaaggccgagccagaagtccctccacaggagggcgtgccagcccggctgcccgcggttgttatggacaccgcagggcaggcgggcggccatgcggcttccagccctgagatctcccagccgcagaagggccggaagccccgggacctagagcttccactcagcccgagcctgctaggtgggccgggacccgaacggaccccaggatcgggaagtggctccggcctccaggctccggggccggcgctgaccccatccctgcttcctacgcatacattgaccccggtgctgctgacacccagctcgctgcctcctagcattcacttctggagcaccctgagtcccattgcgccccgtagcccggccaagctctccttccagtttccatccagtggcagcgcccaggtgcacatcccttctatcagcgtggatggcctctcgacccccgtggtgctctccccagggccccagaagccatgactactaccaccaccaccaccaccccttctggggtcactccatccatgctctctccagccagccatctcaaggagaaacatagttcaactgaaagactcatgctctgattgtggtggggtggggatccttgggaagaattactcccaagagtaactctcattatctcctccacagaaaacacacagcttccacaacttctctgttttctgtcagtcccccagtggccgcccttacacgtctcctacttcaatggtaggggcggtttatttatttattttttgaaggccactgggaggagcctgacctaaccttttagggtggttaggacatctcccccacctccccacttttttccccaagacaagacaatcgaggtctggcttgagaacgacctttctttctttatttctcagcctgcccttggggagatgagggagccctgtctgcgtttttggatgtgagtagaagagttagtttgttttgttttattattcctggccatactcaggggtccaggaagaatttgtaccatttaatgggttgggagtcttggccaaggaagaatcacacccttggaatagaaatttccacctccccaacctttctctcagacagcttatccttttcaaccaactttttggccagggaggaatgtcccttttgttcttccccctgagaagccattcctttgtctgccaacctccctggggtcctgcctgtttcctcccaatggagggtttttttggggggtggtccccgtctggggggcccctccagccagtactccaggtctccctgtctctcccccgctgccattttgatagtataatctatttttaaatggggcttttcaataggggagagggagtcatctcttcctatatttggtggggtgggtgggaaggaagggatttgggggggaatcttcctgccgcctcccccactccaagtgtttatttttgataccaaacatgaattttcagaatgggggacataaagcctgtcctgtctctattctaggcaagagagagtgggttcaaaagactcctgggctcacctgttagcgctggcccagcccaggccttgggacctgggggttggtgatttgggggacagtgctacactcgtctccactgtttgttttacttccccaaaatggaccttttttttttctaaagagtcccagagaatggggaattgttcctgtaaatatatatttttcaaagtga

SEQ ID NO: 302301 - DNA, 1529 bp, Homo sapiens
  misc_feature (28)..(29): n is a, c, g, or t
acattgggctcctcctcctcgggcccanntccgagctgtagggaaacgcaggggcggcttctaggtgctgccgccgccaccgccaccaccacctccaccgccgcctcggaacccaggcctggggggcggtggggccgcgtatggagcccccgccccccggagctgccaacattgccaacgccaccgccacgctacacacaggtacccctgggatggcgtgagcactcccccagcgatggacccatctgtgacgctgtggcagtttctgctgcagctgctgagagagcaaggcaatggccacatcatctcctggacttcacgggatggtggtgaattcaagctggtggatgcagaggaggtggcccggctgtgggggctacgcaagaacaagaccaacatgaattacgacaagctcagccgggccttgcggtactactatgacaagaacatcatccgcaaggtgagcggccagaagttcgtctacaagtttgtgtcctaccctgaggtcgcagggtgctccactgaggactgcccgccccagccagaggtgtctgttacctccaccatgccaaatgtggcccctgctgctatacatgccgccccaggggacactgtctctggaaagccaggcacacccaagggtgcaggaatggcaggcccaggcggtttggcacgcagcagccggaacgagtacatgcgctcgggcctctattccaccttcaccatccagtctctgcagccgcagccaccccctcatcctcggcctgctgtggtgctccccagtgcagctcctgcaggggcagcagcgcccccctcggggagcaggagcaccagtccaagccccttggaggcctgtctggaggctgaagaggccggcttgcctctgcaggtcatcctgaccccgcccgaggccccaaacctgaaatcggaagagcttaatgtggagccgggtttgggccgggctttgcccccagaagtgaaagtagaagggcccaaggaagagttggaagttgcgggggagagagggtttgtgccagaaaccaccaaggccgagccagaagtccctccacaggagggcgtgccagcccggctgcccgcggttgttatggacaccgcagggcaggcgggcggccatgcggcttccagccctgagatctcccagccgcagaagggccggaagccccgggacctagagcttccactcagcccgagcctgctagacaagacaatcgaggtctggcttgagaacgacctttctttctttatttctcagcctgcccttggggagatgagggagccctgtctgcgtttttggatgttccctccctcccagccccccaatttcctaaagagtcccagagaatggggaattgttcctgtaaatatatatttttcaaagtgaaaaaaaaaaaagaaaaacctgccataatgaagagcagaccaatattccagaaaactgtcactttaacagagaagaccaaattctagtttcacatgaactgttaatattaaagctaattttaattaaa

SEQ ID NO: 302302 - DNA, 4101 bp, Homo sapiens
ttccgggccccagagcgcttataatggagccgctgtcagcagaaccttctgccgccgccgccgccgccgccgtccctcctcttttttttcccggcagatctttgttgtgtgggagggcagcagggatggacttgagcttgcggatcccctgctagagcagccgcgctcggagaaggcgccgcagccgcgaggaggagccgccgccgccgcgcccgaggccccgccgcccgcggcctctgtcggcccgcgccccgctcgccccgtcgcccctcgcctccccgcagagtcccctcgcggcagcagatgtgtgtggggtcagcccacggcggggactatggtgaaattcccggcgctcacgcactactggcccctgatccggttcttggtgcccctgggcatcaccaacatagccatcgacttcggggagcaggccttgaaccggggcattgctgctgtcaaggaggatgcagtcgagatgctggccagctacgggctggcgtactccctcatgaagttcttcacgggtcccatgagtgacttcaaaaatgtgggcctggtgtttgtgaacagcaagagagacaggaccaaagccgtcctgtgtatggtggtggcaggggccatcgctgccgtctttcacacactgatagcttatagtgatttaggatactacattatcaataaactgcaccatgtggacgagtcggtggggagcaagacgagaagggccttcctgtacctcgccgcctttcctttcatggacgcaatggcatggacccatgctggcattctcttaaaacacaaatacagtttcctggtgggatgtgcctcaatctcagatgtcatagctcaggttgtttttgtagccattttgcttcacagtcacctggaatgccgggagcccctgctcatcccgatcctctccttgtacatgggcgcacttgtgcgctgcaccaccctgtgcctgggctactacaagaacattcacgacatcatccctgacagaagtggcccggagctggggggagatgcaacaataagaaagatgctgagcttctggtggcctttggctctaattctggccacacagagaatcagtcggcctattgtcaacctctttgtttcccgggaccttggtggcagttctgcagccacagaggcagtggcgattttgacagccacataccctgtgggtcacatgccatacggctggttgacggaaatccgtgctgtgtatcctgctttcgacaagaataaccccagcaacaaactggtgagcacgagcaacacagtcacggcagcccacatcaagaagttcaccttcgtctgcatggctctgtcactcacgctctgtttcgtgatgttttggacacccaacgtgtctgagaaaatcttgatagacatcatcggagtggactttgcctttgcagaactctgtgttgttcctttgcggatcttctccttcttcccagttccagtcacagtgagggcgcatctcaccgggtggctgatgacactgaagaaaaccttcgtccttgcccccagctctgtgctgcggatcatcgtcctcatcgccagcctcgtggtcctaccctacctgggggtgcacggtgcgaccctgggcgtgggctccctcctggcgggctttgtgggagaatccaccatggtcgccatcgctgcgtgctatgtctaccggaagcagaaaaagaagatggagaatgagtcggccacggagggggaagactctgccatgacagacatgcctccgacagaggaggtgacagacatcgtggaaatgagagaggagaatgaataaggcacgggacgccatgggcactgcagggacagtcagtcaggatgacacttcggcatcatctcttccctctcccatcgtattttgttcccttttttttgttttgttttggtaatgaaagaggccttgatttaaaggtttcgtgtcaattctctagcatactgggtatgctcacactgacggggggacctagtgaatggtctttactgttgctatgtaaaaacaaacgaaacaactgacttcatacccctgcctcacgaaaacccaaaagacacagctgcctcacggttgacgttgtgtcctcctcccctggacaatctcctcttggaaccaaaggactgcagctgtgccatcgcgcctcggtcaccctgcacagcaggccacagactctcctgtcccccttcatcgctcttaagaatcaacaggttaaaactcggcttcctttgatttgcttcccagtcacatggccgtacaaagagatggagccccggtggcctcttaaatttcccttccgccacggagttcgaaaccatctactccacacatgcaggaggcgggtggcacgctgcagcccggagtccccgttcacactgaggaacggagacctgtgaccacagcaggctgacagatggacagaatctcccgtagaaaggtttggtttgaaatgccccgggggcagcaaactgacatggttgaatgatagcatttcactctgcgttctcctagatctgagcaagctgtcagttctcacccccaccgtgtatatacatgagctaacttttttaaattgtcacaaaagcgcatctccagattccagaccctgccgcatgacttttcctgaaggcttgcttttccctcgcctttcctgaaggtcgcattagagcgagtcacatggagcatcctaactttgcattttagtttttacagtgaactgaagctttaagtctcatccagcattctaatgccaggttgctgtagggtaacttttgaagtagatatattacctggttctgctatccttagtcataactctgcggtacaggtaattgagaatgtactacggtacttccctcccacaccatacgataaagcaagacattttataacgataccagagtcactatgtggtcctccctgaaataacgcattcgaaatccatgcagtgcagtatatttttctaagttttggaaagcaggttttttcctttaaaaaaattatagacacggttcactaaattgatttagtcagaattcctagactgaaagaacctaaacaaaaaaatattttaaagatataaatatatgctgtatatgttatgtaatttattttaggctataatacatttcctattttcgcattttcaataaaatgtctctaatacaatacggtgattgcttgtgtgctcaacatacctgcagttgaaacgtattgtatcaatgaacattgtaccttattggcagcagttttataaagtccgtcatttgcatttgaatgtaaggctcagtaaatgacagaactatttttcattatgggtaactggggaataaatgggtcactggagtaggaatagaagtgcaagctggaaaggcaaaaatgagaaagaaaaaggcaggccctttgtgtctaccgttttcagtgctgtgtgatcatattgttcctcacagcaaaaaagaatgcaagggcataatgttagctgtgaacatgccagggttgcattcacattcctgggtacccagtgctgatggggtgtgcccacgtggggacatgtccttggcgtgcttcctcagagtggcttttcctccattaatacatatatgagtactgaaaaattaagttgcatagctgctttgcagtggtttcagaggcagatctgagaagattaaaaaaaaatctcaaatgtatcagctttttttaaaggacattactagaaaattaaacagtattttttaacatgtgtgactttcatgcttctggggttggagcttaaagatccaaactgagaaagcaggccgggcatggtggctcatgcctgtaatcccaacactttgggaggccaaggagggtggatcacttaaggtcaggagtttgagaccagcctggccaacatggcgaaaccctgtctctactaaaaacataaaaattagctgggggtggtagcacatacctgtaatcccagctactcaggaggctgaggcaggagaatttgcttgatcctgggaggcagaggttgtagtgagccgagatcgcgccatcgcactccagcctgggtgacaagagcaaaactccatctc

SEQ ID NO: 302303 - DNA, 2635 bp, Homo sapiens
ttccgggccccagagcgcttataatggagccgctgtcagcagaaccttctgccgccgccgccgccgccgccgtccctcctcttttttttcccggcagatctttgttgtgtgggagggcagcagggatggacttgagcttgcggatcccctgctagagcagccgcgctcggagaaggcgccgcagccgcgaggaggagccgccgccgccgcgcccgaggccccgccgcccgcggcctctgtcggcccgcgccccgctcgccccgtcgcccctcgcctccccgcagagtcccctcgcggcagcagatgtgtgtggggtcagcccacggcggggactatggtgaaattcccggcgctcacgcactactggcccctgatccggttcttggtgcccctgggcatcaccaacatagccatcgacttcggggagcaggccttgaaccggggcattgctgctgtcaaggaggatgcagtcgagatgctggccagctacgggctggcgtactccctcatgaagttcttcacgggtcccatgagtgacttcaaaaatgtgggcctggtgtttgtgaacagcaagagagacaggaccaaagccgtcctgtgtatggtggtggcaggggccatcgctgccgtctttcacacactgatagcttatagtgatttaggatactacattatcaataaactgcaccatgtggacgagtcggtggggagcaagacgagaagggccttcctgtacctcgccgcctttcctttcatggacgcaatggcatggacccatgctggcattctcttaaaacacaaatacagtttcctggtgggatgtgcctcaatctcagatgtcatagctcaggttgtttttgtagccattttgcttcacagtcacctggaatgccgggagcccctgctcatcccgatcctctccttgtacatgggcgcacttgtgcgctgcaccaccctgtgcctgggctactacaagaacattcacgacatcatccctgacagaagtggcccggagctggggggagatgcaacaataagaaagatgctgagcttctggtggcctttggctctaattctggccacacagagaatcagtcggcctattgtcaacctctttgtttcccgggaccttggtggcagttctgcagccacagaggcagtggcgattttgacagccacataccctgtgggtcacatgccatacggctggttgacggaaatccgtgctgtgtatcctgctttcgacaagaataaccccagcaacaaactggtgagcacgagcaacacagtcacggcagcccacatcaagaagttcaccttcgtctgcatggctctgtcactcacgctctgtttcgtgatgttttggacacccaacgtgtctgagaaaatcttgatagacatcatcggagtggactttgcctttgcagaactctgtgttgttcctttgcggatcttctccttcttcccagttccagtcacagtgagggcgcatctcaccgggtggctgatgacactgaagaaaaccttcgtccttgcccccagctctgtgctgcggatcatcgtcctcatcgccagcctcgtggtcctaccctacctgggggtgcacggtgcgaccctgggcgtgggctccctcctggcgggctttgtgggagaatccaccatggtcgccatcgctgcgtgctatgtctaccggaagcagaaaaagaagatggagaatgagtcggccacggagggggaagactctgccatgacagacatgcctccgacagaggaggtgacagacatcgtggaaatgagagaggagaatgaataaggcacgggacgccatgggcactgcagggacagtcagtcaggatgacacttcggcatcatctcttccctctcccatcgtattttgttcccttttttttgttttgttttggtaatgaaagaggccttgatttaaaggtttcgtgtcaattctctagcatactgggtatgcccttcctgatctaacattctgtttatgatctaggatttagaacgtcgtatgagatcctacaatggaagaataaaatcacctcattcttcatttcagatctgaacattagcagtgatctagatttttttttttttaaacaaaattaagtgtgcttagagtcattcctctacatgggctgtggctgtcagcccataggtttgtcagtttcacatcaaaactgtgggtataaactgttgaaaccaatcacattaaaatatttagctgggcacagtggtgtgcatctgtagtcccagctacttgggaggctgaggcaggaggatcgcttaagcacaggagttggaatccagcctgagcaacagagcaaaaccccgtctctaaaatacaaataaaatatttgtgtagtttttgattaaaattgactacagcggtcagtataaaatacatgtcgcttttaaggaagtgctctttatgtatctaacagatggaagtttttgcattggtaagagcatttatatatgctttgtttcagggtttatggatttgtattcatatattgtcaaataggtttcatactctaattttactttaagtaaagcttaaacacttggcatacaactgagattgcttttagtttcttgatttttttttattcta

SEQ ID NO: 302304 - DNA, 681 bp, Homo sapiens
cacgcgtcggtgctcaatctcagatgtcatagctcaggttgtttttgtagccattttgcttcacagtcacctggaatgccgggagcccctgctcatcccgatcctctccttgtacatgggcgcacttgtgcgctgcaccaccctgtgcctgggctactacaagaacattcacgacatcatccctgacagaagtggcccggagctggggggagatgcaacaataagaaagatgctgagcttctggtggcctttggctctaattctggccacacagagaatcagtcggcctattgtcaacctctttgtttcccgggaccttggtggcagttctgcagccacagaggcagtggcgattttgacagccacataccctgtgggtcacatgccatacggctggttgacggaaatccgtgctgtgtatcctgctttcgacaagaataaccccagcaacaaactggtgagcacgagcaacacagtcacggcagcccacatcaagaagttcaccttcgtctgcatggctctgtcactcacggcattgagcccctgcgggatcccaggcccatctgtctgctgaggatacagctgtgagcaagcgtgtgtgacactgtgtcagcagcaaagcctgtctgtatttctatgcgcaaccttaaataaacaacacgcatccttcgttatgaagcc

SEQ ID NO: 302305 - DNA, 570 bp, Homo sapiens
aggacatggtccctgcgctcagggagctcccagcgtcctggggagggtgggaagggctgtgggatccatgtgctgtgggagggaggtggcccagccccgagttcctggttcccctcacacattaggttattagctgcggcccttacgaagccagcagatggagaacgccgctggtctcagccgtctcgaggctacacttactttcctgggttttggcatcgacggttgtgccttgacttggccttaacagacaaattgcctttgtgttctcatctgcagggtgcacggtgcgaccctgggcgtgggctccctcctggcgggctttgtgggagaatccaccatggtcgccatcgctgcgtgctatgtctaccggaagcaggtgagacagccgcgccgggagcctcctcccgggtgcatcctcctgggtgcaggagaacctgagcagccactgaccaggttggatggtggcgttcgtcagtgggggatccttggtgacactgcccagtctcgtggcttagggtggctggaagcctaatgggagtggggtaagaaaaaaggggaaaagctgaa

SEQ ID NO: 302306 - DNA, 318 bp, Homo sapiens
gacccatgaattaccgaatttcgagcctcggtaacccctgtatcccggggaccaagacgagaagggccttcctgtacctcgccgcctttcctttcatggacgcaatggtgagtagagaagatcgttggctttctttctttttctttaactggtggtaaaatatacataatataaaatctaccattttagctatttttgtgtgtacagcttaatggcaggaagtacattcacattattgtgtaaccaatcttcagaactcttcatcttgcaaaactgagattctatcctaattcaacagtaaccctcctcggccccctc

SEQ ID NO: 302307 - DNA, 4047 bp, Homo sapiens
ttccgggccccagagcgcttataatggagccgctgtcagcagaaccttctgccgccgccgccgccgccgccgtccctcctcttttttttcccggcagatctttgttgtgtgggagggcagcagggatggacttgagcttgcggatcccctgctagagcagccgcgctcggagaaggcgccgcagccgcgaggaggagccgccgccgccgcgcccgaggccccgccgcccgcggcctctgtcggcccgcgccccgctcgccccgtcgcccctcgcctccccgcagagtcccctcgcggcagcagatgtgtgtggggtcagcccacggcggggactatggtgaaattcccggcgctcacgcactactggcccctgatccggttcttggtgcccctgggcatcaccaacatagccatcgacttcggggagcaggccttgaaccggggcattgctgctgtcaaggaggatgcagtcgagatgctggccagctacgggctggcgtactccctcatgaagttcttcacgggtcccatgagtgacttcaaaaatgtgggcctggtgtttgtgaacagcaagagagacaggaccaaagccgtcctgtgtatggtggtggcaggggccatcgctgccgtctttcacacactgatagcttatagtgatttaggatactacattatcaataaactgcaccatgtggacgagtcggtggggagcaagacgagaagggccttcctgtacctcgccgcctttcctttcatggacgcaatggcatggacccatgctggcattctcttaaaacacaaatacagtttcctggtgggatgtgcctcaatctcagatgtcatagctcaggttgtttttgtagccattttgcttcacagtcacctggaatgccgggagcccctgctcatcccgatcctctccttgtacatgggcgcacttgtgcgctgcaccaccctgtgcctgggctactacaagaacattcacgacatcatccctgacagaagtggcccggagctggggggagatgcaacaataagaaagatgctgagcttctggtggcctttggctctaattctggccacacagagaatcagtcggcctattgtcaacctctttgtttcccgggaccttggtggcagttctgcagccacagaggcagtggcgattttgacagccacataccctgtgggtcacatgccatacggctggttgacggaaatccgtgctgtgtatcctgctttcgacaagaataaccccagcaacaaactggtgagcacgagcaacacagtcacggcagcccacatcaagaagttcaccttcgtctgcatggctctgtcactcacgctctgtttcgtgatgttttggacacccaacgtgtctgagaaaatcttgatagacatcatcggagtggactttgcctttgcagaactctgtgttgttcctttgcggatcttctccttcttcccagttccagtcacagtgagggcgcatctcaccgggtggctgatgacactgaagaaaaccttcgtccttgcccccagctctgtgctgcggatcatcgtcctcatcgccagcctcgtggtcctaccctacctgggggtgcacggtgcgaccctgggcgtgggctccctcctggcgggctttgtgggagaatccaccatggtcgccatcgctgcgtgctatgtctaccggaagcagaaaaagaagatggagaatgagtcggccacggagggggaagactctgccatgacagacatgcctccgacagaggaggtgacagacatcgtggaaatgagagaggagaatgaataaggcacgggacgccatgggcactgcagggacagtcagtcaggatgacacttcggcatcatctcttccctctcccatcgtattttgttcccttttttttgttttgttttggtaatgaaagaggccttgatttaaaggtttcgtgtcaattctctagcatactgggtatgctcacactgacggggggacctagtgaatggtctttactgttgctatgtaaaaacaaacgaaacaactgacttcatacccctgcctcacgaaaacccaaaagacacagctgcctcacggttgacgttgtgtcctcctcccctggacaatctcctcttggaaccaaaggactgcagctgtgccatcgcgcctcggtcaccctgcacagcaggccacagactctcctgtcccccttcatcgctcttaagaatcaacaggttaaaactcggcttcctttgatttgcttcccagtcacatggccgtacaaagagatggagccccggtggcctcttaaatttcccttccgccacggagttcgaaaccatctactccacacatgcaggaggcgggtggcacgctgcagcccggagtccccgttcacactgaggaacggagacctgtgaccacagcaggctgacagatggacagaatctcccgtagaaaggtttggtttgaaatgccccgggggcagcaaactgacatggttgaatgatagcatttcactctgcgttctcctagatctgagcaagctgtcagttctcacccccaccgtgtatatacatgagctaacttttttaaattgtcacaaaagcgcatctccagattccagaccctgccgcatgacttttcctgaaggcttgcttttccctcgcctttcctgaaggtcgcattagagcgagtcacatggagcatcctaactttgcattttagtttttacagtgaactgaagctttaagtctcatccagcattctaatgccaggttgctgtagggtaacttttgaagtagatatattacctggttctgctatccttagtcataactctgcggtacaggtaattgagaatgtactacggtacttccctcccacaccatacgataaagcaagacattttataacgataccagagtcactatgtggtcctccctgaaataacgcattcgaaatccatgcagtgcagtatatttttctaagttttggaaagcaggttttttcctttaaaaaaattatagacacggttcactaaattgatttagtcagaattcctagactgaaagaacctaaacaaaaaaatattttaaagatataaatatatgctgtatatgttatgtaatttattttaggctataatacatttcctattttcgcattttcaattgaaacgtattgtatcaatgaacattgtaccttattggcagcagttttataaagtccgtcatttgcatttgaatgtaaggctcagtaaatgacagaactatttttcattatgggtaactggggaataaatgggtcactggagtaggaatagaagtgcaagctggaaaggcaaaaatgagaaagaaaaaggcaggccctttgtgtctaccgttttcagtgctgtgtgatcatattgttcctcacagcaaaaaagaatgcaagggcataatgttagctgtgaacatgccagggttgcattcacattcctgggtacccagtgctgatggggtgtgcccacgtggggacatgtccttggcgtgcttcctcagagtggcttttcctccattaatacatatatgagtactgaaaaattaagttgcatagctgctttgcagtggtttcagaggcagatctgagaagattaaaaaaaaatctcaaatgtatcagctttttttaaaggacattactagaaaattaaacagtattttttaacatgtgtgactttcatgcttctggggttggagcttaaagatccaaactgagaaagcaggccgggcatggtggctcatgcctgtaatcccaacactttgggaggccaaggagggtggatcacttaaggtcaggagtttgagaccagcctggccaacatggcgaaaccctgtctctactaaaaacataaaaattagctgggggtggtagcacatacctgtaatcccagctactcaggaggctgaggcaggagaatttgcttgatcctgggaggcagaggttgtagtgagccgagatcgcgccatcgcactccagcctgggtgacaagagcaaaactccatctc

SEQ ID NO: 302308 - DNA, 3816 bp, Homo sapiens
acaatgacgttgagaataggcgactgattctctgtgtggccagaattagagcctaaggccaccagaagctcagcatcttgcttattgttgcatctccccccagcccctgggcatcaccaacatagccatcgacttcggggagcaggccttgaaccggggcattgctgctgtcaaggaggatgcagtcgagatgctggccagctacgggctggcgtactccctcatgaagttcttcacgggtcccatgagtgacttcaaaaatgtgggcctggtgtttgtgaacagcaagagagacaggaccaaagccgtcctgtgtatggtggtggcaggggccatcgctgccgtctttcacacactgatagcttatagtgatttaggatactacattatcaataaactgcaccatgtggacgagtcggtggggagcaagacgagaagggccttcctgtacctcgccgcctttcctttcatggacgcaatggcatggacccatgctggcattctcttaaaacacaaatacagtttcctggtgggatgtgcctcaatctcagatgtcatagctcaggttgtttttgtagccattttgcttcacagtcacctggaatgccgggagcccctgctcatcccgatcctctccttgtacatgggcgcacttgtgcgctgcaccaccctgtgcctgggctactacaagaacattcacgacatcatccctgacagaagtggcccggagctggggggagatgcaacaataagaaagatgctgagcttctggtggcctttggctctaattctggccacacagagaatcagtcggcctattgtcaacctctttgtttcccgggaccttggtggcagttctgcagccacagaggcagtggcgattttgacagccacataccctgtgggtcacatgccatacggctggttgacggaaatccgtgctgtgtatcctgctttcgacaagaataaccccagcaacaaactggtgagcacgagcaacacagtcacggcagcccacatcaagaagttcaccttcgtctgcatggctctgtcactcacgctctgtttcgtgatgttttggacacccaacgtgtctgagaaaatcttgatagacatcatcggagtggactttgcctttgcagaactctgtgttgttcctttgcggatcttctccttcttcccagttccagtcacagtgagggcgcatctcaccgggtggctgatgacactgaagaaaaccttcgtccttgcccccagctctgtgctgcggatcatcgtcctcatcgccagcctcgtggtcctaccctacctgggggtgcacggtgcgaccctgggcgtgggctccctcctggcgggctttgtgggagaatccaccatggtcgccatcgctgcgtgctatgtctaccggaagcagaaaaagaagatggagaatgagtcggccacggagggggaagactctgccatgacagacatgcctccgacagaggaggtgacagacatcgtggaaatgagagaggagaatgaataaggcacgggacgccatgggcactgcagggacagtcagtcaggatgacacttcggcatcatctcttccctctcccatcgtattttgttcccttttttttgttttgttttggtaatgaaagaggccttgatttaaaggtttcgtgtcaattctctagcatactgggtatgctcacactgacggggggacctagtgaatggtctttactgttgctatgtaaaaacaaacgaaacaactgacttcatacccctgcctcacgaaaacccaaaagacacagctgcctcacggttgacgttgtgtcctcctcccctggacaatctcctcttggaaccaaaggactgcagctgtgccatcgcgcctcggtcaccctgcacagcaggccacagactctcctgtcccccttcatcgctcttaagaatcaacaggttaaaactcggcttcctttgatttgcttcccagtcacatggccgtacaaagagatggagccccggtggcctcttaaatttcccttccgccacggagttcgaaaccatctactccacacatgcaggaggcgggtggcacgctgcagcccggagtccccgttcacactgaggaacggagacctgtgaccacagcaggctgacagatggacagaatctcccgtagaaaggtttggtttgaaatgccccgggggcagcaaactgacatggttgaatgatagcatttcactctgcgttctcctagatctgagcaagctgtcagttctcacccccaccgtgtatatacatgagctaacttttttaaattgtcacaaaagcgcatctccagattccagaccctgccgcatgacttttcctgaaggcttgcttttccctcgcctttcctgaaggtcgcattagagcgagtcacatggagcatcctaactttgcattttagtttttacagtgaactgaagctttaagtctcatccagcattctaatgccaggttgctgtagggtaacttttgaagtagatatattacctggttctgctatccttagtcataactctgcggtacaggtaattgagaatgtactacggtacttccctcccacaccatacgataaagcaagacattttataacgataccagagtcactatgtggtcctccctgaaataacgcattcgaaatccatgcagtgcagtatatttttctaagttttggaaagcaggttttttcctttaaaaaaattatagacacggttcactaaattgatttagtcagaattcctagactgaaagaacctaaacaaaaaaatattttaaagatataaatatatgctgtatatgttatgtaatttattttaggctataatacatttcctattttcgcattttcaataaaatgtctctaatacaatacggtgattgcttgtgtgctcaacatacctgcagttgaaacgtattgtatcaatgaacattgtaccttattggcagcagttttataaagtccgtcatttgcatttgaatgtaaggctcagtaaatgacagaactatttttcattatgggtaactggggaataaatgggtcactggagtaggaatagaagtgcaagctggaaaggcaaaaatgagaaagaaaaaggcaggccctttgtgtctaccgttttcagtgctgtgtgatcatattgttcctcacagcaaaaaagaatgcaagggcataatgttagctgtgaacatgccagggttgcattcacattcctgggtacccagtgctgatggggtgtgcccacgtggggacatgtccttggcgtgcttcctcagagtggcttttcctccattaatacatatatgagtactgaaaaattaagttgcatagctgctttgcagtggtttcagaggcagatctgagaagattaaaaaaaaatctcaaatgtatcagctttttttaaaggacattactagaaaattaaacagtattttttaacatgtgtgactttcatgcttctggggttggagcttaaagatccaaactgagaaagcaggccgggcatggtggctcatgcctgtaatcccaacactttgggaggccaaggagggtggatcacttaaggtcaggagtttgagaccagcctggccaacatggcgaaaccctgtctctactaaaaacataaaaattagctgggggtggtagcacatacctgtaatcccagctactcaggaggctgaggcaggagaatttgcttgatcctgggaggcagaggttgtagtgagccgagatcgcgccatcgcactccagcctgggtgacaagagcaaaactccatctc

SEQ ID NO: 302309 - DNA, 3773 bp, Homo sapiens
gttctgctggcatttcgtcgggatgaagacaacacagccaggaaatccagaggttggccttgataacttagagttctaacaagggcagcactgatagtcctggccttgaaccggggcattgctgctgtcaaggaggatgcagtcgagatgctggccagctacgggctggcgtactccctcatgaagttcttcacgggtcccatgagtgacttcaaaaatgtgggcctggtgtttgtgaacagcaagagagacaggaccaaagccgtcctgtgtatggtggtggcaggggccatcgctgccgtctttcacacactgatagcttatagtgatttaggatactacattatcaataaactgcaccatgtggacgagtcggtggggagcaagacgagaagggccttcctgtacctcgccgcctttcctttcatggacgcaatggcatggacccatgctggcattctcttaaaacacaaatacagtttcctggtgggatgtgcctcaatctcagatgtcatagctcaggttgtttttgtagccattttgcttcacagtcacctggaatgccgggagcccctgctcatcccgatcctctccttgtacatgggcgcacttgtgcgctgcaccaccctgtgcctgggctactacaagaacattcacgacatcatccctgacagaagtggcccggagctggggggagatgcaacaataagaaagatgctgagcttctggtggcctttggctctaattctggccacacagagaatcagtcggcctattgtcaacctctttgtttcccgggaccttggtggcagttctgcagccacagaggcagtggcgattttgacagccacataccctgtgggtcacatgccatacggctggttgacggaaatccgtgctgtgtatcctgctttcgacaagaataaccccagcaacaaactggtgagcacgagcaacacagtcacggcagcccacatcaagaagttcaccttcgtctgcatggctctgtcactcacgctctgtttcgtgatgttttggacacccaacgtgtctgagaaaatcttgatagacatcatcggagtggactttgcctttgcagaactctgtgttgttcctttgcggatcttctccttcttcccagttccagtcacagtgagggcgcatctcaccgggtggctgatgacactgaagaaaaccttcgtccttgcccccagctctgtgctgcggatcatcgtcctcatcgccagcctcgtggtcctaccctacctgggggtgcacggtgcgaccctgggcgtgggctccctcctggcgggctttgtgggagaatccaccatggtcgccatcgctgcgtgctatgtctaccggaagcagaaaaagaagatggagaatgagtcggccacggagggggaagactctgccatgacagacatgcctccgacagaggaggtgacagacatcgtggaaatgagagaggagaatgaataaggcacgggacgccatgggcactgcagggacagtcagtcaggatgacacttcggcatcatctcttccctctcccatcgtattttgttcccttttttttgttttgttttggtaatgaaagaggccttgatttaaaggtttcgtgtcaattctctagcatactgggtatgctcacactgacggggggacctagtgaatggtctttactgttgctatgtaaaaacaaacgaaacaactgacttcatacccctgcctcacgaaaacccaaaagacacagctgcctcacggttgacgttgtgtcctcctcccctggacaatctcctcttggaaccaaaggactgcagctgtgccatcgcgcctcggtcaccctgcacagcaggccacagactctcctgtcccccttcatcgctcttaagaatcaacaggttaaaactcggcttcctttgatttgcttcccagtcacatggccgtacaaagagatggagccccggtggcctcttaaatttcccttccgccacggagttcgaaaccatctactccacacatgcaggaggcgggtggcacgctgcagcccggagtccccgttcacactgaggaacggagacctgtgaccacagcaggctgacagatggacagaatctcccgtagaaaggtttggtttgaaatgccccgggggcagcaaactgacatggttgaatgatagcatttcactctgcgttctcctagatctgagcaagctgtcagttctcacccccaccgtgtatatacatgagctaacttttttaaattgtcacaaaagcgcatctccagattccagaccctgccgcatgacttttcctgaaggcttgcttttccctcgcctttcctgaaggtcgcattagagcgagtcacatggagcatcctaactttgcattttagtttttacagtgaactgaagctttaagtctcatccagcattctaatgccaggttgctgtagggtaacttttgaagtagatatattacctggttctgctatccttagtcataactctgcggtacaggtaattgagaatgtactacggtacttccctcccacaccatacgataaagcaagacattttataacgataccagagtcactatgtggtcctccctgaaataacgcattcgaaatccatgcagtgcagtatatttttctaagttttggaaagcaggttttttcctttaaaaaaattatagacacggttcactaaattgatttagtcagaattcctagactgaaagaacctaaacaaaaaaatattttaaagatataaatatatgctgtatatgttatgtaatttattttaggctataatacatttcctattttcgcattttcaataaaatgtctctaatacaatacggtgattgcttgtgtgctcaacatacctgcagttgaaacgtattgtatcaatgaacattgtaccttattggcagcagttttataaagtccgtcatttgcatttgaatgtaaggctcagtaaatgacagaactatttttcattatgggtaactggggaataaatgggtcactggagtaggaatagaagtgcaagctggaaaggcaaaaatgagaaagaaaaaggcaggccctttgtgtctaccgttttcagtgctgtgtgatcatattgttcctcacagcaaaaaagaatgcaagggcataatgttagctgtgaacatgccagggttgcattcacattcctgggtacccagtgctgatggggtgtgcccacgtggggacatgtccttggcgtgcttcctcagagtggcttttcctccattaatacatatatgagtactgaaaaattaagttgcatagctgctttgcagtggtttcagaggcagatctgagaagattaaaaaaaaatctcaaatgtatcagctttttttaaaggacattactagaaaattaaacagtattttttaacatgtgtgactttcatgcttctggggttggagcttaaagatccaaactgagaaagcaggccgggcatggtggctcatgcctgtaatcccaacactttgggaggccaaggagggtggatcacttaaggtcaggagtttgagaccagcctggccaacatggcgaaaccctgtctctactaaaaacataaaaattagctgggggtggtagcacatacctgtaatcccagctactcaggaggctgaggcaggagaatttgcttgatcctgggaggcagaggttgtagtgagccgagatcgcgccatcgcactccagcctgggtgacaagagcaaaactccatctc

SEQ ID NO: 302310 - DNA, 3288 bp, Homo sapiens
cacgcgtcggtgctcaatctcagatgtcatagctcaggttgtttttgtagccattttgcttcacagtcacctggaatgccgggagcccctgctcatcccgatcctctccttgtacatgggcgcacttgtgcgctgcaccaccctgtgcctgggctactacaagaacattcacgacatcatccctgacagaagtggcccggagctggggggagatgcaacaataagaaagatgctgagcttctggtggcctttggctctaattctggccacacagagaatcagtcggcctattgtcaacctctttgtttcccgggaccttggtggcagttctgcagccacagaggcagtggcgattttgacagccacataccctgtgggtcacatgccatacggctggttgacggaaatccgtgctgtgtatcctgctttcgacaagaataaccccagcaacaaactggtgagcacgagcaacacagtcacggcagcccacatcaagaagttcaccttcgtctgcatggctctgtcactcacgctctgtttcgtgatgttttggacacccaacgtgtctgagaaaatcttgatagacatcatcggagtggactttgcctttgcagaactctgtgttgttcctttgcggatcttctccttcttcccagttccagtcacagtgagggcgcatctcaccgggtggctgatgacactgaagaaaaccttcgtccttgcccccagctctgtgctgcggatcatcgtcctcatcgccagcctcgtggtcctaccctacctgggggtgcacggtgcgaccctgggcgtgggctccctcctggcgggctttgtgggagaatccaccatggtcgccatcgctgcgtgctatgtctaccggaagcagaaaaagaagatggagaatgagtcggccacggagggggaagactctgccatgacagacatgcctccgacagaggaggtgacagacatcgtggaaatgagagaggagaatgaataaggcacgggacgccatgggcactgcagggacagtcagtcaggatgacacttcggcatcatctcttccctctcccatcgtattttgttcccttttttttgttttgttttggtaatgaaagaggccttgatttaaaggtttcgtgtcaattctctagcatactgggtatgctcacactgacggggggacctagtgaatggtctttactgttgctatgtaaaaacaaacgaaacaactgacttcatacccctgcctcacgaaaacccaaaagacacagctgcctcacggttgacgttgtgtcctcctcccctggacaatctcctcttggaaccaaaggactgcagctgtgccatcgcgcctcggtcaccctgcacagcaggccacagactctcctgtcccccttcatcgctcttaagaatcaacaggttaaaactcggcttcctttgatttgcttcccagtcacatggccgtacaaagagatggagccccggtggcctcttaaatttcccttccgccacggagttcgaaaccatctactccacacatgcaggaggcgggtggcacgctgcagcccggagtccccgttcacactgaggaacggagacctgtgaccacagcaggctgacagatggacagaatctcccgtagaaaggtttggtttgaaatgccccgggggcagcaaactgacatggttgaatgatagcatttcactctgcgttctcctagatctgagcaagctgtcagttctcacccccaccgtgtatatacatgagctaacttttttaaattgtcacaaaagcgcatctccagattccagaccctgccgcatgacttttcctgaaggcttgcttttccctcgcctttcctgaaggtcgcattagagcgagtcacatggagcatcctaactttgcattttagtttttacagtgaactgaagctttaagtctcatccagcattctaatgccaggttgctgtagggtaacttttgaagtagatatattacctggttctgctatccttagtcataactctgcggtacaggtaattgagaatgtactacggtacttccctcccacaccatacgataaagcaagacattttataacgataccagagtcactatgtggtcctccctgaaataacgcattcgaaatccatgcagtgcagtatatttttctaagttttggaaagcaggttttttcctttaaaaaaattatagacacggttcactaaattgatttagtcagaattcctagactgaaagaacctaaacaaaaaaatattttaaagatataaatatatgctgtatatgttatgtaatttattttaggctataatacatttcctattttcgcattttcaataaaatgtctctaatacaatacggtgattgcttgtgtgctcaacatacctgcagttgaaacgtattgtatcaatgaacattgtaccttattggcagcagttttataaagtccgtcatttgcatttgaatgtaaggctcagtaaatgacagaactatttttcattatgggtaactggggaataaatgggtcactggagtaggaatagaagtgcaagctggaaaggcaaaaatgagaaagaaaaaggcaggccctttgtgtctaccgttttcagtgctgtgtgatcatattgttcctcacagcaaaaaagaatgcaagggcataatgttagctgtgaacatgccagggttgcattcacattcctgggtacccagtgctgatggggtgtgcccacgtggggacatgtccttggcgtgcttcctcagagtggcttttcctccattaatacatatatgagtactgaaaaattaagttgcatagctgctttgcagtggtttcagaggcagatctgagaagattaaaaaaaaatctcaaatgtatcagctttttttaaaggacattactagaaaattaaacagtattttttaacatgtgtgactttcatgcttctggggttggagcttaaagatccaaactgagaaagcaggccgggcatggtggctcatgcctgtaatcccaacactttgggaggccaaggagggtggatcacttaaggtcaggagtttgagaccagcctggccaacatggcgaaaccctgtctctactaaaaacataaaaattagctgggggtggtagcacatacctgtaatcccagctactcaggaggctgaggcaggagaatttgcttgatcctgggaggcagaggttgtagtgagccgagatcgcgccatcgcactccagcctgggtgacaagagcaaaactccatctc

SEQ ID NO: 302311 - DNA, 2441 bp, Homo sapiens
ttacgaattcagccccgggaccccgtcgaccggaagcagaaaaagaagatggagaatgagtcggccacggagggggaagactctgccatgacagacatgcctccgacagaggaggtgacagacatcgtggaaatgagagaggagaatgaataaggcacgggacgccatgggcactgcagggacagtcagtcaggatgacacttcggcatcatctcttccctctcccatcgtattttgttcccttttttttgttttgttttggtaatgaaagaggccttgatttaaaggtttcgtgtcaattctctagcatactgggtatgctcacactgacggggggacctagtgaatggtctttactgttgctatgtaaaaacaaacgaaacaactgacttcatacccctgcctcacgaaaacccaaaagacacagctgcctcacggttgacgttgtgtcctcctcccctggacaatctcctcttggaaccaaaggactgcagctgtgccatcgcgcctcggtcaccctgcacagcaggccacagactctcctgtcccccttcatcgctcttaagaatcaacaggttaaaactcggcttcctttgatttgcttcccagtcacatggccgtacaaagagatggagccccggtggcctcttaaatttcccttccgccacggagttcgaaaccatctactccacacatgcaggaggcgggtggcacgctgcagcccggagtccccgttcacactgaggaacggagacctgtgaccacagcaggctgacagatggacagaatctcccgtagaaaggtttggtttgaaatgccccgggggcagcaaactgacatggttgaatgatagcatttcactctgcgttctcctagatctgagcaagctgtcagttctcacccccaccgtgtatatacatgagctaacttttttaaattgtcacaaaagcgcatctccagattccagaccctgccgcatgacttttcctgaaggcttgcttttccctcgcctttcctgaaggtcgcattagagcgagtcacatggagcatcctaactttgcattttagtttttacagtgaactgaagctttaagtctcatccagcattctaatgccaggttgctgtagggtaacttttgaagtagatatattacctggttctgctatccttagtcataactctgcggtacaggtaattgagaatgtactacggtacttccctcccacaccatacgataaagcaagacattttataacgataccagagtcactatgtggtcctccctgaaataacgcattcgaaatccatgcagtgcagtatatttttctaagttttggaaagcaggttttttcctttaaaaaaattatagacacggttcactaaattgatttagtcagaattcctagactgaaagaacctaaacaaaaaaatattttaaagatataaatatatgctgtatatgttatgtaatttattttaggctataatacatttcctattttcgcattttcaataaaatgtctctaatacaatacggtgattgcttgtgtgctcaacatacctgcagttgaaacgtattgtatcaatgaacattgtaccttattggcagcagttttataaagtccgtcatttgcatttgaatgtaaggctcagtaaatgacagaactatttttcattatgggtaactggggaataaatgggtcactggagtaggaatagaagtgcaagctggaaaggcaaaaatgagaaagaaaaaggcaggccctttgtgtctaccgttttcagtgctgtgtgatcatattgttcctcacagcaaaaaagaatgcaagggcataatgttagctgtgaacatgccagggttgcattcacattcctgggtacccagtgctgatggggtgtgcccacgtggggacatgtccttggcgtgcttcctcagagtggcttttcctccattaatacatatatgagtactgaaaaattaagttgcatagctgctttgcagtggtttcagaggcagatctgagaagattaaaaaaaaatctcaaatgtatcagctttttttaaaggacattactagaaaattaaacagtattttttaacatgtgtgactttcatgcttctggggttggagcttaaagatccaaactgagaaagcaggccgggcatggtggctcatgcctgtaatcccaacactttgggaggccaaggagggtggatcacttaaggtcaggagtttgagaccagcctggccaacatggcgaaaccctgtctctactaaaaacataaaaattagctgggggtggtagcacatacctgtaatcccagctactcaggaggctgaggcaggagaatttgcttgatcctgggaggcagaggttgtagtgagccgagatcgcgccatcgcactccagcctgggtgacaagagcaaaactccatctc

SEQ ID NO: 302312 - DNA, 2535 bp, Homo sapiens
caccccaaccataagaaggtttaagcctacagtgaggggtcccccaagaccccggtgttgtctccctgctcgtggttctgctgtgcagtgtccccatccacagccccacactgatgagtcttctttggtctagaaaaagaagatggagaatgagtcggccacggagggggaagactctgccatgacagacatgcctccgacagaggaggtgacagacatcgtggaaatgagagaggagaatgaataaggcacgggacgccatgggcactgcagggacagtcagtcaggatgacacttcggcatcatctcttccctctcccatcgtattttgttcccttttttttgttttgttttggtaatgaaagaggccttgatttaaaggtttcgtgtcaattctctagcatactgggtatgctcacactgacggggggacctagtgaatggtctttactgttgctatgtaaaaacaaacgaaacaactgacttcatacccctgcctcacgaaaacccaaaagacacagctgcctcacggttgacgttgtgtcctcctcccctggacaatctcctcttggaaccaaaggactgcagctgtgccatcgcgcctcggtcaccctgcacagcaggccacagactctcctgtcccccttcatcgctcttaagaatcaacaggttaaaactcggcttcctttgatttgcttcccagtcacatggccgtacaaagagatggagccccggtggcctcttaaatttcccttccgccacggagttcgaaaccatctactccacacatgcaggaggcgggtggcacgctgcagcccggagtccccgttcacactgaggaacggagacctgtgaccacagcaggctgacagatggacagaatctcccgtagaaaggtttggtttgaaatgccccgggggcagcaaactgacatggttgaatgatagcatttcactctgcgttctcctagatctgagcaagctgtcagttctcacccccaccgtgtatatacatgagctaacttttttaaattgtcacaaaagcgcatctccagattccagaccctgccgcatgacttttcctgaaggcttgcttttccctcgcctttcctgaaggtcgcattagagcgagtcacatggagcatcctaactttgcattttagtttttacagtgaactgaagctttaagtctcatccagcattctaatgccaggttgctgtagggtaacttttgaagtagatatattacctggttctgctatccttagtcataactctgcggtacaggtaattgagaatgtactacggtacttccctcccacaccatacgataaagcaagacattttataacgataccagagtcactatgtggtcctccctgaaataacgcattcgaaatccatgcagtgcagtatatttttctaagttttggaaagcaggttttttcctttaaaaaaattatagacacggttcactaaattgatttagtcagaattcctagactgaaagaacctaaacaaaaaaatattttaaagatataaatatatgctgtatatgttatgtaatttattttaggctataatacatttcctattttcgcattttcaataaaatgtctctaatacaatacggtgattgcttgtgtgctcaacatacctgcagttgaaacgtattgtatcaatgaacattgtaccttattggcagcagttttataaagtccgtcatttgcatttgaatgtaaggctcagtaaatgacagaactatttttcattatgggtaactggggaataaatgggtcactggagtaggaatagaagtgcaagctggaaaggcaaaaatgagaaagaaaaaggcaggccctttgtgtctaccgttttcagtgctgtgtgatcatattgttcctcacagcaaaaaagaatgcaagggcataatgttagctgtgaacatgccagggttgcattcacattcctgggtacccagtgctgatggggtgtgcccacgtggggacatgtccttggcgtgcttcctcagagtggcttttcctccattaatacatatatgagtactgaaaaattaagttgcatagctgctttgcagtggtttcagaggcagatctgagaagattaaaaaaaaatctcaaatgtatcagctttttttaaaggacattactagaaaattaaacagtattttttaacatgtgtgactttcatgcttctggggttggagcttaaagatccaaactgagaaagcaggccgggcatggtggctcatgcctgtaatcccaacactttgggaggccaaggagggtggatcacttaaggtcaggagtttgagaccagcctggccaacatggcgaaaccctgtctctactaaaaacataaaaattagctgggggtggtagcacatacctgtaatcccagctactcaggaggctgaggcaggagaatttgcttgatcctgggaggcagaggttgtagtgagccgagatcgcgccatcgcactccagcctgggtgacaagagcaaaactccatctc

SEQ ID NO: 302313 - DNA, 2637 bp, Homo sapiens
ttccgggccccagagcgcttataatggagccgctgtcagcagaaccttctgccgccgccgccgccgccgccgtccctcctcttttttttcccggcagatctttgttgtgtgggagggcagcagggatggacttgagcttgcggatcccctgctagagcagccgcgctcggagaaggcgccgcagccgcgaggaggagccgccgccgccgcgcccgaggccccgccgcccgcggcctctgtcggcccgcgccccgctcgccccgtcgcccctcgcctccccgcagagtcccctcgcggcagcagatgtgtgtggggtcagcccacggcggggactatggtgaaattcccggcgctcacgcactactggcccctgatccggttcttggtgcccctgggcatcaccaacatagccatcgacttcggggagcaggccttgaaccggggcattgctgctgtcaaggaggatgcagtcgagatgctggccagctacgggctggcgtactccctcatgaagttcttcacgggtcccatgagtgacttcaaaaatgtgggcctggtgtttgtgaacagcaagagagacaggaccaaagccgtcctgtgtatggtggtggcaggggccatcgctgccgtctttcacacactgatagcttatagtgatttaggatactacattatcaataaactgcaccatgtggacgagtcggtggggagcaagacgagaagggccttcctgtacctcgccgcctttcctttcatggacgcaatggcatggacccatgctggcattctcttaaaacacaaatacagtttcctggtgggatgtgcctcaatctcagatgtcatagctcaggttgtttttgtagccattttgcttcacagtcacctggaatgccgggagcccctgctcatcccgatcctctccttgtacatgggcgcacttgtgcgctgcaccaccctgtgcctgggctactacaagaacattcacgacatcatccctgacagaagtggcccggagctggggggagatgcaacaataagaaagatgctgagcttctggtggcctttggctctaattctggccacacagagaatcagtcggcctattgtcaacctctttgtttcccgggaccttggtggcagttctgcagccacagaggcagtggcgattttgacagccacataccctgtgggtcacatgccatacggctggttgacggaaatccgtgctgtgtatcctgctttcgacaagaataaccccagcaacaaactggtgagcacgagcaacacagtcacggcagcccacatcaagaagttcaccttcgtctgcatggctctgtcactcacgctctgtttcgtgatgttttggacacccaacgtgtctgagaaaatcttgatagacatcatcggagtggactttgcctttgcagaactctgtgttgttcctttgcggatcttctccttcttcccagttccagtcacagtgagggcgcatctcaccgggtggctgatgacactgaagaaaaccttcgtccttgcccccagctctgtgctgcggatcatcgtcctcatcgccagcctcgtggtcctaccctacctgggggtgcacggtgcgaccctgggcgtgggctccctcctggcgggctttgtgggagaatccaccatggtcgccatcgctgcgtgctatgtctaccggaagcagaaaaagaagatggagaatgagtcggccacggagggggaagactctgccatgacagacatgcctccgacagaggaggtgacagacatcgtggaaatgagagaggagaatgaataaggcacgggacgccatgggcactgcagggacagtcagtcaggatgacacttcggcatcatctcttccctctcccatcgtattttgttcccttttttttgttttgttttggtaatgaaagaggccttgatttaaaggtttcgtgtcaattctctagcatactgggtatgcccttcctgatctaacattctgtttatgatctaggatttagaacgtcgtatgagatcctacaatggaagaataaaatcacctcattcttcatttcagatctgaacattagcagtgatctagatttttttttttttaaacaaaattaagtgtgcttagagtcattcctctacatgggctgtggctgtcagcccataggtttgtcagtttcacatcaaaactgtgggtataaactgttgaaaccaatcacattaaaatatttagctgggcacagtggtgtgcatctgtagtcccagctacttgggaggctgaggcaggaggatcgcttaagcacaggagttggaatccagcctgagcaacagagcaaaaccccgtctctaaaatacaaataaaatatttgtgtagtttttgattaaaattgactacagcggtcagtataaaatacatgtcgcttttaaggaagtgctctttatgtatctaacagatggaagtttttgcattggtaagagcatttatatatgctttgtttcagggtttatggatttgtattcatatattgtcaaataggtttcatactctaattttactttaagtaaagcttaaacgtcgacgcggccgggaatttactagtatttgtcgacccgggaatttcggaccgg

SEQ ID NO: 302314 - DNA, 1841 bp, Homo sapiens
ttccgggccccagagcgcttataatggagccgctgtcagcagaaccttctgccgccgccgccgccgccgccgtccctcctcttttttttcccggcagatctttgttgtgtgggagggcagcagggatggacttgagcttgcggatcccctgctagagcagccgcgctcggagaaggcgccgcagccgcgaggaggagccgccgccgccgcgcccgaggccccgccgcccgcggcctctgtcggcccgcgccccgctcgccccgtcgcccctcgcctccccgcagagtcccctcgcggcagcagatgtgtgtggggtcagcccacggcggggactatggtgaaattcccggcgctcacgcactactggcccctgatccggttcttggtgcccctgggcatcaccaacatagccatcgacttcggggagcaggccttgaaccggggcattgctgctgtcaaggaggatgcagtcgagatgctggccagctacgggctggcgtactccctcatgaagttcttcacgggtcccatgagtgacttcaaaaatgtgggcctggtgtttgtgaacagcaagagagacaggaccaaagccgtcctgtgtatggtggtggcaggggccatcgctgccgtctttcacacactgatagcttatagtgatttaggatactacattatcaataaactgcaccatgtggacgagtcggtggggagcaagacgagaagggccttcctgtacctcgccgcctttcctttcatggacgcaatggcatggacccatgctggcattctcttaaaacacaaatacagtttcctggtgggatgtgcctcaatctcagatgtcatagctcaggttgtttttgtagccattttgcttcacagtcacctggaatgccgggagcccctgctcatcccgatcctctccttgtacatgggcgcacttgtgcgctgcaccaccctgtgcctgggctactacaagaacattcacgacatcatccctgacagaagtggcccggagctggggggagatgcaacaataagaaagatgctgagcttctggtggcctttggctctaattctggccacacagagaatcagtcggcctattgtcaacctctttgtttcccgggaccttggtggcagttctgcagccacagaggcagtggcgattttgacagccacataccctgtgggtcacatgccatacggctggttgacggaaatccgtgctgtgtatcctgctttcgacaagaataaccccagcaacaaactggtgagcacgagcaacacagtcacggcagcccacatcaagaagttcaccttcgtctgcatggctctgtcactcacgctctgtttcgtgatgttttggacacccaacgtgtctgagaaaatcttgatagacatcatcggagtggactttgcctttgcagaactctgtgttgttcctttgcggatcttctccttcttcccagttccagtcacagtgagggcgcatctcaccgggtggctgatgacactgaagaaaaccttcgtccttgcccccagctctgtgctgcggatcatcgtcctcatcgccagcctcgtggtcctaccctacctgggggtgcacggtgcgaccctgggcgtgggctccctcctggcgggctttgtgggagaatccaccatggtcgccatcgctgcgtgctatgtctaccggaagcagaaaaagatgatggataatgatttgtccacgggaggggaaaactttgcttgacaaacatgctttctacagaggatgtgacacacattcttggaatgagagagggaatttttttgtgtcggtactccttgggcctttcatggac

SEQ ID NO: 302315 - DNA, 1842 bp, Homo sapiens
ttccgggccccagagcgcttataatggagccgctgtcagcagaaccttctgccgccgccgccgccgccgccgtccctcctcttttttttcccggcagatctttgttgtgtgggagggcagcagggatggacttgagcttgcggatcccctgctagagcagccgcgctcggagaaggcgccgcagccgcgaggaggagccgccgccgccgcgcccgaggccccgccgcccgcggcctctgtcggcccgcgccccgctcgccccgtcgcccctcgcctccccgcagagtcccctcgcggcagcagatgtgtgtggggtcagcccacggcggggactatggtgaaattcccggcgctcacgcactactggcccctgatccggttcttggtgcccctgggcatcaccaacatagccatcgacttcggggagcaggccttgaaccggggcattgctgctgtcaaggaggatgcagtcgagatgctggccagctacgggctggcgtactccctcatgaagttcttcacgggtcccatgagtgacttcaaaaatgtgggcctggtgtttgtgaacagcaagagagacaggaccaaagccgtcctgtgtatggtggtggcaggggccatcgctgccgtctttcacacactgataggtgaggccgccgaccgccactgacgaatctagctttggcaatttcttattccttttcattgatttaaatgtatttattgagataagtggtttcttcactaattatcaaatgtttcttatgaaattttcaggggatagaaggaaagcgcttgtgctcctagcttaagacaataatgtgttttttctggggagctgtagttttgtgtctctgattcccaaagtgaaaagcagtgatttcattagtaggcgattacatctaggaataacatttggtaaggccaataaaatagcaggtgctttcgttagagatatgtgtgcgtcattgtactgggtcattaaatcttaagaataaaaatagaatgacttatttagaattaatgcttattagcagtgagaacaaatgacagattgttctatttattaatttgttctaggatcttattctattttattcaaagacaagactaaatgctcttgtgatagcattctttccatgaaacaacaggaaagctgtatcatacatacagtgactggcctccagtttaaccaagaccctggaaaagcagctctccttcagggctggagttctgctgctgctttcttggtggggataaagccttcagggcatgacttccgtcgtggctttaaaacagctttgcttacctggcataaaaattgagtggtacctctactgaaaccagttacataaaacactgtgaatgacacttcataaacccattgtgtaccttaaaattgttactgattgtttaagacgcgtgactgtcagtggtgaataaaggaaccaaaagattaacccagaccgtttacagtgtgtttgcatggcagctaatgcttactcacataactgcgaatctgaaagtaaataaggtaaggcctttgtggttttcctttttaatgtgacataaaattttgtgctaagaacattgtggaagagagcgcatctgctgatggaccagacattcagccaaagcgttgatattgatcctttaatttgtgctcagagcttcagggcatggagtaaagaggagctgcctctcatttcctcagtttatgccctgaaggctaactgtggactgagtatttgcacatgtacttgtatttgaagtaaatttctgctacatttgacctgagccattttcaaagaatacatgtacagtatttgggaaaaaaaaaag

SEQ ID NO: 302316 - DNA, 1494 bp, Homo sapiens
ttccgggccccagagcgcttataatggagccgctgtcagcagaaccttctgccgccgccgccgccgccgccgtccctcctcttttttttcccggcagatctttgttgtgtgggagggcagcagggatggacttgagcttgcggatcccctgctagagcagccgcgctcggagaaggcgccgcagccgcgaggaggagccgccgccgccgcgcccgaggccccgccgcccgcggcctctgtcggcccgcgccccgctcgccccgtcgcccctcgcctccccgcagagtcccctcgcggcagcagatgtgtgtggggtcagcccacggcggggactatggtgaaattcccggcgctcacgcactactggcccctgatccggttcttggtgcccctgggcatcaccaacatagccatcgacttcggggagcaggccttgaaccggggcattgctgctgtcaaggaggatgcagtcgagatgctggccagctacgggctggcgtactccctcatgaagttcttcacgggtcccatgagtgacttcaaaaatgtgggcctggtgtttgtgaacagcaagagagacaggaccaaagccgtcctgtgtatggtggtggcaggggccatcgctgccgtctttcacacactgatagcttatagtgatttaggatactacattatcaataaactgcaccatgtggacgagtcggtggggagcaagacgagaagggccttcctgtacctcgccgcctttcctttcatggacgcaatggcatggacccatgctggcattctcttaaaacacaaatacagtttcctggtgggatgtgcctcaatctcagatgtcatagctcaggttgtttttgtagccattttgcttcacagtcacctggaatgccgggagcccctgctcatcccgatcctctccttgtacatgggcgcacttgtgcgctgcaccaccctgtgcctgggctactacaagaacattcacgacatcatccctgacagaagtggcccggagctggggggagatgcaacaataagaaagatgctgagcttctggtggcctttggctctaattctggccacacagagaatcagtcggcctattgtcaacctctttgtttcccgggaccttggtggcagttctgcagccacagaggcagtggcgattttgacagccacataccctgtgggtcacatgccatacggctggttgacggaaatccgtgctgtgtatcctgctttcgacaagaataaccccagcaacaaactggtgagcacgagcaacacagtcacggcagcccacatcaagaagttcaccttcgtctgcatggctctgtcactcacggcattgagcccctgcgggatcccaggcccatctgtctgctgaggatacagctgtgagcaagcgtgtgtgacactgtgtcagcagcaaagcctgtctgtatttctatgcgcaaccttaaataaacaacacgcatccttcgttatgaagcc

SEQ ID NO: 302317 - DNA, 1715 bp, Homo sapiens
ttccgggccccagagcgcttataatggagccgctgtcagcagaaccttctgccgccgccgccgccgccgccgtccctcctcttttttttcccggcagatctttgttgtgtgggagggcagcagggatggacttgagcttgcggatcccctgctagagcagccgcgctcggagaaggcgccgcagccgcgaggaggagccgccgccgccgcgcccgaggccccgccgcccgcggcctctgtcggcccgcgccccgctcgccccgtcgcccctcgcctccccgcagagtcccctcgcggcagcagatgtgtgtggggtcagcccacggcggggactatggtgaaattcccggcgctcacgcactactggcccctgatccggttcttggtgcccctgggcatcaccaacatagccatcgacttcggggagcaggccttgaaccggggcattgctgctgtcaaggaggatgcagtcgagatgctggccagctacgggctggcgtactccctcatgaagttcttcacgggtcccatgagtgacttcaaaaatgtgggcctggtgtttgtgaacagcaagagagacaggaccaaagccgtcctgtgtatggtggtggcaggggccatcgctgccgtctttcacacactgatagcttatagtgatttaggatactacattatcaataaactgcaccatgtggacgagtcggtggggagcaagacgagaagggccttcctgtacctcgccgcctttcctttcatggacgcaatggcatggacccatgctggcattctcttaaaacacaaatacagtttcctggtgggatgtgcctcaatctcagatgtcatagctcaggttgtttttgtagccattttgcttcacagtcacctggaatgccgggagcccctgctcatcccgatcctctccttgtacatgggcgcacttgtgcgctgcaccaccctgtgcctgggctactacaagaacattcacgacatcatccctgacagaagtggcccggagctggggggagatgcaacaataagaaagatgctgagcttctggtggcctttggctctaattctggccacacagagaatcagtcggcctattgtcaacctctttgtttcccgggaccttggtggcagttctgcagccacagaggcagtggcgattttgacagccacataccctgtgggtcacatgccatacggctggttgacggaaatccgtgctgtgtatcctgctttcgacaagaataaccccagcaacaaactggtgagcacgagcaacacagtcacggcagcccacatcaagaagttcaccttcgtctgcatggctctgtcactcacggtaaggacagaggctctctctgcctcttctctctgtttggtttttgtaaaggggcaagttgctattttaaagggggaaatcttattttccacaatgtaatgtgatgctggattaattagcaatctcttcaatacactttcttcttcaaatgtgaacgattgttattcaaggaggcccttgagtctaggaataaaggacccacttcaggcatttcttgggacttctcaaatgctgcagaaaggaagaggttgcctttaattggaatagtacacttgtcttgctgaaaaatttctagcccactttttaaacatcgaaagtcaactttacaaccacccctgtctcttttccaaatttaatccgcgttacttca

SEQ ID NO: 302318 - DNA, 977 bp, Homo sapiens
ttccgggccccagagcgcttataatggagccgctgtcagcagaaccttctgccgccgccgccgccgccgccgtccctcctcttttttttcccggcagatctttgttgtgtgggagggcagcagggatggacttgagcttgcggatcccctgctagagcagccgcgctcggagaaggcgccgcagccgcgaggaggagccgccgccgccgcgcccgaggccccgccgcccgcggcctctgtcggcccgcgccccgctcgccccgtcgcccctcgcctccccgcagagtcccctcgcggcagcagatgtgtgtggggtcagcccacggcggggactatggtgaaattcccggcgctcacgcactactggcccctgatccggttcttggtgcccctgggcatcaccaacatagccatcgacttcggggagcaggccttgaaccggggcattgctgctgtcaaggaggatgcagtcgagatgctggccagctacgggctggcgtactccctcatgaagttcttcacgggtcccatgagtgacttcaaaaatgtgggcctggtgtttgtgaacagcaagagagacaggaccaaagccgtcctgtgtatggtggtggcaggggccatcgctgccgtctttcacacactgatagcttatagtgatttaggatactacattatcaataaactgcaccatgtggacgagtcggtggggagcaagacgagaagggccttcctgtacctcgccgcctttcctttcatggacgcaatggtgagtagagaagatcgttggctttctttctttttctttaactggtggtaaaatatacataatataaaatctaccattttagctatttttgtgtgtacagcttaatggcaggaagtacattcacattattgtgtaaccaatcttcagaactcttcatcttgcaaaactgagattctatcctaattcaacagtaaccctcctcggccccctc

SEQ ID NO: 302319 - DNA, 1312 bp, Homo sapiens
tggccatgtgaaatattttattttccaggctaaagcaaatgaaagtttgctggtatcaacacagcctgccatatttttcacagcatgcaacaatggtgctaggatagctatttcttactgtaattgccagaggcagaaatggtctgggtataagctatttcataaaagcagctttaaattgtcagtattaaggttttcatgtggaaaggtgtcattcaaaaaaaaagtaattggcatacatattccacatcatcgatcctctctgtggtgttaatttttttatatgaccagtagaaaaattttaatattctcacaatataggttttggggcttccatatcatcaaaagactgaaaaattataattttagaattaaactgatggatttcattatagaattatctgtgagttgtgtagacacagtcttaatgtttctggttatgacagataagtttgctcaaaaaatgtggatgaagccattattgttattattgttattgcttctgttcagttgtctaagtatcatcccttctgtggcccatcacgcagcagagttgccctacaaatttcatttggcagcgccataacattcatttaaaaagtttatgaaaacattcatttgaaagttccatgcagctttagcacagagttgaccaaacactggcgtaagttcaatttacacagaatatttgaattgaaacaatagaaatttttctcataatatatacctatgtgaaaccaacttatctgcataattaaatctaatacatatttaagccagtttaagtgctttgtgttgatgccatgcttatcaaatacatgcacaagctaaacataatttgaatgggtctatgaaggaaaaataatgcttagactttggtgtaggttcttcctgtgtagccatatacccaggctctgcagtatcgaaggatgcaaatgttgacatagatggaagctcttacctaccaaagtgtttaggaaggataaagttacatttgtcttaatttctaacattatctttgcttttatgtttcataaaaatttgtcattatttatgctggtgaaacgtataatcacatccaattatttgaacacatgcaaaataattttttaaattatgttattgtttaaatttgacttatgggagatcagtcaaaaacttagaaggtttaacacttcactgattaatggtgctgaaaacacgttacaattaccacatatccttgctataagttttgaagtttcttagcaattaaagtttttttattcagtgtgaactgtcagtatctattctggtgctaaatgtatggtgc

SEQ ID NO: 302320 - DNA, 1119 bp, Homo sapiens
ctctccccggggcgaccgggcggctccacacgcgctgcgcccgccgccggccccacgcgcggcccatgtcctccgcgccgcgctcgcccaccccgcggccccgcaggatgaagaaggacgagtcgttcctgggcaagctgggcggcaccctggccaggaagcggagggcgcgcgaggtgagtgacctgcaggaagaaggcaagaatgccatcaactcaccgatgtcccccgccctggcggatgttcaccctgaagacacccagctcgaggagaacgaggagcgcacgatgattgaccccacttccaaggaagaccccaagttcaaggaactggtcaaggtcctcctcgactggattaatgacgtgctggtggaggagaggatcattgtgaagcagctggaggaagacctgtatgacggccaggtgctgcagaagctcttggaaaaactggcagggtgcaagctgaatgtggctgaggtgacacagtccgaaatagggcagaaacagaagctgcagacggtgctggaagcagtacatgacctgctgcggccccgaggctgggcgctccggtggagcgtggactcaattcacgggaagaacctggtggccatcctccacctgctggtctctctggccatgcacttcagggcccccatccgccttcctgagcatgtaacggtgcaggtggtggtcgtgcggaaacgggaaggcctgctgcattccagccacatctcggaggagctgaccacaactacagagatgatgatgggccggtggtggtctgccttttccagtccacagattcagatgttaatctcctttggcaacaccctcacagacacacccaggaaccacgccttgcacccttcaatccaatcaagctgacagtattaaccatcacgcctgtggagaggggaagtggctcagatcctgcggggcttgaattgagaagatgcagccagcgtgtcccccctaggctttctttactagaccttaagctgtgctgggaacattcacaggccttctctgttttttgtttgtttgtttgtttgtttttaaggagaattccagctcttttaaattgtctctattattaaaaaacaaatgcaggaagagaaag

SEQ ID NO: 302321 - DNA, 1721 bp, Homo sapiens
ctctccccggggcgaccgggcggctccacacgcgctgcgcccgccgccggccccacgcgcggcccatgtcctccgcgccgcgctcgcccaccccgcggccccgcaggatgaagaaggacgagtcgttcctgggcaagctgggcggcaccctggccaggaagcggagggcgcgcgaggtgagtgacctgcaggaagaaggcaagaatgccatcaactcaccgatgtcccccgccctggcggatgttcaccctgaagacacccagctcgaggagaacgaggagcgcacgatgattgaccccacttccaaggaagaccccaagttcaaggaactggtcaaggtcctcctcgactggattaatgacgtgctggtggaggagaggatcattgtgaagcagctggaggaagacctgtatgacggccaggtgctgcagaagctcttggaaaaactggcagggtgcaagctgaatgtggctgaggtgacacagtccgaaatagggcagaaacagaagctgcagacggtgctggaagcagtacatgacctgctgcggccccgaggctgggcgctccggtggagcgtggactcaattcacgggaagaacctggtggccatcctccacctgctggtctctctggccatgcacttcagggcccccatccgccttcctgagcatgtaacggtgcaggtggtggtcgtgcggaaacgggaaggcctgctgcattccagccacatctcggaggagctgaccacaactacagagatgatgatgggccggttcgagcgggatgccttcgacacgctgttcgaccacgccccggataagctcagcgtggtgaagaagtctctcatcacttttgtgaacaagcacctgaacaagctgaatttggaggtgacggaactggagacccagtttgcagatggcgtgtacctggttctgctcatgggccttctggaagactactttgttcctctccaccacttctacctgactccggaaagcttcgatcagaaggtccacaatgtgtccttcgcctttgagctgatgctggacggaggcctcaagaaacccaaggctcgtcctgaagacgtggttaacttggacctcaaatccaccctgagggttctttacaacctgttcaccaagtacaagaacgtggagtgacgggggagctgtggatggtggcaggagtgtcccagcaagaaaggcggcatccgtctgtgccctgtgcctttccagggagccaggcgccatgggcttctggtccaagctgtgttgactgtcatccccaccccacccctacctcacgcctgccccaccccctgcctcttttggttgttgttcttaatctcctctccatgtagttcccagtgggcaagagcctttgaaaatgcaggattctaaacactcgtgcttgcgtttgaagcctcgcgtcactcagtcgcgtgggatgatgagtccgttgttgtctgccttggccgaaagatgaaaaaaagcctgaaccccaacccccagctggttgagagcaccctgcattctgcctcatggtgcagttagcgatcacaggccttcagaagtacaacatcagctcagcaggaacgccggctccccgaggacccaggcttgacgattcaccggggatctcctgggctgggctctccttggaagtgaggccttttattaaaaataaaagggttttgcagtttgaaaaactttaaagtccca

SEQ ID NO: 302322 - DNA, 1644 bp, Homo sapiens
ccgaacggccccaagtcctcaagggacctggtgtctctatcatgtcaccaagcccaactgtttccctagctgtaaagagtaatatcccctgcctacaatcccagcacttcgggaggctgaggtgggcggatcacttgaagtcaggagttcaagaccagcttggccaacatggcaaaaccccatctctactaaaaaatacaaaaattagctgggcgtgatggtgtacgcctgtggtcctcagcctcccaaggagcgaggaccacaggtgtgtaccactacaccccgctaatttcacttttacaatgttctacagcagacagagctaatctgtggtggttgcctctggggctgtgggcaggagttacttggggaggagcaggagggattttctgttgttatgaaaatattctttacagtgagagtggtttgagatacgcaggtgcagcatttgtcaaaactctgcatgtgtactttaaatttgtgcatttcatggcatgtaccttttaactccaaggaaataaaagaactataaataaatactgaactctaattagtgatgtgtgtgattagagggaaaagtactgatgtctgcaacttactttgaaatgtgttaaaaaaagatgatatggtagactgaatagtagtaccaaaaatgtctatattccaatacctggaaactgagaatatgttctcttatgtggtcaaagggaatttgcaggtgtgattaagttaagaaccttgagatggaattagcctgggttatttgggtgggcccagcgtgattaccagggtccttatgagaaggaggcaggagggtcagagtcagagagaagtgacgatggaggtggaagttgcaatgatgtggggccaggagccaaggaatgtgagcagcctctgaaagctgcaaaagccaggaaattgatttcctcctggagcttctagagggaatgcagccctgctgacaccttgattttagccagtgagacccattttggagtcctggcatccggaaccacaagatagaaatttgtgtcgtatggaggccgggcgcggtggctcacgcctgtaatcccagcactttgggaggccgaggtggacggatcatgaggtcaggagatcgagaccacggtgaaaccccgtctctactaaaaatacaaaaaattagccgggcgtggtggcaggcgcctgtagtcccagctactcgagaggctgaggcaggagaatggtgtgaacccggaaggcagagcttgcagtgagccgagatcacgccactgcactccagcctgggcgacagagcaagactctgtctcaaaaaataaaaaaaaaaagaaagaaatttgtgtcgtatgaagtcccacagtttgtgggaattatttccagctgcaattggaaatgaatgctgatggattgctggatagatagagggatggacggatgtggaataaaacaagtatagacaaaggtgggtggtggactgtaggctgtgggtatacaagtgttcacttcaaactttacttggctgggagtgggggcccatgcctgtaatctcagcactttgggaggccgaggcgggtggatcacttgaggtcaggagttcgagaccagtcttgccaacatggtgaaactccatctctacaaaaatac

SEQ ID NO: 302323 - DNA, 1241 bp, Homo sapiens
ctctccccggggcgaccgggcggctccacacgcgctgcgcccgccgccggccccacgcgcggcccatgtcctccgcgccgcgctcgcccaccccgcggccccgcaggatgaagaaggacgagtcgttcctgggcaagctgggcggcaccctggccaggaagcggagggcgcgcgaggatgagatctcactctgatgcccaggctgaagtgcagtggtgcagtcatagctcactgcagcctcgaactcctggcctccagtgatccttctgcctcagcctcccaaggagcgaggaccacagtgagtgacctgcaggaagaaggcaagaatgccatcaactcaccgatgtcccccgccctggcggatgttcaccctgaagacacccagctcgaggagaacgaggagcgcacgatgattgaccccacttccaaggaagaccccaagttcaaggaactggtcaaggtcctcctcgactggattaatgacgtgctggtggaggagaggatcattgtgaagcagctggaggaagacctgtatgacggccaggtgctgcagaagctcttggaaaaactggcagggtgcaagctgaatgtggctgaggtgacacagtccgaaatagggcagaaacagaagctgcagacggtgctggaagcagtacatgacctgctgcggccccgaggctgggcgctccggtggagcgtggactcaattcacgggaagaacctggtggccatcctccacctgctggtctctctggccatgcacttcagggcccccatccgccttcctgagcatgtaacggtgcaggtggtggtcgtgcggaaacgggaaggcctgctgcattccagccacatctcggaggagctgaccacaactacagagatgatgatgggccggtggtggtctgccttttccagtccacagattcagatgttaatctcctttggcaacaccctcacagacacacccaggaaccacgccttgcacccttcaatccaatcaagctgacagtattaaccatcacgcctgtggagaggggaagtggctcagatcctgcggggcttgaattgagaagatgcagccagcgtgtcccccctaggctttctttactagaccttaagctgtgctgggaacattcacaggccttctctgttttttgtttgtttgtttgtttgtttttaaggagaattccagctcttttaaattgtctctattattaaaaaacaaatgcaggaagagaaag

SEQ ID NO: 302324 - DNA, 701 bp, Homo sapiens
ctctccccggggcgaccgggcggctccacacgcgctgcgcccgccgccggccccacgcgcggcccatgtcctccgcgccgcgctcgcccaccccgcggccccgcaggatgaagaaggacgagtcgttcctgggcaagctgggcggcaccctggccaggaagcggagggcgcgcgaggtgagtgacctgcaggaagaaggcaagaatgccatcaactcaccgatgtcccccgccctggcggatgttcaccctgaagacacccagctcgaggagaacgaggagcgcacgatgattgaccccacttccaaggaagaccccaagttcaaggaactggtcaaggtaaggagctccgtcttggttggaatcttcctcttagggcgaggacttggctttggggttcagggctctcatggacaaagggagctaaacccggggctcctgaaagggatgttggtgctgcatgagaaggtgggcagacatgttggcagaggaggacggcagagaggatccagcccgaagtgccaagcgcctcccatgtgccctgctcggctggggctttaacgaccagtcttgtgaactctttgctggacagagctcggcaggaggggattttaggattaggaatgagtgctggcgtgagctagtgtagtaccttacagatggagttggaactccgtctggagcctggtggggtctagattc

SEQ ID NO: 302325 - DNA, 1896 bp, Homo sapiens
  misc_feature (2)..(2): n is a, c, g, or t
  misc_feature (5)..(5): n is a, c, g, or t
  misc_feature (7)..(7): n is a, c, g, or t
  misc_feature (9)..(9): n is a, c, g, or t
  misc_feature (250)..(250): n is a, c, g, or t
gnggncncntgcaaaggccctacactttgacgtcctccccatctccggcagctccttaaactaagaactcattttaatttctgaattctccctttttaaagaccagataaatttacctttgggacagttagatgtgcacaaatgcaccatgtgtttaaagatcaccaaagaggagagaaaaggggattccttagtccagagaacaaaaactgcaggaggctggagctgagacgtgggtgttcctgcagcnggggcctgtgctcccaggcactcatggcttctctggctggttcacttctccctggctcagacagatcaggagtggaaacatctgaatatgctcaaggaggagtgagtgacctgcaggaagaaggcaagaatgccatcaactcaccgatgtcccccgccctggcggatgttcaccctgaagacacccagctcgaggagaacgaggagcgcacgatgattgaccccacttccaaggaagaccccaagttcaaggaactggtcaaggtcctcctcgactggattaatgacgtgctggtggaggagaggatcattgtgaagcagctggaggaagacctgtatgacggccaggtgctgcagaagctcttggaaaaactggcagggtgcaagctgaatgtggctgaggtgacacagtccgaaatagggcagaaacagaagctgcagacggtgctggaagcagtacatgacctgctgcggccccgaggctgggcgctccggtggagcgtggactcaattcacgggaagaacctggtggccatcctccacctgctggtctctctggccatgcacttcagggcccccatccgccttcctgagcatgtaacggtgcaggtggtggtcgtgcggaaacgggaaggcctgctgcattccagccacatctcggaggagctgaccacaactacagagatgatgatgggccggttcgagcgggatgccttcgacacgctgttcgaccacgccccggataagctcagcgtggtgaagaagtctctcatcacttttgtgaacaagcacctgaacaagctgaatttggaggtgacggaactggagacccagtttgcagatggcgtgtacctggttctgctcatgggccttctggaagactactttgttcctctccaccacttctacctgactccggaaagcttcgatcagaaggtccacaatgtgtccttcgcctttgagctgatgctggacggaggcctcaagaaacccaaggctcgtcctgaagacgtggttaacttggacctcaaatccaccctgagggttctttacaacctgttcaccaagtacaagaacgtggagtgacgggggagctgtggatggtggcaggagtgtcccagcaagaaaggcggcatccgtctgtgccctgtgcctttccagggagccaggcgccatgggcttctggtccaagctgtgttgactgtcatccccaccccacccctacctcacgcctgccccaccccctgcctcttttggttgttgttcttaatctcctctccatgtagttcccagtgggcaagagcctttgaaaatgcaggattctaaacactcgtgcttgcgtttgaagcctcgcgtcactcagtcgcgtgggatgatgagtccgttgttgtctgccttggccgaaagatgaaaaaaagcctgaaccccaacccccagctggttgagagcaccctgcattctgcctcatggtgcagttagcgatcacaggccttcagaagtacaacatcagctcagcaggaacgccggctccccgaggacccaggcttgacgattcaccggggatctcctgggctgggctctccttggaagtgaggccttttattaaaaataaaagggttttgcagtttgaaaaactttaaagtccca

SEQ ID NO: 302326 - DNA, 1996 bp, Homo sapiens
ctctccccggggcgaccgggcggctccacacgcgctgcgcccgccgccggccccacgcgcggcccatgtcctccgcgccgcgctcgcccaccccgcggccccgcaggatgaagaaggacgagtcgttcctgggcaagctgggcggcaccctggccaggaagcggagggcgcgcgaggtgagtgacctgcaggaagaaggcaagaatgccatcaactcaccgatgtcccccgccctggcggatgttcaccctgaagacacccagctcgaggagaacgaggagcgcacgatgattgaccccacttccaaggaagaccccaagttcaaggaactggtcaaggtcctcctcgactggattaatgacgtgctggtggaggagaggatcattgtgaagcagctggaggaagacctgtatgacggccaggtgctgcagaagctcttggaaaaactggcagggtgcaagctgaatgtggctgaggtgacacagtccgaaatagggcagaaacagaagctgcagacggtgctggaagcagtacatgacctgctgcggccccgaggctgggcgctccggtggagcgtggactcaattcacgggaagaacctggtggccatcctccacctgctggtctctctggccatgcacttcagggcccccatccgccttcctgagcatgtaacggtgcaggtggtggtcgtgcggaaacgggaaggcctgctgcattccagccacatctcggaggagctgaccacaactacagagatgatgatgggccggttcgagcgggatgccttcgacacgctgttcgaccacgccccggataagctcagcgtggtgaagaagtctctcatcacttttgtgaacaagcacctgaacaagctgaatttggaggtgacggaactggagacccagtttgcagatggcgtgtacctggttctgctcatgggccttctggaagactactttgttcctctccaccacttctacctgactccggaaagcttcgatcagaaggtccacaatgtgtccttcgcctttgagctgatgctggacggaggcctcaagaaacccaaggctcgtcctgaaggactaaagcacagggtcatcccatggctgcttttggatcacagggagtcaggactccaagggcctcgagcgttacctggtccaggcccattttacagatgaaggcactgagccccaaatcacggaagtcacttagaggtcacagagcaagtgaaatgaacaaggtgtctgattcccaggaaggttcttgtccacataaagaaagtggcccaagacttccagggccccagagggagctgtcgggtccattaagtgttactggggtttttggtcccgacgtggttaacttggacctcaaatccaccctgagggttctttacaacctgttcaccaagtacaagaacgtggagtgacgggggagctgtggatggtggcaggagtgtcccagcaagaaaggcggcatccgtctgtgccctgtgcctttccagggagccaggcgccatgggcttctggtccaagctgtgttgactgtcatccccaccccacccctacctcacgcctgccccaccccctgcctcttttggttgttgttcttaatctcctctccatgtagttcccagtgggcaagagcctttgaaaatgcaggattctaaacactcgtgcttgcgtttgaagcctcgcgtcactcagtcgcgtgggatgatgagtccgttgttgtctgccttggccgaaagatgaaaaaaagcctgaaccccaacccccagctggttgagagcaccctgcattctgcctcatggtgcagttagcgatcacaggccttcagaagtacaacatcagctcagcaggaacgccggctccccgaggacccaggcttgacgattcaccggggatctcctgggctgggctctccttggaagtgaggccttttattaaaaataaaagggttttgcagtttgaaaaactttaaagtccca

SEQ ID NO: 302327 - DNA, 1428 bp, Homo sapiens
ctctccccggggcgaccgggcggctccacacgcgctgcgcccgccgccggccccacgcgcggcccatgtcctccgcgccgcgctcgcccaccccgcggccccgcaggatgaagaaggacgagtcgttcctgggcaagctgggcggcaccctggccaggaagcggagggcgcgcgaggtgagtgacctgcaggaagaaggcaagaatgccatcaactcaccgatgtcccccgccctggcggatgttcaccctgaagacacccagctcgaggagaacgaggagcgcacgatgattgaccccacttccaaggaagaccccaagttcaaggaactggtcaaggtcctcctcgactggattaatgacgtgctggtggaggagaggatcattgtgaagcagctggaggaagacctgtatgacggccaggtgctgcagaagctcttggaaaaactggcagggtgcaagctgaatgtggctgaggtgacacagtccgaaatagggcagaaacagaagctgcagacggtgctggaagcagtacatgacctgctgcggccccgaggctgggcgctccggtggagcgtggactcaattcacgggaagaacctggtggccatcctccacctgctggtctctctggccatgcacttcagggcccccatccgccttcctgagcatgtaacggtgcaggtggtggtcgtgcggaaacgggaaggcctgctgcattccagccacatctcggaggagctgaccacaactacagagatgatgatgggccggttcgagcgggatgccttcgacacgctgttcgaccacgccccggataagctcagcgtggtgaagaagtctctcatcacttttgtgaacaagcacctgaacaagctgaatttggaggtgacggaactggagacccagtttgcagatggcgtgtacctggttctgctcatgggccttctggaagactactttgttcctctccaccacttctacctgactccggaaagcttcgatcagaaggtccacaatgtgtccttcgcctttgagctgatgctggacggaggcctcaagaaacccaaggctcgtcctgaagacgtggttaacttggacctcaaatccaccctgagggttctttacaacctgttcaccaagtacaagaacgtggagtgacgggggagctgtggatggtggcaggagtgtcccagcaagaaaggcggcatccgtctgtgccctgtgcctttccagggagccaggcgccatgggcttctggtccaagctgtgttgactgtcatccccaccccacccctcctaattgataaatcaaagttggcacatcatcttttctagaagttggaacttcctggcgggagggccaagttcccaaaatgggctttagggataaacggcacaatgccaacgtctttaatttgtcaccgcc

SEQ ID NO: 302328 - DNA, 1112 bp, Homo sapiens
ctctccccggggcgaccgggcggctccacacgcgctgcgcccgccgccggccccacgcgcggcccatgtcctccgcgccgcgctcgcccaccccgcggccccgcaggatgaagaaggacgagtcgttcctgggcaagctgggcggcaccctggccaggaagcggagggcgcgcgaggtgagtgacctgcaggaagaaggcaagaatgccatcaactcaccgatgtcccccgccctggcggatgttcaccctgaagacacccagctcgaggagaacgaggagcgcacgatgattgaccccacttccaaggaagaccccaagttcaaggaactggtcaaggtcctcctcgactggattaatgacgtgctggtggaggagaggatcattgtgaagcagctggaggaagacctgtatgacggccaggtgctgcagaagctcttggaaaaactggcagggtgcaagctgaatgtggctgaggtgacacagtccgaaatagggcagaaacagaagctgcagacggtgctggaagcagtacatgacctgctgcggccccgaggctgggcgctccggtggagcgtggactcaattcacgggaagaacctggtggccatcctccacctgctggtctctctggccatgcacttcagggcccccatccgccttcctgagcatgtaacggtgcaggtggtggtcgtgcggaaacgggaaggcctgctgcattccagccacatctcggaggagctgaccacaactacagagatgatgatgggccggttcgagcgggatgccttcgacacgctgttcgaccacgccccggataagctcagcgtggtgaagaagtctctcatcacttttgtgaacaagcacctgaacaagctgaatttggaggtgacggaactggagacccagtttgcagatggcgtgtacctggttctgctcatgggccttctggaagactactttgttcctctccaccacttctacctgactccggaaagcttcgatcagaagtttgcagatggcgtgtacctggttctgctcatgggccttctggaagactactttgttcctctccaccacttctacctgagtccagaaagcttcgatcagaag

SEQ ID NO: 302329 - DNA, 1114 bp, Homo sapiens
tgcggcaggtgggtggctggatgtaatctggttcattgccggcatccctctgagtggtctttaaacacagcccagaaggcttttattttaaacctgttcagccatcattagcaggataaaagcttcaggtccacaatgtgtccttcgcctttgagctgatgctggacggaggcctcaagaaacccaaggctcgtcctgaaggactaaagcacagggtcatcccatggctgcttttggatcacagggagtcaggactccaagggcctcgagcgttacctggtccaggcccattttacagatgaaggcactgagccccaaatcacggaagtcacttagaggtcacagagcaagtgaaatgaacaaggtgtctgattcccaggaaggttcttgtccacataaagaaagtggcccaagacttccagggccccagagggagctgtcgggtccattaagtgttactggggtttttggtcccgacgtggttaacttggacctcaaatccaccctgagggttctttacaacctgttcaccaagtacaagaacgtggagtgacgggggagctgtggatggtggcaggagtgtcccagcaagaaaggcggcatccgtctgtgccctgtgcctttccagggagccaggcgccatgggcttctggtccaagctgtgttgactgtcatccccaccccacccctacctcacgcctgccccaccccctgcctcttttggttgttgttcttaatctcctctccatgtagttcccagtgggcaagagcctttgaaaatgcaggattctaaacactcgtgcttgcgtttgaagcctcgcgtcactcagtcgcgtgggatgatgagtccgttgttgtctgccttggccgaaagatgaaaaaaagcctgaaccccaacccccagctggttgagagcaccctgcattctgcctcatggtgcagttagcgatcacaggccttcagaagtacaacatcagctcagcaggaacgccggctccccgaggacccaggcttgacgattcaccggggatctcctgggctgggctctccttggaagtgaggccttttattaaaaataaaagggttttgcagtttgaaaaactttaaagtccca

SEQ ID NO: 302330 - DNA, 929 bp, Homo sapiens
ctctccccggggcgaccgggcggctccacacgcgctgcgcccgccgccggccccacgcgcggcccatgtcctccgcgccgcgctcgcccaccccgcggccccgcaggatgaagaaggacgagtcgttcctgggcaagctgggcggcaccctggccaggaagcggagggcgcgcgaggtgagtgacctgcaggaagaaggcaagaatgccatcaactcaccgatgtcccccgccctggcggatgttcaccctgaagacacccagctcgaggagaacgaggagcgcacgatgattgaccccacttccaaggaagaccccaagttcaaggaactggtcaaggtcctcctcgactggattaatgacgtgctggtggaggagaggatcattgtgaagcagctggaggaagacctgtatgacggccaggtgctgcagaagctcttggaaaaactggcagggtgcaagctgaatgtggctgaggtgacacagtccgaaatagggcagaaacagaagctgcagacggtgctggaagcagtacatgacctgctgcggccccgaggctgggcgctccggtggagcgtggactcaattcacgggaagaacctggtggccatcctccacctgctggtctctctggccatgcacttcagggcccccatccgccttcctgagcatgtaacggtgcaggtggtggtcgtgcggaaacgggaaggcctgctgcattccagccacatctcggaggagctgaccacaactacagagatgatgatgggccggtgaaggcagtgcatggaaaggatctgtgcactcactcactgggaatctttgaggagaagctgctcaccactcccgtctcccccattgcttccgctgccgcctgcctgagatcagggcctggcctcgtggttctccaggatcctttagttccacaag

SEQ ID NO: 302331 - DNA, 514 bp, Homo sapiens
  misc_feature (2)..(2): n is a, c, g, or t
  misc_feature (5)..(5): n is a, c, g, or t
  misc_feature (7)..(7): n is a, c, g, or t
  misc_feature (9)..(9): n is a, c, g, or t
  misc_feature (250)..(250): n is a, c, g, or t
gnggncncntgcaaaggccctacactttgacgtcctccccatctccggcagctccttaaactaagaactcattttaatttctgaattctccctttttaaagaccagataaatttacctttgggacagttagatgtgcacaaatgcaccatgtgtttaaagatcaccaaagaggagagaaaaggggattccttagtccagagaacaaaaactgcaggaggctggagctgagacgtgggtgttcctgcagcnggggcctgtgctcccaggcactcatggcttctctggctggttcacttctccctggctcagacagatcaggagtggaaacatctgaatatgctcaaggaggaggtaagttttgggggaaaaactgtcagaaagtggatgagggctgggtgcagtggctcatgcctgtaaccctagcactttgggaggctgaggagggaggattgttgcttgagcccaggaatttgagactactctgcacaacatagtgaaaacccatctatatga

SEQ ID NO: 302332 - DNA, 235 bp, Homo sapiens
gcctctgaagtttctctgtttccttctgcagacgtggttaacttggacctcaaatccaccctgagggttctttacaacctgttcaccaagtacaagaacgtggagtgacgggggagctgtggatggtggcaggagtgtcccagcaagaaaggcggcatccgtctgtgccctgtgcctttccagggagccaggcgccatgggcttctggtccaagctgtgttgactgtcatcccca

SEQ ID NO: 302333 - DNA, 637 bp, Homo sapiens
ccaacagagcagggcttggagaggcagggtcccagctccacaggagagcattccattccatgacttcctcagctcccagatgggcctgaacatgcttacatgcttggtttgctttactggtgcattataaggagttataaggatcttcggagataacagatgtgcaaatgtccaggaaactgcagggttgctgggggcaaaaggaatccataatgggtgaacttgctgccccggtaaactgtttccctccatgcaagctggcagtgggggggatgcaccgaggtgtgtcccaaagaaggtgtgagagtgagctgcaaactcagaacctgtttcccctccatccctcagcccttcacaatggctcccttccagccctgccccaactctgtgcacctgtgcattaccagtatactcaggagctagacagacagacagaaagaaagacccagtctgcctcctgccgcggcctcatgggtgacagcagtctctgcctgggaatgagtgtgactggcaggagggagaagaacatggctcccagcaaggcttctgcctctggtcattctgggcagttccccctgtatgttgaagggaactggccagtgagatggcaggggtggccctggtgggcacagtgttg

SEQ ID NO: 302334 - DNA, 3617 bp, Homo sapiens
gaagttgccggactggctgtgaggcggtcctgcctcgctgccttcagtccctagtgtctgggtccccgccctccagccgcctttgagtcgtgcctgggtcctcgcccttgcctcagaaccgcgaagaaaggaagctcgcgtgtttgctagaaaacctagttgggagtgcgaggcagagaacgttcagcacctttgttcctcccgaaccctcgggacagaggcagggttctgagggcagggattccccctcgtcttggccccaccgcccgggctgggcactaaactcgggccgcggcggggcgagcgaggcgggctccggagggagctgacgcctgatgatggcgcagtccaacatgtttaccgtggctgatgtgttgagtcaagatgaactgcgcaaaaagctataccagacgtttaaggatcggggtatactggatacactcaagacacaacttcgaaaccagctaattcatgagttgatgcaccctgtattgagtggagaactgcagcctcggtccatttcagtagaagggagctccctcttaataggcgcctctaactctttagtggcagatcacttacaaagatgtggctatgaatattcactttctgttttctttccagaaagtggtttggcaaaagaaaaggtatttactatgcaggatctattacaactcattaaaatcaaccctacttccagtctctacaaatcactggtttcaggatctgataaagaaaatcaaaaaggttttcttatgcattttttaaaagaattggcagaatatcatcaagctaaagagagttgtaatatggaaactcagacaagttcgacatttaacagagattctctggctgagaagcttcagcttattgatgatcagtttgcagatgcttaccctcagcgtatcaagttcgaatctttagaaataaagctaaatgagtataagagagaaatagaagagcaacttcgggcagaaatgtgtcaaaagttgaagttttttaaagataccgagatagcaaaaattaaaatggaagcaaaaaaaaagtatgaaaaggagttaaccatgttccagaatgattttgaaaaagcttgtcaagcaaaatctgaagctctcgttcttcgggaaaagagtacccttgaaagaattcacaagcaccaagagattgaaacaaaagaaatttatgctcaaaggcaacttttactaaaagatatggatttgctaagaggaagagaagcagagctgaagcaaagagttgaagcttttgaattgaaccagaagctccaggaagaaaaacataaaagcataactgaggcacttaggagacaggagcagaatataaagagttttgaggagacctatgaccgaaagctcaagaatgaacttctaaagtatcaacttgaactgaaggatgactacatcattagaactaatcgactgattgaagatgaaaggaagaataaagaaaaagctgttcatttgcaagaggagctcatagctattaattcaaaaaaggaggaactcaatcaatctgtaaatcgtgtgaaagaacttgagcttgaattagagtctgtcaaagcccagtctttggcaataacaaaacaaaaccatatgctgaatgaaaaggttaaagagatgagtgattattcactactaaaagaagagaaactggagcttctggcacaaaataaattacttaaacaacaactggaagagagtagaaatgaaaacctgcgtctcctaaaccgcctagctcagccggctcctgaacttgcagtctttcagaaagaactacggaaagccgaaaaggctatagtggttgagcatgaggagttcgaaagctgcaggcaagctctgcacaaacaactgcaagacgaaattgagcattctgcacagctgaaggcccagattctaggttacaaagcttctgtaaagagtttaactactcaggttgccgatttaaaattgcaactgaagcaaactcagacagccctagagaatgaagtgtactgcaatccaaagcagtctgtgatcgatcgttctgtcaatggattaataaatggcaatgtggtgccttgcaatggtgagataagtggggatttcttgaacaatccttttaaacaggaaaacgttctagcacgtatggttgcatcaaggatcacaaattatccaactgcatgggtggagggtagttcccctgattctgaccttgagtttgtagccaatactaaggcaagggtcaaagagcttcagcaagaggccgaacgcttggaaaaggctttcagaagttaccatcggagagtcattaaaaactctgccaaaagcccactagcagcaaagagcccaccatctctgcacttgctggaagccttcaaaaacattacttccagttccccggaaagacatatttttggagaggacagagttgtctctgagcagcctcaagtgggcacacttgaagaaaggaatgacgtcgtggaagcactgacaggcagtgcagcctcgaggctccgcgggggcacttcctccagacgcctctcttccacaccccttccaaaagcaaaaagaagcctcgaaagtgaaatgtatctggaaggtctgggcagatcacacattgcttcccccagtccttgtcctgacagaatgcccctaccatcacccactgagtctaggcacagcctctccatccctcctgtctccagccctccggagcagaaagtgggtctttatcgaagacaaactgaacttcaagacaaaagtgaattttcagatgtggacaagctagcttttaaggataatgaggagtttgaatcatcttttgaatctgcagggaacatgccaaggcagttggaaatgggcgggctttctcctgccggggatatgtctcatgtggacgctgctgcagctgctgtgcccctctcatatcagcacccaagtgtagatcagaaacaaattgaagaacaaaaggaagaagaaaaaatacgggaacagcaagtgaaagaacgaaggcagagagaagaaagaaggcagagtaacctacaagaagttttagaaagggaacgaagagaactagaaaaactgtatcaggaaaggaagatgattgaagaatcactgaagattaaaataaaaaaggaattagaaatggaaaatgaattagaaatgagtaatcaagaaataaaagacaaatctgctcacagtgaaaatcctttagagaaatacatgaaaatcatccagcaggagcaagaccaggagtcggcagataagagctcaaaaaagatggtccaagaaggctccctagtggacacgctgcaatctagtgacaaagtcgaaagtttaacaggcttttctcatgaagaactagacgactcttggtaaccatgtttgctgcccagcttctaacttacataccgtgagaagttacgtaacatttactcctttgtaaatgtttccctatcatcagacaaaactcaataaaaatgtgtgtaatccaatgtgggtttttttttccataattaattttgataccatagtgtgtgaaccaagaataatctagtcacgtgaaacctcttctccagtcatagtatttctcattcattataataaaagtaactggctttt

SEQ ID NO: 302335 - DNA, 4281 bp, Homo sapiens
  misc_feature (1574)..(1574): n is a, c, g, or t
gaagttgccggactggctgtgaggcggtcctgcctcgctgccttcagtccctagtgtctgggtccccgccctccagccgcctttgagtcgtgcctgggtcctcgcccttgcctcagaaccgcgaagaaaggaagctcgcgtgtttgctagaaaacctagttgggagtgcgaggcagagaacgttcagcacctttgttcctcccgaaccctcgggacagaggcagggttctgagggcagggattccccctcgtcttggccccaccgcccgggctgggcactaaactcgggccgcggcggggcgagcgaggcgggctccggagggagctgacgcctgatgatggcgcagtccaacatgtttaccgtggctgatgtgttgagtcaagatgaactgcgcaaaaagctataccagacgtttaaggatcggggtatactggatacactcaagacacaacttcgaaaccagctaattcatgagttgatgcaccctgtattgagtggagaactgcagcctcggtccatttcagtagaagggagctccctcttaataggcgcctctaactctttagtggcagatcacttacaaagatgtggctatgaatattcactttctgttttctttccagaaagtggtttggcaaaagaaaaggtatttactatgcaggatctattacaactcattaaaatcaaccctacttccagtctctacaaatcactggtttcaggatctgataaagaaaatcaaaaaggttttcttatgcattttttaaaagaattggcagaatatcatcaagctaaagagagttgtaatatggaaactcagacaagttcgacatttaacagagattctctggctgagaagcttcagcttattgatgatcagtttgcagatgcttaccctcagcgtatcaagttcgaatctttagaaataaagctaaatgagtataagagagaaatagaagagcaacttcgggcagaaatgtgtcaaaagttgaagttttttaaagataccgagatagcaaaaattaaaatggaagcaaaaaaaaagtatgaaaaggagttaaccatgttccagaatgattttgaaaaagcttgtcaagcaaaatctgaagctctcgttcttcgggaaaagagtacccttgaaagaattcacaagcaccaagagattgaaacaaaagaaatttatgctcaaaggcaacttttactaaaagatatggatttgctaagaggaagagaagcagagctgaagcaaagagttgaagcttttgaattgaaccagaagctccaggaagaaaaacataaaagcataactgaggcacttaggagacaggagcagaatataaagagttttgaggagacctatgaccgaaagctcaagaatgaacttctaaacttccacaggctgcatggtgtctgcctggctttgggaatcctcatatgactttggcaggtgttggagtttggaggctcttcgccacaggagtgcttctatttccttttggaaccaaaagggcagctggtaacagctgggaaagggaagtgaaactgtgaaaatgtgccttttggtattgctaanccggatataatgctcttggcagttggctctcaggactgtgcttagtccctgagcacaaaagttcttaccttggttgggggtgggcagatggtacaggtggattggaagtgaccgtctgattatcatttgggattgagtctgttgtgtgctgtgtaaatttaatttacccctttgctctttgtgtcagttgagaccaactgaaaagtgattgctttcagtaagtaaccttatgataacacgacgcttcattttgtgtgattgagttttgggacccagtttataggatcaaggaagggttttactgggcattttatgttcaggggttatatccctggctttagtattgaggactttgaagtttacaagttgtcatgtttagcaccctcaggtgctcctgtgccatagataagctcctgcactgataacagtctttccagaaaaatgcctgaggagctcatatttagtcattctgattctcaggtatcaacttgaactgaaggatgactacatcattagaactaatcgactgattgaagatgaaaggaagaataaagaaaaagctgttcatttgcaagaggagctcatagctattaattcaaaaaaggaggaactcaatcaatctgtaaatcgtgtgaaagaacttgagcttgaattagagtctgtcaaagcccagtctttggcaataacaaaacaaaaccatatgctgaatgaaaaggttaaagagatgagtgattattcactactaaaagaagagaaactggagcttctggcacaaaataaattacttaaacaacaactggaagagagtagaaatgaaaacctgcgtctcctaaaccgcctagctcagccggctcctgaacttgcagtctttcagaaagaactacggaaagccgaaaaggctatagtggttgagcatgaggagttcgaaagctgcaggcaagctctgcacaaacaactgcaagacgaaattgagcattctgcacagctgaaggcccagattctaggttacaaagcttctgtaaagagtttaactactcaggttgccgatttaaaattgcaactgaagcaaactcagacagccctagagaatgaagtgtactgcaatccaaagcagtctgtgatcgatcgttctgtcaatggattaataaatggcaatgtggtgccttgcaatggtgagataagtggggatttcttgaacaatccttttaaacaggaaaacgttctagcacgtatggttgcatcaaggatcacaaattatccaactgcatgggtggagggtagttcccctgattctgaccttgagtttgtagccaatactaaggcaagggtcaaagagcttcagcaagaggccgaacgcttggaaaaggctttcagaagttaccatcggagagtcattaaaaactctgccaaaagcccactagcagcaaagagcccaccatctctgcacttgctggaagccttcaaaaacattacttccagttccccggaaagacatatttttggagaggacagagttgtctctgagcagcctcaagtgggcacacttgaagaaaggaatgacgtcgtggaagcactgacaggcagtgcagcctcgaggctccgcgggggcacttcctccagacgcctctcttccacaccccttccaaaagcaaaaagaagcctcgaaagtgaaatgtatctggaaggtctgggcagatcacacattgcttcccccagtccttgtcctgacagaatgcccctaccatcacccactgagtctaggcacagcctctccatccctcctgtctccagccctccggagcagaaagtgggtctttatcgaagacaaactgaacttcaagacaaaagtgaattttcagatgtggacaagctagcttttaaggataatgaggagtttgaatcatcttttgaatctgcagggaacatgccaaggcagttggaaatgggcgggctttctcctgccggggatatgtctcatgtggacgctgctgcagctgctgtgcccctctcatatcagcacccaagtgtagatcagaaacaaattgaagaacaaaaggaagaagaaaaaatacgggaacagcaagtgaaagaacgaaggcagagagaagaaagaaggcagagtaacctacaagaagttttagaaagggaacgaagagaactagaaaaactgtatcaggaaaggaagatgattgaagaatcactgaagattaaaataaaaaaggaattagaaatggaaaatgaattagaaatgagtaatcaagaaataaaagacaaatctgctcacagtgaaaatcctttagagaaatacatgaaaatcatccagcaggagcaagaccaggagtcggcagataagagctcaaaaaagatggtccaagaaggctccctagtggacacgctgcaatctagtgacaaagtcgaaagtttaacaggcttttctcatgaagaactagacgactcttggtaaccatgtttgctgcccagcttctaacttacataccgtgagaagttacgtaacatttactcctttgtaaatgtttccctatcatcagacaaaactcaataaaaatgtgtgtaatccaatgtgggtttttttttccataattaattttgataccatagtgtgtgaaccaagaataatctagtcacgtgaaacctcttctccagtcatagtatttctcattcattataataaaagtaactggctttt

SEQ ID NO: 302336 - DNA, 1040 bp, Homo sapiens
gaagttgccggactggctgtgaggcggtcctgcctcgctgccttcagtccctagtgtctgggtccccgccctccagccgcctttgagtcgtgcctgggtcctcgcccttgcctcagaaccgcgaagaaaggaagctcgcgtgtttgctagaaaacctagttgggagtgcgaggcagagaacgttcagcacctttgttcctcccgaaccctcgggacagaggcagggttctgagggcagggattccccctcgtcttggccccaccgcccgggctgggcactaaactcgggccgcggcggggcgagcgaggcgggctccggagggagctgacgcctgatgatggcgcagtccaacatgtttaccgtggctgatgtgttgagtcaagatgaactgcgcaaaaagctataccagacgtttaaggatcggggtatactggatacactcaagacacaacttcgaaaccagctaattcatgagttgatgcaccctgtattgagtggagaactgcagcctcggtccatttcagtagaagggagctccctcttaataggcgcctctaactctttagtggcagatcacttacaaagatgtggctatgaatattcactttctgttttctttccagaaagtggtttggcaaaagaaaaggtatttactatgcaggatctattacaactcattaaaatcaaccctacttccagtctctacaaatcactggtttcaggatctgataaagaaaatcaaaaaggttttcttatgcattttttaaaagaattggcagaatatcatcaagctaaagagagttgtaatatggaaactcagacaagttcgacatttaacagagattctctggctgagaagcttcagcttattgatgatcagtttgcagatgcttaccctcagcgtatcaagttcgaatctttagaaataaagctaaatgagtataagagagaaatagaagagcaacttcgggcagaaatgtgtcaaaagttgaagttttttaaagataccgagatagcaaaaattaaaatggaagcaaaa

SEQ ID NO: 302337 - DNA, 1023 bp, Homo sapiens
cctgtctttagccactccccgtagtactgccaagctgctctctgtgcttgccccggtctttaccgagcttgccccgaagggattttgcttgccccaagaacgaaggcagagagaagaaagaaggcagagtaacctacaagaagttttagaaagggaacgaagagaactagaaaaactgtatcaggaaaggaagatgattgaagaatcactgaagattaaaataaaaaaggaattagaaatggaaaatgaattagaaatgagtaatcaagaaataaaagacaaatctgctcacagtgaaaatcctttagagaaatacatgaaaatcatccagcaggagcaagaccaggagtcggcagataagagctcaaaaaagatggtccaagaaggctccctagtggacacgctgcaatctagtgacaaagtcgaaagtttaacaggcttttctcatgaagaactagacgactcttggtaaccatgtttgctgcccagcttctaacttacataccgtgagaagttacgtaacatttactcctttgtaaatgtttccctatcatcagacaaaactcaataaaaatgtgtgtaatccaatgtgggtttttttttccataattaattttgataccatagtgtgtgaaccaagaataatctagtcacgtgaaacctcttctccagtcatagtatttctcattcattataataaaagtaactggcttttaacctccttatttttgtcttaaatttataaatgagtataacctatcttactgctcaactgcaggcctacattttggaagtataagctgtgttctttcctctccaaagttgggctgccacctgtaaaacaggaggtcatttttcctagcacactcctgttttgtccctgaacataaaaacagatttttctaggcattagaaatagtaagaaagatactgcctctggtctttacttctgatgtctgtggtttgtatgtatgtgtccctccaaaattcatatgttggaatttaaacccccccgtgtgatag

SEQ ID NO: 302338 - DNA, 722 bp, Homo sapiens
  misc_feature (156)..(156): n is a, c, g, or t
  misc_feature (162)..(162): n is a, c, g, or t
  misc_feature (171)..(171): n is a, c, g, or t
  misc_feature (194)..(194): n is a, c, g, or t
  misc_feature (199)..(199): n is a, c, g, or t
aaccaaaagagcaacaattgccattacgccattaaggcttgggaacttatggaaaggcgattcggtggggcctgtattgcacagctgggaaaggggattggctgcaaggcgtttaagttggtaccgcaaggttttccagtcacgccttgtaacgcnggcatnaatggtatncactcctataggcgaatgggtcngggcncccctcgaaaaaatacgggaacagcaagtgaaagaacgaaggcagagagaagaaagaaggcagagtaacctacaagaagttttagaaagggaacgaagagaactagaaaaactgtatcaggaaaggaagatgattgaagaatcactgaagattaaaataaaaaaggaattagaaatggaaaatgaattagaaatgagtaatcaagaaataaaagacaaatctgctcacagtgaaaatcctttagagaaatacatgaaaatcatccagcaggagcaagaccaggagtcggcagataagagctcaaaaaagatggtccaagaaggctccctagtggacacgctgcaatctagtgacaaagtcgaaagtttaacaggcttttctcatgaagaactagacgactcttggtaaccatgtttgctgcccagcttctaacttacataccgtgagaagttacgtaacatttactcctttgtaaatgtttccctatcatcagacaaaactcaataaaaatgtgtgtaatcca

SEQ ID NO: 302339 - DNA, 636 bp, Homo sapiens
taaacatttaggcatatcatctttgatgtgaagtacttagaagttaattagatgataaagatattttatccttttgaccttgatatgtttatagtaatttatttaacagtgtaagaaagagcttgaaatttgctttattagcatagttataatcttatttaatctgaaggatgtttcttaatttcatattcagaaacatatcctaatttatcatttaaacactgatataaaaatatgtctacttagtaacctattttttcttaaggtatttactatgcaggatctattacaactcattaaaatcaaccctacttccagtctctacaaatcactggtttcaggatctgataaagaaaatcaaaaaggtaggagccgtcatctttgtagagaacagcaacagttttctatgtactttttcctctaaaagaatgaagcaaatttttagggagaagagtaaaatttaatttgatttaaattatttgatttctgcaggtcatttcccctatatttccatttttgtaataacttttagatattcaattaaaaaaactgtagacagtatcaaaggccctacagacaggctgaaagatactgtttgtaaaaatacccactgttgggaatatttctgcaaaaaaa

SEQ ID NO: 302340 - DNA, 4589 bp, Homo sapiens
  misc_feature (1574)..(1574): n is a, c, g, or t
gaagttgccggactggctgtgaggcggtcctgcctcgctgccttcagtccctagtgtctgggtccccgccctccagccgcctttgagtcgtgcctgggtcctcgcccttgcctcagaaccgcgaagaaaggaagctcgcgtgtttgctagaaaacctagttgggagtgcgaggcagagaacgttcagcacctttgttcctcccgaaccctcgggacagaggcagggttctgagggcagggattccccctcgtcttggccccaccgcccgggctgggcactaaactcgggccgcggcggggcgagcgaggcgggctccggagggagctgacgcctgatgatggcgcagtccaacatgtttaccgtggctgatgtgttgagtcaagatgaactgcgcaaaaagctataccagacgtttaaggatcggggtatactggatacactcaagacacaacttcgaaaccagctaattcatgagttgatgcaccctgtattgagtggagaactgcagcctcggtccatttcagtagaagggagctccctcttaataggcgcctctaactctttagtggcagatcacttacaaagatgtggctatgaatattcactttctgttttctttccagaaagtggtttggcaaaagaaaaggtatttactatgcaggatctattacaactcattaaaatcaaccctacttccagtctctacaaatcactggtttcaggatctgataaagaaaatcaaaaaggttttcttatgcattttttaaaagaattggcagaatatcatcaagctaaagagagttgtaatatggaaactcagacaagttcgacatttaacagagattctctggctgagaagcttcagcttattgatgatcagtttgcagatgcttaccctcagcgtatcaagttcgaatctttagaaataaagctaaatgagtataagagagaaatagaagagcaacttcgggcagaaatgtgtcaaaagttgaagttttttaaagataccgagatagcaaaaattaaaatggaagcaaaaaaaaagtatgaaaaggagttaaccatgttccagaatgattttgaaaaagcttgtcaagcaaaatctgaagctctcgttcttcgggaaaagagtacccttgaaagaattcacaagcaccaagagattgaaacaaaagaaatttatgctcaaaggcaacttttactaaaagatatggatttgctaagaggaagagaagcagagctgaagcaaagagttgaagcttttgaattgaaccagaagctccaggaagaaaaacataaaagcataactgaggcacttaggagacaggagcagaatataaagagttttgaggagacctatgaccgaaagctcaagaatgaacttctaaacttccacaggctgcatggtgtctgcctggctttgggaatcctcatatgactttggcaggtgttggagtttggaggctcttcgccacaggagtgcttctatttccttttggaaccaaaagggcagctggtaacagctgggaaagggaagtgaaactgtgaaaatgtgccttttggtattgctaanccggatataatgctcttggcagttggctctcaggactgtgcttagtccctgagcacaaaagttcttaccttggttgggggtgggcagatggtacaggtggattggaagtgaccgtctgattatcatttgggattgagtctgttgtgtgctgtgtaaatttaatttacccctttgctctttgtgtcagttgagaccaactgaaaagtgattgctttcagtaagtaaccttatgataacacgacgcttcattttgtgtgattgagttttgggacccagtttataggatcaaggaagggttttactgggcattttatgttcaggggttatatccctggctttagtattgaggactttgaagtttacaagttgtcatgtttagcaccctcaggtgctcctgtgccatagataagctcctgcactgataacagtctttccagaaaaatgcctgaggagctcatatttagtcattctgattctcaggtatcaacttgaactgaaggatgactacatcattagaactaatcgactgattgaagatgaaaggaagaataaagaaaaagctgttcatttgcaagaggagctcatagctattaattcaaaaaaggaggaactcaatcaatctgtaaatcgtgtgaaagaacttgagcttgaattagagtctgtcaaagcccagtctttggcaataacaaaacaaaaccatatgctgaatgaaaaggttaaagagatgagtgattattcactactaaaagaagagaaactggagcttctggcacaaaataaattacttaaacaacaactggaagagagtagaaatgaaaacctgcgtctcctaaaccgcctagctcagccggctcctgaacttgcagtctttcagaaagaactacggaaagccgaaaaggctatagtggttgagcatgaggagttcgaaagctgcaggcaagctctgcacaaacaactgcaagacgaaattgagcattctgcacagctgaaggcccagattctaggttacaaagcttctgtaaagagtttaactactcaggttgccgatttaaaattgcaactgaagcaaactcagacagccctagagaatgaagtgtactgcaatccaaagcagtctgtgatcgatcgttctgtcaatggattaataaatggcaatgtggtgccttgcaatggtgagataagtggggatttcttgaacaatccttttaaacaggaaaacgttctagcacgtatggttgcatcaaggatcacaaattatccaactgcatgggtggagggtagttcccctgattctgaccttgagtttgtagccaatactaaggcaagggtcaaagagcttcagcaagaggccgaacgcttggaaaaggctttcagaagttaccatcggagagtcattaaaaactctgccaaaagcccactagcagcaaagagcccaccatctctgcacttgctggaagccttcaaaaacattacttccagttccccggaaagacatatttttggagaggacagagttgtctctgagcagcctcaagtgggcacacttgaagaaaggaatgacgtcgtggaagcactgacaggcagtgcagcctcgaggctccgcgggggcacttcctccagacgcctctcttccacaccccttccaaaagcaaaaagaagcctcgaaagtgaaatgtatctggaaggtctgggcagatcacacattgcttcccccagtccttgtcctgacagaatgcccctaccatcacccactgagtctaggcacagcctctccatccctcctgtctccagccctccggagcagaaagtgggtctttatcgaagacaaactgaacttcaagacaaaagtgaattttcagatgtggacaagctagcttttaaggataatgaggagtttgaatcatcttttgaatctgcagggaacatgccaaggcagttggaaatgggcgggctttctcctgccggggatatgtctcatgtggacgctgctgcagctgctgtgcccctctcatatcagcacccaagtgtagatcagaaacaaattgaagaacaaaaggaagaagaaaaaatacgggaacagcaagtgaaagaacgaaggcagagagaagaaagaaggcagagtaacctacaagaagttttagaaagggaacgaagagaactagaaaaactgtatcaggaaaggaagatgattgaagaatcactgaagattaaaataaaaaaggaattagaaatggaaaatgaattagaaatgagtaatcaagaaataaaagacaaatctgctcacagtgaaaatcctttagagaaatacatgaaaatcatccagcaggagcaagaccaggagtcggcagataagagctcaaaaaagatggtccaagaaggctccctagtggacacgctgcaatctagtgacaaagtcgaaagtttaacaggcttttctcatgaagaactagacgactcttggtaaccatgtttgctgcccagcttctaacttacataccgtgagaagttacgtaacatttactcctttgtaaatgtttccctatcatcagacaaaactcaataaaaatgtgtgtaatccaatgtgggtttttttttccataattaattttgataccatagtgtgtgaaccaagaataatctagtcacgtgaaacctcttctccagtcatagtatttctcattcattataataaaagtaactggcttttaacctccttatttttgtcttaaatttataaatgagtataacctatcttactgctcaactgcaggcctacattttggaagtataagctgtgttctttcctctccaaagttgggctgccacctgtaaaacaggaggtcatttttcctagcacactcctgttttgtccctgaacataaaaacagatttttctaggcattagaaatagtaagaaagatactgcctctggtctttacttctgatgtctgtggtttgtatgtatgtgtccctccaaaattcatatgttggaatttaaacccccccgtgtgatag

SEQ ID NO: 302341 - DNA, 4153 bp, Homo sapiens
  misc_feature (1574)..(1574): n is a, c, g, or t
gaagttgccggactggctgtgaggcggtcctgcctcgctgccttcagtccctagtgtctgggtccccgccctccagccgcctttgagtcgtgcctgggtcctcgcccttgcctcagaaccgcgaagaaaggaagctcgcgtgtttgctagaaaacctagttgggagtgcgaggcagagaacgttcagcacctttgttcctcccgaaccctcgggacagaggcagggttctgagggcagggattccccctcgtcttggccccaccgcccgggctgggcactaaactcgggccgcggcggggcgagcgaggcgggctccggagggagctgacgcctgatgatggcgcagtccaacatgtttaccgtggctgatgtgttgagtcaagatgaactgcgcaaaaagctataccagacgtttaaggatcggggtatactggatacactcaagacacaacttcgaaaccagctaattcatgagttgatgcaccctgtattgagtggagaactgcagcctcggtccatttcagtagaagggagctccctcttaataggcgcctctaactctttagtggcagatcacttacaaagatgtggctatgaatattcactttctgttttctttccagaaagtggtttggcaaaagaaaaggtatttactatgcaggatctattacaactcattaaaatcaaccctacttccagtctctacaaatcactggtttcaggatctgataaagaaaatcaaaaaggttttcttatgcattttttaaaagaattggcagaatatcatcaagctaaagagagttgtaatatggaaactcagacaagttcgacatttaacagagattctctggctgagaagcttcagcttattgatgatcagtttgcagatgcttaccctcagcgtatcaagttcgaatctttagaaataaagctaaatgagtataagagagaaatagaagagcaacttcgggcagaaatgtgtcaaaagttgaagttttttaaagataccgagatagcaaaaattaaaatggaagcaaaaaaaaagtatgaaaaggagttaaccatgttccagaatgattttgaaaaagcttgtcaagcaaaatctgaagctctcgttcttcgggaaaagagtacccttgaaagaattcacaagcaccaagagattgaaacaaaagaaatttatgctcaaaggcaacttttactaaaagatatggatttgctaagaggaagagaagcagagctgaagcaaagagttgaagcttttgaattgaaccagaagctccaggaagaaaaacataaaagcataactgaggcacttaggagacaggagcagaatataaagagttttgaggagacctatgaccgaaagctcaagaatgaacttctaaacttccacaggctgcatggtgtctgcctggctttgggaatcctcatatgactttggcaggtgttggagtttggaggctcttcgccacaggagtgcttctatttccttttggaaccaaaagggcagctggtaacagctgggaaagggaagtgaaactgtgaaaatgtgccttttggtattgctaanccggatataatgctcttggcagttggctctcaggactgtgcttagtccctgagcacaaaagttcttaccttggttgggggtgggcagatggtacaggtggattggaagtgaccgtctgattatcatttgggattgagtctgttgtgtgctgtgtaaatttaatttacccctttgctctttgtgtcagttgagaccaactgaaaagtgattgctttcagtaagtaaccttatgataacacgacgcttcattttgtgtgattgagttttgggacccagtttataggatcaaggaagggttttactgggcattttatgttcaggggttatatccctggctttagtattgaggactttgaagtttacaagttgtcatgtttagcaccctcaggtgctcctgtgccatagataagctcctgcactgataacagtctttccagaaaaatgcctgaggagctcatatttagtcattctgattctcaggtatcaacttgaactgaaggatgactacatcattagaactaatcgactgattgaagatgaaaggaagaataaagaaaaagctgttcatttgcaagaggagctcatagctattaattcaaaaaaggaggaactcaatcaatctgtaaatcgtgtgaaagaacttgagcttgaattagagtctgtcaaagcccagtctttggcaataacaaaacaaaaccatatgctgaatgaaaaggttaaagagatgagtgattattcactactaaaagaagagaaactggagcttctggcacaaaataaattacttaaacaacaactggaagagagtagaaatgaaaacctgcgtctcctaaaccgcctagctcagccggctcctgaacttgcagtctttcagaaagaactacggaaagccgaaaaggctatagtggttgagcatgaggagttcgaaagctgcaggcaagctctgcacaaacaactgcaagacgaaattgagcattctgcacagctgaaggcccagattctaggttacaaagcttctgtaaagagtttaactactcaggttgccgatttaaaattgcaactgaagcaaactcagacagccctagagaatgaagtgtactgcaatccaaagcagtctgtgatcgatcgttctgtcaatggattaataaatggcaatgtggtgccttgcaatggtgagataagtggggatttcttgaacaatccttttaaacaggaaaacgttctagcacgtatggttgcatcaaggatcacaaattatccaactgcatgggtggagggtagttcccctgattctgaccttgagtttgtagccaatactaaggcaagggtcaaagagcttcagcaagaggccgaacgcttggaaaaggctttcagaagttaccatcggagagtcattaaaaactctgccaaaagcccactagcagcaaagagcccaccatctctgcacttgctggaagccttcaaaaacattacttccagttccccggaaagacatatttttggagaggacagagttgtctctgagcagcctcaagtgggcacacttgaagaaaggaatgacgtcgtggaagcactgacaggcagtgcagcctcgaggctccgcgggggcacttcctccagacgcctctcttccacaccccttccaaaagcaaaaagaagcctcgaaagtgaaatgtatctggaaggtctgggcagatcacacattgcttcccccagtccttgtcctgacagaatgcccctaccatcacccactgagtctaggcacagcctctccatccctcctgtctccagccctccggagcagaaagtgggtctttatcgaagacaaactgaacttcaagacaaaagtgaattttcagatgtggacaagctagcttttaaggataatgaggagtttgaatcatcttttgaatctgcagggaacatgccaaggcagttggaaatgggcgggctttctcctgccggggatatgtctcatgtggacgctgctgcagctgctgtgcccctctcatatcagcacccaagtgtagatcagaaacaaattgaagaacaaaaggaagaagaaaaaatacgggaacagcaagtgaaagaacgaaggcagagagaagaaagaaggcagagtaacctacaagaagttttagaaagggaacgaagagaactagaaaaactgtatcaggaaaggaagatgattgaagaatcactgaagattaaaataaaaaaggaattagaaatggaaaatgaattagaaatgagtaatcaagaaataaaagacaaatctgctcacagtgaaaatcctttagagaaatacatgaaaatcatccagcaggagcaagaccaggagtcggcagataagagctcaaaaaagatggtccaagaaggctccctagtggacacgctgcaatctagtgacaaagtcgaaagtttaacaggcttttctcatgaagaactagacgactcttggtaaccatgtttgctgcccagcttctaacttacataccgtgagaagttacgtaacatttactcctttgtaaatgtttccctatcatcagacaaaactcaataaaaatgtgtgtaatcca

SEQ ID NO: 302342 - DNA, 4251 bp, Homo sapiens
  misc_feature (1236)..(1236): n is a, c, g, or t
gtgttatccctcgcgaacgtgttatccctcgcgaacgtgtatccctcgcgaacgtgttatccactataccagacgtttaaggatcggggtatactggatacactcaagacacaacttcgaaaccagctaattcatgagttgatgcaccctgtattgagtggagaactgcagcctcggtccatttcagtagaagggagctccctcttaataggcgcctctaactctttagtggcagatcacttacaaagatgtggctatgaatattcactttctgttttctttccagaaagtggtttggcaaaagaaaaggtatttactatgcaggatctattacaactcattaaaatcaaccctacttccagtctctacaaatcactggtttcaggatctgataaagaaaatcaaaaaggttttcttatgcattttttaaaagaattggcagaatatcatcaagctaaagagagttgtaatatggaaactcagacaagttcgacatttaacagagattctctggctgagaagcttcagcttattgatgatcagtttgcagatgcttaccctcagcgtatcaagttcgaatctttagaaataaagctaaatgagtataagagagaaatagaagagcaacttcgggcagaaatgtgtcaaaagttgaagttttttaaagataccgagatagcaaaaattaaaatggaagcaaaaaaaaagtatgaaaaggagttaaccatgttccagaatgattttgaaaaagcttgtcaagcaaaatctgaagctctcgttcttcgggaaaagagtacccttgaaagaattcacaagcaccaagagattgaaacaaaagaaatttatgctcaaaggcaacttttactaaaagatatggatttgctaagaggaagagaagcagagctgaagcaaagagttgaagcttttgaattgaaccagaagctccaggaagaaaaacataaaagcataactgaggcacttaggagacaggagcagaatataaagagttttgaggagacctatgaccgaaagctcaagaatgaacttctaaacttccacaggctgcatggtgtctgcctggctttgggaatcctcatatgactttggcaggtgttggagtttggaggctcttcgccacaggagtgcttctatttccttttggaaccaaaagggcagctggtaacagctgggaaagggaagtgaaactgtgaaaatgtgccttttggtattgctaanccggatataatgctcttggcagttggctctcaggactgtgcttagtccctgagcacaaaagttcttaccttggttgggggtgggcagatggtacaggtggattggaagtgaccgtctgattatcatttgggattgagtctgttgtgtgctgtgtaaatttaatttacccctttgctctttgtgtcagttgagaccaactgaaaagtgattgctttcagtaagtaaccttatgataacacgacgcttcattttgtgtgattgagttttgggacccagtttataggatcaaggaagggttttactgggcattttatgttcaggggttatatccctggctttagtattgaggactttgaagtttacaagttgtcatgtttagcaccctcaggtgctcctgtgccatagataagctcctgcactgataacagtctttccagaaaaatgcctgaggagctcatatttagtcattctgattctcaggtatcaacttgaactgaaggatgactacatcattagaactaatcgactgattgaagatgaaaggaagaataaagaaaaagctgttcatttgcaagaggagctcatagctattaattcaaaaaaggaggaactcaatcaatctgtaaatcgtgtgaaagaacttgagcttgaattagagtctgtcaaagcccagtctttggcaataacaaaacaaaaccatatgctgaatgaaaaggttaaagagatgagtgattattcactactaaaagaagagaaactggagcttctggcacaaaataaattacttaaacaacaactggaagagagtagaaatgaaaacctgcgtctcctaaaccgcctagctcagccggctcctgaacttgcagtctttcagaaagaactacggaaagccgaaaaggctatagtggttgagcatgaggagttcgaaagctgcaggcaagctctgcacaaacaactgcaagacgaaattgagcattctgcacagctgaaggcccagattctaggttacaaagcttctgtaaagagtttaactactcaggttgccgatttaaaattgcaactgaagcaaactcagacagccctagagaatgaagtgtactgcaatccaaagcagtctgtgatcgatcgttctgtcaatggattaataaatggcaatgtggtgccttgcaatggtgagataagtggggatttcttgaacaatccttttaaacaggaaaacgttctagcacgtatggttgcatcaaggatcacaaattatccaactgcatgggtggagggtagttcccctgattctgaccttgagtttgtagccaatactaaggcaagggtcaaagagcttcagcaagaggccgaacgcttggaaaaggctttcagaagttaccatcggagagtcattaaaaactctgccaaaagcccactagcagcaaagagcccaccatctctgcacttgctggaagccttcaaaaacattacttccagttccccggaaagacatatttttggagaggacagagttgtctctgagcagcctcaagtgggcacacttgaagaaaggaatgacgtcgtggaagcactgacaggcagtgcagcctcgaggctccgcgggggcacttcctccagacgcctctcttccacaccccttccaaaagcaaaaagaagcctcgaaagtgaaatgtatctggaaggtctgggcagatcacacattgcttcccccagtccttgtcctgacagaatgcccctaccatcacccactgagtctaggcacagcctctccatccctcctgtctccagccctccggagcagaaagtgggtctttatcgaagacaaactgaacttcaagacaaaagtgaattttcagatgtggacaagctagcttttaaggataatgaggagtttgaatcatcttttgaatctgcagggaacatgccaaggcagttggaaatgggcgggctttctcctgccggggatatgtctcatgtggacgctgctgcagctgctgtgcccctctcatatcagcacccaagtgtagatcagaaacaaattgaagaacaaaaggaagaagaaaaaatacgggaacagcaagtgaaagaacgaaggcagagagaagaaagaaggcagagtaacctacaagaagttttagaaagggaacgaagagaactagaaaaactgtatcaggaaaggaagatgattgaagaatcactgaagattaaaataaaaaaggaattagaaatggaaaatgaattagaaatgagtaatcaagaaataaaagacaaatctgctcacagtgaaaatcctttagagaaatacatgaaaatcatccagcaggagcaagaccaggagtcggcagataagagctcaaaaaagatggtccaagaaggctccctagtggacacgctgcaatctagtgacaaagtcgaaagtttaacaggcttttctcatgaagaactagacgactcttggtaaccatgtttgctgcccagcttctaacttacataccgtgagaagttacgtaacatttactcctttgtaaatgtttccctatcatcagacaaaactcaataaaaatgtgtgtaatccaatgtgggtttttttttccataattaattttgataccatagtgtgtgaaccaagaataatctagtcacgtgaaacctcttctccagtcatagtatttctcattcattataataaaagtaactggcttttaacctccttatttttgtcttaaatttataaatgagtataacctatcttactgctcaactgcaggcctacattttggaagtataagctgtgttctttcctctccaaagttgggctgccacctgtaaaacaggaggtcatttttcctagcacactcctgttttgtccctgaacataaaaacagatttttctaggcattagaaatagtaagaaagatactgcctctggtctttacttctgatgtctgtggtttgtatgtatgtgtccctccaaaattcatatgttggaatttaaacccccccgtgtgatag

SEQ ID NO: 302343 - DNA, 4714 bp, Homo sapiens
  misc_feature (1699)..(1699): n is a, c, g, or t
gaagttgccggactggctgtgaggcggtcctgcctcgctgccttcagtccctagtgtctgggtccccgccctccagccgcctttgagtcgtgcctgggtcctcgcccttgcctcagaaccgcgaagaaaggaagctcgcgtgtttgctagaaaacctagttgggagtgcgaggcagagaacgttcagcacctttgttcctcccgaaccctcgggacagaggcagggttctgagggcagggattccccctcgtcttggccccaccgcccgggctgggcactaaactcgggccgcggcggggcgagcgaggcgggctccggagggagctgacgcctgatgatggcgcagtccaacatgtttaccgtggctgatgtgttgagtcaagatgaactgcgcaaaaagctataccagacgtttaaggatcggggtatactggatacactcaagacacaacttcgaaaccagctaattcatgagttgatgcaccctgtattgagtggagaactgcagcctcggtccatttcagtagaagggagctccctcttaataggcgcctctaactctttagtggcagatcacttacaaagatgtggctatgaatattcactttctgttttctttccagaaagtggtttggcaaaagaaaaggtatttactatgcaggatctattacaactcattaaaatcaaccctacttccagtctctacaaatcactggtttcaggatctgataaagaaaatcaaaaagccattaagtctgtgacttaatcgccaagtctcttggtagtaatgttagcagaatataaataaattggagcacaagatattctggactgcccgcaaactagaccatctctactgaagttcagtatggttttcttatgcattttttaaaagaattggcagaatatcatcaagctaaagagagttgtaatatggaaactcagacaagttcgacatttaacagagattctctggctgagaagcttcagcttattgatgatcagtttgcagatgcttaccctcagcgtatcaagttcgaatctttagaaataaagctaaatgagtataagagagaaatagaagagcaacttcgggcagaaatgtgtcaaaagttgaagttttttaaagataccgagatagcaaaaattaaaatggaagcaaaaaaaaagtatgaaaaggagttaaccatgttccagaatgattttgaaaaagcttgtcaagcaaaatctgaagctctcgttcttcgggaaaagagtacccttgaaagaattcacaagcaccaagagattgaaacaaaagaaatttatgctcaaaggcaacttttactaaaagatatggatttgctaagaggaagagaagcagagctgaagcaaagagttgaagcttttgaattgaaccagaagctccaggaagaaaaacataaaagcataactgaggcacttaggagacaggagcagaatataaagagttttgaggagacctatgaccgaaagctcaagaatgaacttctaaacttccacaggctgcatggtgtctgcctggctttgggaatcctcatatgactttggcaggtgttggagtttggaggctcttcgccacaggagtgcttctatttccttttggaaccaaaagggcagctggtaacagctgggaaagggaagtgaaactgtgaaaatgtgccttttggtattgctaanccggatataatgctcttggcagttggctctcaggactgtgcttagtccctgagcacaaaagttcttaccttggttgggggtgggcagatggtacaggtggattggaagtgaccgtctgattatcatttgggattgagtctgttgtgtgctgtgtaaatttaatttacccctttgctctttgtgtcagttgagaccaactgaaaagtgattgctttcagtaagtaaccttatgataacacgacgcttcattttgtgtgattgagttttgggacccagtttataggatcaaggaagggttttactgggcattttatgttcaggggttatatccctggctttagtattgaggactttgaagtttacaagttgtcatgtttagcaccctcaggtgctcctgtgccatagataagctcctgcactgataacagtctttccagaaaaatgcctgaggagctcatatttagtcattctgattctcaggtatcaacttgaactgaaggatgactacatcattagaactaatcgactgattgaagatgaaaggaagaataaagaaaaagctgttcatttgcaagaggagctcatagctattaattcaaaaaaggaggaactcaatcaatctgtaaatcgtgtgaaagaacttgagcttgaattagagtctgtcaaagcccagtctttggcaataacaaaacaaaaccatatgctgaatgaaaaggttaaagagatgagtgattattcactactaaaagaagagaaactggagcttctggcacaaaataaattacttaaacaacaactggaagagagtagaaatgaaaacctgcgtctcctaaaccgcctagctcagccggctcctgaacttgcagtctttcagaaagaactacggaaagccgaaaaggctatagtggttgagcatgaggagttcgaaagctgcaggcaagctctgcacaaacaactgcaagacgaaattgagcattctgcacagctgaaggcccagattctaggttacaaagcttctgtaaagagtttaactactcaggttgccgatttaaaattgcaactgaagcaaactcagacagccctagagaatgaagtgtactgcaatccaaagcagtctgtgatcgatcgttctgtcaatggattaataaatggcaatgtggtgccttgcaatggtgagataagtggggatttcttgaacaatccttttaaacaggaaaacgttctagcacgtatggttgcatcaaggatcacaaattatccaactgcatgggtggagggtagttcccctgattctgaccttgagtttgtagccaatactaaggcaagggtcaaagagcttcagcaagaggccgaacgcttggaaaaggctttcagaagttaccatcggagagtcattaaaaactctgccaaaagcccactagcagcaaagagcccaccatctctgcacttgctggaagccttcaaaaacattacttccagttccccggaaagacatatttttggagaggacagagttgtctctgagcagcctcaagtgggcacacttgaagaaaggaatgacgtcgtggaagcactgacaggcagtgcagcctcgaggctccgcgggggcacttcctccagacgcctctcttccacaccccttccaaaagcaaaaagaagcctcgaaagtgaaatgtatctggaaggtctgggcagatcacacattgcttcccccagtccttgtcctgacagaatgcccctaccatcacccactgagtctaggcacagcctctccatccctcctgtctccagccctccggagcagaaagtgggtctttatcgaagacaaactgaacttcaagacaaaagtgaattttcagatgtggacaagctagcttttaaggataatgaggagtttgaatcatcttttgaatctgcagggaacatgccaaggcagttggaaatgggcgggctttctcctgccggggatatgtctcatgtggacgctgctgcagctgctgtgcccctctcatatcagcacccaagtgtagatcagaaacaaattgaagaacaaaaggaagaagaaaaaatacgggaacagcaagtgaaagaacgaaggcagagagaagaaagaaggcagagtaacctacaagaagttttagaaagggaacgaagagaactagaaaaactgtatcaggaaaggaagatgattgaagaatcactgaagattaaaataaaaaaggaattagaaatggaaaatgaattagaaatgagtaatcaagaaataaaagacaaatctgctcacagtgaaaatcctttagagaaatacatgaaaatcatccagcaggagcaagaccaggagtcggcagataagagctcaaaaaagatggtccaagaaggctccctagtggacacgctgcaatctagtgacaaagtcgaaagtttaacaggcttttctcatgaagaactagacgactcttggtaaccatgtttgctgcccagcttctaacttacataccgtgagaagttacgtaacatttactcctttgtaaatgtttccctatcatcagacaaaactcaataaaaatgtgtgtaatccaatgtgggtttttttttccataattaattttgataccatagtgtgtgaaccaagaataatctagtcacgtgaaacctcttctccagtcatagtatttctcattcattataataaaagtaactggcttttaacctccttatttttgtcttaaatttataaatgagtataacctatcttactgctcaactgcaggcctacattttggaagtataagctgtgttctttcctctccaaagttgggctgccacctgtaaaacaggaggtcatttttcctagcacactcctgttttgtccctgaacataaaaacagatttttctaggcattagaaatagtaagaaagatactgcctctggtctttacttctgatgtctgtggtttgtatgtatgtgtccctccaaaattcatatgttggaatttaaacccccccgtgtgatag

SEQ ID NO: 302344 - DNA, 5358 bp, Homo sapiens
  misc_feature (1574)..(1574): n is a, c, g, or t
gaagttgccggactggctgtgaggcggtcctgcctcgctgccttcagtccctagtgtctgggtccccgccctccagccgcctttgagtcgtgcctgggtcctcgcccttgcctcagaaccgcgaagaaaggaagctcgcgtgtttgctagaaaacctagttgggagtgcgaggcagagaacgttcagcacctttgttcctcccgaaccctcgggacagaggcagggttctgagggcagggattccccctcgtcttggccccaccgcccgggctgggcactaaactcgggccgcggcggggcgagcgaggcgggctccggagggagctgacgcctgatgatggcgcagtccaacatgtttaccgtggctgatgtgttgagtcaagatgaactgcgcaaaaagctataccagacgtttaaggatcggggtatactggatacactcaagacacaacttcgaaaccagctaattcatgagttgatgcaccctgtattgagtggagaactgcagcctcggtccatttcagtagaagggagctccctcttaataggcgcctctaactctttagtggcagatcacttacaaagatgtggctatgaatattcactttctgttttctttccagaaagtggtttggcaaaagaaaaggtatttactatgcaggatctattacaactcattaaaatcaaccctacttccagtctctacaaatcactggtttcaggatctgataaagaaaatcaaaaaggttttcttatgcattttttaaaagaattggcagaatatcatcaagctaaagagagttgtaatatggaaactcagacaagttcgacatttaacagagattctctggctgagaagcttcagcttattgatgatcagtttgcagatgcttaccctcagcgtatcaagttcgaatctttagaaataaagctaaatgagtataagagagaaatagaagagcaacttcgggcagaaatgtgtcaaaagttgaagttttttaaagataccgagatagcaaaaattaaaatggaagcaaaaaaaaagtatgaaaaggagttaaccatgttccagaatgattttgaaaaagcttgtcaagcaaaatctgaagctctcgttcttcgggaaaagagtacccttgaaagaattcacaagcaccaagagattgaaacaaaagaaatttatgctcaaaggcaacttttactaaaagatatggatttgctaagaggaagagaagcagagctgaagcaaagagttgaagcttttgaattgaaccagaagctccaggaagaaaaacataaaagcataactgaggcacttaggagacaggagcagaatataaagagttttgaggagacctatgaccgaaagctcaagaatgaacttctaaacttccacaggctgcatggtgtctgcctggctttgggaatcctcatatgactttggcaggtgttggagtttggaggctcttcgccacaggagtgcttctatttccttttggaaccaaaagggcagctggtaacagctgggaaagggaagtgaaactgtgaaaatgtgccttttggtattgctaanccggatataatgctcttggcagttggctctcaggactgtgcttagtccctgagcacaaaagttcttaccttggttgggggtgggcagatggtacaggtggattggaagtgaccgtctgattatcatttgggattgagtctgttgtgtgctgtgtaaatttaatttacccctttgctctttgtgtcagttgagaccaactgaaaagtgattgctttcagtaagtaaccttatgataacacgacgcttcattttgtgtgattgagttttgggacccagtttataggatcaaggaagggttttactgggcattttatgttcaggggttatatccctggctttagtattgaggactttgaagtttacaagttgtcatgtttagcaccctcaggtgctcctgtgccatagataagctcctgcactgataacagtctttccagaaaaatgcctgaggagctcatatttagtcattctgattctcaggtatcaacttgaactgaaggatgactacatcattagaactaatcgactgattgaagatgaaaggaagaataaagaaaaagctgttcatttgcaagaggagctcatagctattaattcaaaaaaggaggaactcaatcaatctgtaaatcgtgtgaaagaacttgagcttgaattagagtctgtcaaagcccagtctttggcaataacaaaacaaaaccatatgctgaatgaaaaggttaaagagatgagtgattattcactactaaaagaagagaaactggagcttctggcacaaaataaattacttaaacaacaactggaagagagtagaaatgaaaacctgcgtctcctaaaccgcctagctcagccggctcctgaacttgcagtctttcagaaagaactacggaaagccgaaaaggctatagtggttgagcatgaggagttcgaaagctgcaggcaagctctgcacaaacaactgcaagacgaaattgagcattctgcacagctgaaggcccagattctaggttacaaagcttctgtaaagagtttaactactcaggttgccgatttaaaattgcaactgaagcaaactcagacagccctagagaatgaagtgtactgcaatccaaagcagtctgtgatcgatcgttctgtcaatggattaataaatggcaatgtggtgccttgcaatggtgagataagtggggatttcttgaacaatccttttaaacaggaaaacgttctagcacgtatggttgcatcaaggatcacaaattatccaactgcatgggtggagggtagttcccctgattctgaccttgagtttgtagccaatactaaggcaagggtcaaagagcttcagcaagaggccgaacgcttggaaaaggctttcagaagttaccatcggagagtcattaaaaactctgccaaaagcccactagcagcaaagagcccaccatctctgcacttgctggaagccttcaaaaacattacttccagttccccggaaagacatatttttggagaggacagagttgtctctgagcagcctcaagtgggcacacttgaagaaaggaatgacgtcgtggaagcactgacaggcagtgcagcctcgaggctccgcgggggcacttcctccagacgcctctcttccacaccccttccaaaagcaaaaagaagcctcgaaagtgaaatgtatctggaaggtctgggcagatcacacattgcttcccccagtccttgtcctgacagaatgcccctaccatcacccactgagtctaggcacagcctctccatccctcctgtctccagccctccggagcagaaagtgggtctttatcgaagacaaactgaacttcaagacaaaagtgaattttcagatgtggacaagctagcttttaaggataatgaggagtttgaatcatcttttgaatctgcagggaacatgccaaggcagttggaaatgggcgggctttctcctgccggggatatgtctcatgtggacgctgctgcagctgctgtgcccctctcatatcagcacccaagtgtagatcagaaacaaattgaagaacaaaaggaagaagaaaaaatacgggaacagcaagtgaaagaacgaaggcagagagaagaaagaaggcagagtaacctacaagaagttttagaaagggaacgaagagaactagaaaaactgtatcaggaaagggtaataagtatgacttgattctctgaactggttgctccattgtacacctttcgtaagtacattgagctcagggaggggagtcaattggtgtacaaagtcagaggtgcggcagatgccttaaaaggcatccctgtcctctccttgtcttaaaagcagtgggaaaggctgcacagaatgtgaagcttaggagttttgtagtaaaggatagtttttgaaggtaatttttgtacattctcatctgatccttaaaacaagcctgtaaaaaaggtagactgtgctttgctgcagaactttgctttgaaaacagggtttaaagaagagactgtcagtgccagctagctgggactagaacccaagggaggagtggctgccagttcacagttgcttccaggggcacacactccctccctccttcctctatttctcttcttgccttctgtgtcccaattctagtcctagcagatggattactctgtccacttaacacacctgctaagtcttgcttgaattactctaacatatgaatgttccttggactcttggttaattcaagtccaaagcacaggacacttgccaattaataccttccttcattgagatgacatatttgtcttcctttgatgatagcaatgacttcaattttaaaaattagtcctctggcatacaggctgtacttgaaggatcgggattaatattagtgcatttttaaaacacttaaaagttttacaaatgtatttgtgtattttctgttttggtgcctgttttatagaagatgattgaagaatcactgaagattaaaataaaaaaggaattagaaatggaaaatgaattagaaatgagtaatcaagaaataaaagacaaatctgctcacagtgaaaatcctttagagaaatacatgaaaatcatccagcaggagcaagaccaggagtcggcagataagagctcaaaaaagatggtccaagaaggctccctagtggacacgctgcaatctagtgacaaagtcgaaagtttaacaggcttttctcatgaagaactagacgactcttggtaaccatgtttgctgcccagcttctaacttacataccgtgagaagttacgtaacatttactcctttgtaaatgtttccctatcatcagacaaaactcaataaaaatgtgtgtaatccaatgtgggtttttttttccataattaattttgataccatagtgtgtgaaccaagaataatctagtcacgtgaaacctcttctccagtcatagtatttctcattcattataataaaagtaactggcttttaacctccttatttttgtcttaaatttataaatgagtataacctatcttactgctcaactgcaggcctacattttggaagtataagctgtgttctttcctctccaaagttgggctgccacctgtaaaacaggaggtcatttttcctagcacactcctgttttgtccctgaacataaaaacagatttttctaggcattagaaatagtaagaaagatactgcctctggtctttacttctgatgtctgtggtttgtatgtatgtgtccctccaaaattcatatgttggaatttaaacccccccgtgtgatag

SEQ ID NO: 302345 - DNA, 4922 bp, Homo sapiens
  misc_feature (1574)..(1574): n is a, c, g, or t
gaagttgccggactggctgtgaggcggtcctgcctcgctgccttcagtccctagtgtctgggtccccgccctccagccgcctttgagtcgtgcctgggtcctcgcccttgcctcagaaccgcgaagaaaggaagctcgcgtgtttgctagaaaacctagttgggagtgcgaggcagagaacgttcagcacctttgttcctcccgaaccctcgggacagaggcagggttctgagggcagggattccccctcgtcttggccccaccgcccgggctgggcactaaactcgggccgcggcggggcgagcgaggcgggctccggagggagctgacgcctgatgatggcgcagtccaacatgtttaccgtggctgatgtgttgagtcaagatgaactgcgcaaaaagctataccagacgtttaaggatcggggtatactggatacactcaagacacaacttcgaaaccagctaattcatgagttgatgcaccctgtattgagtggagaactgcagcctcggtccatttcagtagaagggagctccctcttaataggcgcctctaactctttagtggcagatcacttacaaagatgtggctatgaatattcactttctgttttctttccagaaagtggtttggcaaaagaaaaggtatttactatgcaggatctattacaactcattaaaatcaaccctacttccagtctctacaaatcactggtttcaggatctgataaagaaaatcaaaaaggttttcttatgcattttttaaaagaattggcagaatatcatcaagctaaagagagttgtaatatggaaactcagacaagttcgacatttaacagagattctctggctgagaagcttcagcttattgatgatcagtttgcagatgcttaccctcagcgtatcaagttcgaatctttagaaataaagctaaatgagtataagagagaaatagaagagcaacttcgggcagaaatgtgtcaaaagttgaagttttttaaagataccgagatagcaaaaattaaaatggaagcaaaaaaaaagtatgaaaaggagttaaccatgttccagaatgattttgaaaaagcttgtcaagcaaaatctgaagctctcgttcttcgggaaaagagtacccttgaaagaattcacaagcaccaagagattgaaacaaaagaaatttatgctcaaaggcaacttttactaaaagatatggatttgctaagaggaagagaagcagagctgaagcaaagagttgaagcttttgaattgaaccagaagctccaggaagaaaaacataaaagcataactgaggcacttaggagacaggagcagaatataaagagttttgaggagacctatgaccgaaagctcaagaatgaacttctaaacttccacaggctgcatggtgtctgcctggctttgggaatcctcatatgactttggcaggtgttggagtttggaggctcttcgccacaggagtgcttctatttccttttggaaccaaaagggcagctggtaacagctgggaaagggaagtgaaactgtgaaaatgtgccttttggtattgctaanccggatataatgctcttggcagttggctctcaggactgtgcttagtccctgagcacaaaagttcttaccttggttgggggtgggcagatggtacaggtggattggaagtgaccgtctgattatcatttgggattgagtctgttgtgtgctgtgtaaatttaatttacccctttgctctttgtgtcagttgagaccaactgaaaagtgattgctttcagtaagtaaccttatgataacacgacgcttcattttgtgtgattgagttttgggacccagtttataggatcaaggaagggttttactgggcattttatgttcaggggttatatccctggctttagtattgaggactttgaagtttacaagttgtcatgtttagcaccctcaggtgctcctgtgccatagataagctcctgcactgataacagtctttccagaaaaatgcctgaggagctcatatttagtcattctgattctcaggtatcaacttgaactgaaggatgactacatcattagaactaatcgactgattgaagatgaaaggaagaataaagaaaaagctgttcatttgcaagaggagctcatagctattaattcaaaaaaggaggaactcaatcaatctgtaaatcgtgtgaaagaacttgagcttgaattagagtctgtcaaagcccagtctttggcaataacaaaacaaaaccatatgctgaatgaaaaggttaaagagatgagtgattattcactactaaaagaagagaaactggagcttctggcacaaaataaattacttaaacaacaactggaagagagtagaaatgaaaacctgcgtctcctaaaccgcctagctcagccggctcctgaacttgcagtctttcagaaagaactacggaaagccgaaaaggctatagtggttgagcatgaggagttcgaaagctgcaggcaagctctgcacaaacaactgcaagacgaaattgagcattctgcacagctgaaggcccagattctaggttacaaagcttctgtaaagagtttaactactcaggttgccgatttaaaattgcaactgaagcaaactcagacagccctagagaatgaagtgtactgcaatccaaagcagtctgtgatcgatcgttctgtcaatggattaataaatggcaatgtggtgccttgcaatggtgagataagtggggatttcttgaacaatccttttaaacaggaaaacgttctagcacgtatggttgcatcaaggatcacaaattatccaactgcatgggtggagggtagttcccctgattctgaccttgagtttgtagccaatactaaggcaagggtcaaagagcttcagcaagaggccgaacgcttggaaaaggctttcagaagttaccatcggagagtcattaaaaactctgccaaaagcccactagcagcaaagagcccaccatctctgcacttgctggaagccttcaaaaacattacttccagttccccggaaagacatatttttggagaggacagagttgtctctgagcagcctcaagtgggcacacttgaagaaaggaatgacgtcgtggaagcactgacaggcagtgcagcctcgaggctccgcgggggcacttcctccagacgcctctcttccacaccccttccaaaagcaaaaagaagcctcgaaagtgaaatgtatctggaaggtctgggcagatcacacattgcttcccccagtccttgtcctgacagaatgcccctaccatcacccactgagtctaggcacagcctctccatccctcctgtctccagccctccggagcagaaagtgggtctttatcgaagacaaactgaacttcaagacaaaagtgaattttcagatgtggacaagctagcttttaaggataatgaggagtttgaatcatcttttgaatctgcagggaacatgccaaggcagttggaaatgggcgggctttctcctgccggggatatgtctcatgtggacgctgctgcagctgctgtgcccctctcatatcagcacccaagtgtagatcagaaacaaattgaagaacaaaaggaagaagaaaaaatacgggaacagcaagtgaaagaacgaaggcagagagaagaaagaaggcagagtaacctacaagaagttttagaaagggaacgaagagaactagaaaaactgtatcaggaaagggtaataagtatgacttgattctctgaactggttgctccattgtacacctttcgtaagtacattgagctcagggaggggagtcaattggtgtacaaagtcagaggtgcggcagatgccttaaaaggcatccctgtcctctccttgtcttaaaagcagtgggaaaggctgcacagaatgtgaagcttaggagttttgtagtaaaggatagtttttgaaggtaatttttgtacattctcatctgatccttaaaacaagcctgtaaaaaaggtagactgtgctttgctgcagaactttgctttgaaaacagggtttaaagaagagactgtcagtgccagctagctgggactagaacccaagggaggagtggctgccagttcacagttgcttccaggggcacacactccctccctccttcctctatttctcttcttgccttctgtgtcccaattctagtcctagcagatggattactctgtccacttaacacacctgctaagtcttgcttgaattactctaacatatgaatgttccttggactcttggttaattcaagtccaaagcacaggacacttgccaattaataccttccttcattgagatgacatatttgtcttcctttgatgatagcaatgacttcaattttaaaaattagtcctctggcatacaggctgtacttgaaggatcgggattaatattagtgcatttttaaaacacttaaaagttttacaaatgtatttgtgtattttctgttttggtgcctgttttatagaagatgattgaagaatcactgaagattaaaataaaaaaggaattagaaatggaaaatgaattagaaatgagtaatcaagaaataaaagacaaatctgctcacagtgaaaatcctttagagaaatacatgaaaatcatccagcaggagcaagaccaggagtcggcagataagagctcaaaaaagatggtccaagaaggctccctagtggacacgctgcaatctagtgacaaagtcgaaagtttaacaggcttttctcatgaagaactagacgactcttggtaaccatgtttgctgcccagcttctaacttacataccgtgagaagttacgtaacatttactcctttgtaaatgtttccctatcatcagacaaaactcaataaaaatgtgtgtaatcca

SEQ ID NO: 302346 - DNA, 4478 bp, Homo sapiens
  misc_feature (1574)..(1574): n is a, c, g, or t
gaagttgccggactggctgtgaggcggtcctgcctcgctgccttcagtccctagtgtctgggtccccgccctccagccgcctttgagtcgtgcctgggtcctcgcccttgcctcagaaccgcgaagaaaggaagctcgcgtgtttgctagaaaacctagttgggagtgcgaggcagagaacgttcagcacctttgttcctcccgaaccctcgggacagaggcagggttctgagggcagggattccccctcgtcttggccccaccgcccgggctgggcactaaactcgggccgcggcggggcgagcgaggcgggctccggagggagctgacgcctgatgatggcgcagtccaacatgtttaccgtggctgatgtgttgagtcaagatgaactgcgcaaaaagctataccagacgtttaaggatcggggtatactggatacactcaagacacaacttcgaaaccagctaattcatgagttgatgcaccctgtattgagtggagaactgcagcctcggtccatttcagtagaagggagctccctcttaataggcgcctctaactctttagtggcagatcacttacaaagatgtggctatgaatattcactttctgttttctttccagaaagtggtttggcaaaagaaaaggtatttactatgcaggatctattacaactcattaaaatcaaccctacttccagtctctacaaatcactggtttcaggatctgataaagaaaatcaaaaaggttttcttatgcattttttaaaagaattggcagaatatcatcaagctaaagagagttgtaatatggaaactcagacaagttcgacatttaacagagattctctggctgagaagcttcagcttattgatgatcagtttgcagatgcttaccctcagcgtatcaagttcgaatctttagaaataaagctaaatgagtataagagagaaatagaagagcaacttcgggcagaaatgtgtcaaaagttgaagttttttaaagataccgagatagcaaaaattaaaatggaagcaaaaaaaaagtatgaaaaggagttaaccatgttccagaatgattttgaaaaagcttgtcaagcaaaatctgaagctctcgttcttcgggaaaagagtacccttgaaagaattcacaagcaccaagagattgaaacaaaagaaatttatgctcaaaggcaacttttactaaaagatatggatttgctaagaggaagagaagcagagctgaagcaaagagttgaagcttttgaattgaaccagaagctccaggaagaaaaacataaaagcataactgaggcacttaggagacaggagcagaatataaagagttttgaggagacctatgaccgaaagctcaagaatgaacttctaaacttccacaggctgcatggtgtctgcctggctttgggaatcctcatatgactttggcaggtgttggagtttggaggctcttcgccacaggagtgcttctatttccttttggaaccaaaagggcagctggtaacagctgggaaagggaagtgaaactgtgaaaatgtgccttttggtattgctaanccggatataatgctcttggcagttggctctcaggactgtgcttagtccctgagcacaaaagttcttaccttggttgggggtgggcagatggtacaggtggattggaagtgaccgtctgattatcatttgggattgagtctgttgtgtgctgtgtaaatttaatttacccctttgctctttgtgtcagttgagaccaactgaaaagtgattgctttcagtaagtaaccttatgataacacgacgcttcattttgtgtgattgagttttgggacccagtttataggatcaaggaagggttttactgggcattttatgttcaggggttatatccctggctttagtattgaggactttgaagtttacaagttgtcatgtttagcaccctcaggtgctcctgtgccatagataagctcctgcactgataacagtctttccagaaaaatgcctgaggagctcatatttagtcattctgattctcaggtatcaacttgaactgaaggatgactacatcattagaactaatcgactgattgaagatgaaaggaagaataaagaaaaagctgttcatttgcaagaggagctcatagctattaattcaaaaaaggaggaactcaatcaatctgtaaatcgtgtgaaagaacttgagcttgaattagagtctgtcaaagcccagtctttggcaataacaaaacaaaaccatatgctgaatgaaaaggttaaagagatgagtgattattcactactaaaagaagagaaactggagcttctggcacaaaataaattacttaaacaacaactggaagagagtagaaatgaaaacctgcgtctcctaaaccgcctagctcagccggctcctgaacttgcagtctttcagaaagaactacggaaagccgaaaaggctatagtggttgagcatgaggagttcgaaagctgcaggcaagctctgcacaaacaactgcaagacgaaattgagcattctgcacagctgaaggcccagattctaggttacaaagcttctgtaaagagtttaactactcaggttgccgatttaaaattgcaactgaagcaaactcagacagccctagagaatgaagtgtactgcaatccaaagcagtctgtgatcgatcgttctgtcaatggattaataaatggcaatgtggtgccttgcaatggtgagataagtggggatttcttgaacaatccttttaaacaggaaaacgttctagcacgtatggttgcatcaaggatcacaaattatccaactgcatgggtggagggtagttcccctgattctgaccttgagtttgtagccaatactaaggcaagggtcaaagagcttcagcaagaggccgaacgcttggaaaaggctttcagaagttaccatcggagagtcattaaaaactctgccaaaagcccactagcagcaaagagcccaccatctctgcacttgctggaagccttcaaaaacattacttccagttccccggaaagacatatttttggagaggacagagttgtctctgagcagcctcaagtgggcacacttgaagaaaggaatgacgtcgtggaagcactgacaggcagtgcagcctcgaggctccgcgggggcacttcctccagacgcctctcttccacaccccttccaaaagcaaaaagaagcctcgaaagtgaaatgtatctggaaggtctgggcagatcacacattgcttcccccagtccttgtcctgacagaatgcccctaccatcacccactgagtctaggcacagcctctccatccctcctgtctccagccctccggagcagaaagtgggtctttatcgaagacaaactgaacttcaagacaaaagtgaattttcagatgtggacaagctagcttttaaggataatgaggagtttgaatcatcttttgaatgtgtagatcagaaacaaattgaagaacaaaaggaagaagaaaaaatacgggaacagcaagtgaaagaacgaaggcagagagaagaaagaaggcagagtaacctacaagaagttttagaaagggaacgaagagaactagaaaaactgtatcaggaaaggaagatgattgaagaatcactgaagattaaaataaaaaaggaattagaaatggaaaatgaattagaaatgagtaatcaagaaataaaagacaaatctgctcacagtgaaaatcctttagagaaatacatgaaaatcatccagcaggagcaagaccaggagtcggcagataagagctcaaaaaagatggtccaagaaggctccctagtggacacgctgcaatctagtgacaaagtcgaaagtttaacaggcttttctcatgaagaactagacgactcttggtaaccatgtttgctgcccagcttctaacttacataccgtgagaagttacgtaacatttactcctttgtaaatgtttccctatcatcagacaaaactcaataaaaatgtgtgtaatccaatgtgggtttttttttccataattaattttgataccatagtgtgtgaaccaagaataatctagtcacgtgaaacctcttctccagtcatagtatttctcattcattataataaaagtaactggcttttaacctccttatttttgtcttaaatttataaatgagtataacctatcttactgctcaactgcaggcctacattttggaagtataagctgtgttctttcctctccaaagttgggctgccacctgtaaaacaggaggtcatttttcctagcacactcctgttttgtccctgaacataaaaacagatttttctaggcattagaaatagtaagaaagatactgcctctggtctttacttctgatgtctgtggtttgtatgtatgtgtccctccaaaattcatatgttggaatttaaacccccccgtgtgatag

SEQ ID NO: 302347 - DNA, 5304 bp, Homo sapiens
  misc_feature (1574)..(1574): n is a, c, g, or t
gaagttgccggactggctgtgaggcggtcctgcctcgctgccttcagtccctagtgtctgggtccccgccctccagccgcctttgagtcgtgcctgggtcctcgcccttgcctcagaaccgcgaagaaaggaagctcgcgtgtttgctagaaaacctagttgggagtgcgaggcagagaacgttcagcacctttgttcctcccgaaccctcgggacagaggcagggttctgagggcagggattccccctcgtcttggccccaccgcccgggctgggcactaaactcgggccgcggcggggcgagcgaggcgggctccggagggagctgacgcctgatgatggcgcagtccaacatgtttaccgtggctgatgtgttgagtcaagatgaactgcgcaaaaagctataccagacgtttaaggatcggggtatactggatacactcaagacacaacttcgaaaccagctaattcatgagttgatgcaccctgtattgagtggagaactgcagcctcggtccatttcagtagaagggagctccctcttaataggcgcctctaactctttagtggcagatcacttacaaagatgtggctatgaatattcactttctgttttctttccagaaagtggtttggcaaaagaaaaggtatttactatgcaggatctattacaactcattaaaatcaaccctacttccagtctctacaaatcactggtttcaggatctgataaagaaaatcaaaaaggttttcttatgcattttttaaaagaattggcagaatatcatcaagctaaagagagttgtaatatggaaactcagacaagttcgacatttaacagagattctctggctgagaagcttcagcttattgatgatcagtttgcagatgcttaccctcagcgtatcaagttcgaatctttagaaataaagctaaatgagtataagagagaaatagaagagcaacttcgggcagaaatgtgtcaaaagttgaagttttttaaagataccgagatagcaaaaattaaaatggaagcaaaaaaaaagtatgaaaaggagttaaccatgttccagaatgattttgaaaaagcttgtcaagcaaaatctgaagctctcgttcttcgggaaaagagtacccttgaaagaattcacaagcaccaagagattgaaacaaaagaaatttatgctcaaaggcaacttttactaaaagatatggatttgctaagaggaagagaagcagagctgaagcaaagagttgaagcttttgaattgaaccagaagctccaggaagaaaaacataaaagcataactgaggcacttaggagacaggagcagaatataaagagttttgaggagacctatgaccgaaagctcaagaatgaacttctaaacttccacaggctgcatggtgtctgcctggctttgggaatcctcatatgactttggcaggtgttggagtttggaggctcttcgccacaggagtgcttctatttccttttggaaccaaaagggcagctggtaacagctgggaaagggaagtgaaactgtgaaaatgtgccttttggtattgctaanccggatataatgctcttggcagttggctctcaggactgtgcttagtccctgagcacaaaagttcttaccttggttgggggtgggcagatggtacaggtggattggaagtgaccgtctgattatcatttgggattgagtctgttgtgtgctgtgtaaatttaatttacccctttgctctttgtgtcagttgagaccaactgaaaagtgattgctttcagtaagtaaccttatgataacacgacgcttcattttgtgtgattgagttttgggacccagtttataggatcaaggaagggttttactgggcattttatgttcaggggttatatccctggctttagtattgaggactttgaagtttacaagttgtcatgtttagcaccctcaggtgctcctgtgccatagataagctcctgcactgataacagtctttccagaaaaatgcctgaggagctcatatttagtcattctgattctcaggtatcaacttgaactgaaggatgactacatcattagaactaatcgactgattgaagatgaaaggaagaataaagaaaaagctgttcatttgcaagaggagctcatagctattaattcaaaaaaggaggaactcaatcaatctgtaaatcgtgtgaaagaacttgagcttgaattagagtctgtcaaagcccagtctttggcaataacaaaacaaaaccatatgctgaatgaaaaggttaaagagatgagtgattattcactactaaaagaagagaaactggagcttctggcacaaaataaattacttaaacaacaactggaagagagtagaaatgaaaacctgcgtctcctaaaccgcctagctcagccggctcctgaacttgcagtctttcagaaagaactacggaaagccgaaaaggctatagtggttgagcatgaggagttcgaaagctgcaggcaagctctgcacaaacaactgcaagacgaaattgagcattctgcacagctgaaggcccagattctaggttacaaagcttctgtaaagagtttaactactcaggttgccgatttaaaattgcaactgaagcaaactcagacagccctagagaatgaagtgtactgcaatccaaagcagtctgtgatcgatcgttctgtcaatggattaataaatggcaatgtggtgccttgcaatggtgagataagtggggatttcttgaacaatccttttaaacaggaaaacgttctagcacgtatggttgcatcaaggatcacaaattatccaactgcatgggtggagggtagttcccctgattctgaccttgagtttgtagccaatactaaggcaagggtcaaagagcttcagcaagaggccgaacgcttggaaaaggctttcagaagttaccatcggagagtcattaaaaactctgccaaaagcccactagcagcaaagagcccaccatctctgcacttgctggaagccttcaaaaacattacttccagttccccggaaagacatatttttggagaggacagagttgtctctgagcagcctcaagtgggcacacttgaagaaaggaatgacgtcgtggaagcactgacaggcagtgcagcctcgaggctccgcgggggcacttcctccagacgcctctcttccacaccccttccaaaagcaaaaagaagcctcgaaagtgaaatgtatctggaaggtctgggcagatcacacattgcttcccccagtccttgtcctgacagaatgcccctaccatcacccactgagtctaggcacagcctctccatccctcctgtctccagccctccggagcagaaagtgggtctttatcgaagacaaactgaacttcaagacaaaagtgaattttcagatgtggacaagctagcttttaaggataatgaggagtttgaatcatcttttgaatctgcagggaacatgccaaggcagttggaaatgggcgggctttctcctgccggggatatgtctcatgtggacgctgctgcagctgctgtgcccctctcatatcagcacccaagtgtagatcagaaacaaattgaagaacaaaaggaagaagaaaaaatacgggaacagcaagtgaaagaacgaaggcagagagaagaaagaaggcagagtaacctacaagaagttttagaaagggaacgaagagaactagaaaaactgtatcaggaaagggtaataagtatgacttgattctctgaactggttgctccattgtacacctttcgtaagtacattgagctcagggaggggagtcaattggtgtacaaagtcagaggtgcggcagatgccttaaaaggcatccctgtcctctccttgtcttaaaagcagtgggaaaggctgcacagaatgtgaagcttaggagttttgtagtaaaggatagtttttgaaggtaatttttgtacattctcatctgatccttaaaacaagcctgtaaaaaaggtagactgtgctttgctgcagaactttgctttgaaaggaggagtggctgccagttcacagttgcttccaggggcacacactccctccctccttcctctatttctcttcttgccttctgtgtcccaattctagtcctagcagatggattactctgtccacttaacacacctgctaagtcttgcttgaattactctaacatatgaatgttccttggactcttggttaattcaagtccaaagcacaggacacttgccaattaataccttccttcattgagatgacatatttgtcttcctttgatgatagcaatgacttcaattttaaaaattagtcctctggcatacaggctgtacttgaaggatcgggattaatattagtgcatttttaaaacacttaaaagttttacaaatgtatttgtgtattttctgttttggtgcctgttttatagaagatgattgaagaatcactgaagattaaaataaaaaaggaattagaaatggaaaatgaattagaaatgagtaatcaagaaataaaagacaaatctgctcacagtgaaaatcctttagagaaatacatgaaaatcatccagcaggagcaagaccaggagtcggcagataagagctcaaaaaagatggtccaagaaggctccctagtggacacgctgcaatctagtgacaaagtcgaaagtttaacaggcttttctcatgaagaactagacgactcttggtaaccatgtttgctgcccagcttctaacttacataccgtgagaagttacgtaacatttactcctttgtaaatgtttccctatcatcagacaaaactcaataaaaatgtgtgtaatccaatgtgggtttttttttccataattaattttgataccatagtgtgtgaaccaagaataatctagtcacgtgaaacctcttctccagtcatagtatttctcattcattataataaaagtaactggcttttaacctccttatttttgtcttaaatttataaatgagtataacctatcttactgctcaactgcaggcctacattttggaagtataagctgtgttctttcctctccaaagttgggctgccacctgtaaaacaggaggtcatttttcctagcacactcctgttttgtccctgaacataaaaacagatttttctaggcattagaaatagtaagaaagatactgcctctggtctttacttctgatgtctgtggtttgtatgtatgtgtccctccaaaattcatatgttggaatttaaacccccccgtgtgatag

SEQ ID NO: 302348 - DNA, 4115 bp, Homo sapiens
  misc_feature (1574)..(1574): n is a, c, g, or t
gaagttgccggactggctgtgaggcggtcctgcctcgctgccttcagtccctagtgtctgggtccccgccctccagccgcctttgagtcgtgcctgggtcctcgcccttgcctcagaaccgcgaagaaaggaagctcgcgtgtttgctagaaaacctagttgggagtgcgaggcagagaacgttcagcacctttgttcctcccgaaccctcgggacagaggcagggttctgagggcagggattccccctcgtcttggccccaccgcccgggctgggcactaaactcgggccgcggcggggcgagcgaggcgggctccggagggagctgacgcctgatgatggcgcagtccaacatgtttaccgtggctgatgtgttgagtcaagatgaactgcgcaaaaagctataccagacgtttaaggatcggggtatactggatacactcaagacacaacttcgaaaccagctaattcatgagttgatgcaccctgtattgagtggagaactgcagcctcggtccatttcagtagaagggagctccctcttaataggcgcctctaactctttagtggcagatcacttacaaagatgtggctatgaatattcactttctgttttctttccagaaagtggtttggcaaaagaaaaggtatttactatgcaggatctattacaactcattaaaatcaaccctacttccagtctctacaaatcactggtttcaggatctgataaagaaaatcaaaaaggttttcttatgcattttttaaaagaattggcagaatatcatcaagctaaagagagttgtaatatggaaactcagacaagttcgacatttaacagagattctctggctgagaagcttcagcttattgatgatcagtttgcagatgcttaccctcagcgtatcaagttcgaatctttagaaataaagctaaatgagtataagagagaaatagaagagcaacttcgggcagaaatgtgtcaaaagttgaagttttttaaagataccgagatagcaaaaattaaaatggaagcaaaaaaaaagtatgaaaaggagttaaccatgttccagaatgattttgaaaaagcttgtcaagcaaaatctgaagctctcgttcttcgggaaaagagtacccttgaaagaattcacaagcaccaagagattgaaacaaaagaaatttatgctcaaaggcaacttttactaaaagatatggatttgctaagaggaagagaagcagagctgaagcaaagagttgaagcttttgaattgaaccagaagctccaggaagaaaaacataaaagcataactgaggcacttaggagacaggagcagaatataaagagttttgaggagacctatgaccgaaagctcaagaatgaacttctaaacttccacaggctgcatggtgtctgcctggctttgggaatcctcatatgactttggcaggtgttggagtttggaggctcttcgccacaggagtgcttctatttccttttggaaccaaaagggcagctggtaacagctgggaaagggaagtgaaactgtgaaaatgtgccttttggtattgctaanccggatataatgctcttggcagttggctctcaggactgtgcttagtccctgagcacaaaagttcttaccttggttgggggtgggcagatggtacaggtggattggaagtgaccgtctgattatcatttgggattgagtctgttgtgtgctgtgtaaatttaatttacccctttgctctttgtgtcagttgagaccaactgaaaagtgattgctttcagtaagtaaccttatgataacacgacgcttcattttgtgtgattgagttttgggacccagtttataggatcaaggaagggttttactgggcattttatgttcaggggttatatccctggctttagtattgaggactttgaagtttacaagttgtcatgtttagcaccctcaggtgctcctgtgccatagataagctcctgcactgataacagtctttccagaaaaatgcctgaggagctcatatttagtcattctgattctcaggtatcaacttgaactgaaggatgactacatcattagaactaatcgactgattgaagatgaaaggaagaataaagaaaaagctgttcatttgcaagaggagctcatagctattaattcaaaaaaggaggaactcaatcaatctgtaaatcgtgtgaaagaacttgagcttgaattagagtctgtcaaagcccagtctttggcaataacaaaacaaaaccatatgctgaatgaaaaggttaaagagatgagtgattattcactactaaaagaagagaaactggagcttctggcacaaaataaattacttaaacaacaactggaagagagtagaaatgaaaacctgcgtctcctaaaccgcctagctcagccggctcctgaacttgcagtctttcagaaagaactacggaaagccgaaaaggctatagtggttgagcatgaggagttcgaaagctgcaggcaagctctgcacaaacaactgcaagacgaaattgagcattctgcacagctgaaggcccagattctaggttacaaagcttctgtaaagagtttaactactcaggttgccgatttaaaattgcaactgaagcaaactcagacagccctagagaatgaagtgtactgcaatccaaagcagtctgtgatcgatcgttctgtcaatggattaataaatggcaatgtggtgccttgcaatggtgagataagtggggatttcttgaacaatccttttaaacaggaaaacgttctagcacgtatggttgcatcaaggatcacaaattatccaactgcatgggtggagggtagttcccctgattctgaccttgagtttgtagccaatactaaggcaagggtcaaagagcttcagcaagaggccgaacgcttggaaaaggctttcagaagttaccatcggagagtcattaaaaactctgccaaaagcccactagcagcaaagagcccaccatctctgcacttgctggaagccttcaaaaacattacttccagttccccggaaagacatatttttggagaggacagagttgtctctgagcagcctcaagtgggcacacttgaagaaaggaatgacgtcgtggaagcactgacaggcagtgcagcctcgaggctccgcgggggcacttcctccagacgcctctcttccacaccccttccaaaagcaaaaagaagcctcgaaagtgaaatgtatctggaaggtctgggcagatcacacattgcttcccccagtccttgtcctgacagaatgcccctaccatcacccactgagtctaggcacagcctctccatccctcctgtctccagccctccggagcagaaagtgggtctttatcgaagacaaactgaacttcaagacaaaagtgaattttcagatgtggacaagctagcttttaaggataatgaggagtttgaatcatcttttgaatctgcagggaacatgccaaggcagttggaaatgggcgggctttctcctgccggggatatgtctcatgtggacgctgctgcagctgctgtgcccctctcatatcagcacccaagtgtagatcagaaacaaattgaagaacaaaaggaagaagaaaaaatacgggaacagcaagtgaaagaacgaaggcagagagaagaaagaaggcagagtaacctacaagaagttttagaaagggaacgaagagaactagaaaaactgtatcaggaaaggaagatgattgaagaatcactgaagattaaaataaaaaaggaattagaaatggaaaatgaattagaaatgagtaatcaagaaataaaagacaaatctgctcacagtgaaaatcctttagagaaatacatgaaaatcatccagcaggagcaagaccaggagtcggcagataagagctcaaaaaagatggtccaagaaggctcctttaacaggcttttctcatgaagaactagacgactcttggtaaccatgtttgctgcccagcttctaacttacataccgtgagaagttacgtaacatttactcctttgtaaatgtttccctatcatcagacaaaactcaataaaaatgtgtgtaatcca

SEQ ID NO: 302349 - DNA, 4297 bp, Homo sapiens
  misc_feature (1282)..(1282): n is a, c, g, or t
tcacatgtgtgttcctgagtttcacaggattcagggatggggatctatctagatatcgaccgaggaatgtcaaggactgggactaggtccgtggtttgactagacgtcgggattgggtggagaactgcagcctcggtccatttcagtagaagggagctccctcttaataggcgcctctaactctttagtggcagatcacttacaaagatgtggctatgaatattcactttctgttttctttccagaaagtggtttggcaaaagaaaaggtatttactatgcaggatctattacaactcattaaaatcaaccctacttccagtctctacaaatcactggtaagatggcttagtttctgtaatctactttggtttgttaattataactgaatagctgaataaaagtgaaatattttcttttaacaggtttcaggatctgataaagaaaatcaaaaaggttttcttatgcattttttaaaagaattggcagaatatcatcaagctaaagagagttgtaatatggaaactcagacaagttcgacatttaacagagattctctggctgagaagcttcagcttattgatgatcagtttgcagatgcttaccctcagcgtatcaagttcgaatctttagaaataaagctaaatgagtataagagagaaatagaagagcaacttcgggcagaaatgtgtcaaaagttgaagttttttaaagataccgagatagcaaaaattaaaatggaagcaaaaaaaaagtatgaaaaggagttaaccatgttccagaatgattttgaaaaagcttgtcaagcaaaatctgaagctctcgttcttcgggaaaagagtacccttgaaagaattcacaagcaccaagagattgaaacaaaagaaatttatgctcaaaggcaacttttactaaaagatatggatttgctaagaggaagagaagcagagctgaagcaaagagttgaagcttttgaattgaaccagaagctccaggaagaaaaacataaaagcataactgaggcacttaggagacaggagcagaatataaagagttttgaggagacctatgaccgaaagctcaagaatgaacttctaaacttccacaggctgcatggtgtctgcctggctttgggaatcctcatatgactttggcaggtgttggagtttggaggctcttcgccacaggagtgcttctatttccttttggaaccaaaagggcagctggtaacagctgggaaagggaagtgaaactgtgaaaatgtgccttttggtattgctaanccggatataatgctcttggcagttggctctcaggactgtgcttagtccctgagcacaaaagttcttaccttggttgggggtgggcagatggtacaggtggattggaagtgaccgtctgattatcatttgggattgagtctgttgtgtgctgtgtaaatttaatttacccctttgctctttgtgtcagttgagaccaactgaaaagtgattgctttcagtaagtaaccttatgataacacgacgcttcattttgtgtgattgagttttgggacccagtttataggatcaaggaagggttttactgggcattttatgttcaggggttatatccctggctttagtattgaggactttgaagtttacaagttgtcatgtttagcaccctcaggtgctcctgtgccatagataagctcctgcactgataacagtctttccagaaaaatgcctgaggagctcatatttagtcattctgattctcaggtatcaacttgaactgaaggatgactacatcattagaactaatcgactgattgaagatgaaaggaagaataaagaaaaagctgttcatttgcaagaggagctcatagctattaattcaaaaaaggaggaactcaatcaatctgtaaatcgtgtgaaagaacttgagcttgaattagagtctgtcaaagcccagtctttggcaataacaaaacaaaaccatatgctgaatgaaaaggttaaagagatgagtgattattcactactaaaagaagagaaactggagcttctggcacaaaataaattacttaaacaacaactggaagagagtagaaatgaaaacctgcgtctcctaaaccgcctagctcagccggctcctgaacttgcagtctttcagaaagaactacggaaagccgaaaaggctatagtggttgagcatgaggagttcgaaagctgcaggcaagctctgcacaaacaactgcaagacgaaattgagcattctgcacagctgaaggcccagattctaggttacaaagcttctgtaaagagtttaactactcaggttgccgatttaaaattgcaactgaagcaaactcagacagccctagagaatgaagtgtactgcaatccaaagcagtctgtgatcgatcgttctgtcaatggattaataaatggcaatgtggtgccttgcaatggtgagataagtggggatttcttgaacaatccttttaaacaggaaaacgttctagcacgtatggttgcatcaaggatcacaaattatccaactgcatgggtggagggtagttcccctgattctgaccttgagtttgtagccaatactaaggcaagggtcaaagagcttcagcaagaggccgaacgcttggaaaaggctttcagaagttaccatcggagagtcattaaaaactctgccaaaagcccactagcagcaaagagcccaccatctctgcacttgctggaagccttcaaaaacattacttccagttccccggaaagacatatttttggagaggacagagttgtctctgagcagcctcaagtgggcacacttgaagaaaggaatgacgtcgtggaagcactgacaggcagtgcagcctcgaggctccgcgggggcacttcctccagacgcctctcttccacaccccttccaaaagcaaaaagaagcctcgaaagtgaaatgtatctggaaggtctgggcagatcacacattgcttcccccagtccttgtcctgacagaatgcccctaccatcacccactgagtctaggcacagcctctccatccctcctgtctccagccctccggagcagaaagtgggtctttatcgaagacaaactgaacttcaagacaaaagtgaattttcagatgtggacaagctagcttttaaggataatgaggagtttgaatcatcttttgaatctgcagggaacatgccaaggcagttggaaatgggcgggctttctcctgccggggatatgtctcatgtggacgctgctgcagctgctgtgcccctctcatatcagcacccaagtgtagatcagaaacaaattgaagaacaaaaggaagaagaaaaaatacgggaacagcaagtgaaagaacgaaggcagagagaagaaagaaggcagagtaacctacaagaagttttagaaagggaacgaagagaactagaaaaactgtatcaggaaaggaagatgattgaagaatcactgaagattaaaataaaaaaggaattagaaatggaaaatgaattagaaatgagtaatcaagaaataaaagacaaatctgctcacagtgaaaatcctttagagaaatacatgaaaatcatccagcaggagcaagaccaggagtcggcagataagagctcaaaaaagatggtccaagaaggctccctagtggacacgctgcaatctagtgacaaagtcgaaagtttaacaggcttttctcatgaagaactagacgactcttggtaaccatgtttgctgcccagcttctaacttacataccgtgagaagttacgtaacatttactcctttgtaaatgtttccctatcatcagacaaaactcaataaaaatgtgtgtaatccaatgtgggtttttttttccataattaattttgataccatagtgtgtgaaccaagaataatctagtcacgtgaaacctcttctccagtcatagtatttctcattcattataataaaagtaactggcttttaacctccttatttttgtcttaaatttataaatgagtataacctatcttactgctcaactgcaggcctacattttggaagtataagctgtgttctttcctctccaaagttgggctgccacctgtaaaacaggaggtcatttttcctagcacactcctgttttgtccctgaacataaaaacagatttttctaggcattagaaatagtaagaaagatactgcctctggtctttacttctgatgtctgtggtttgtatgtatgtgtccctccaaaattcatatgttggaatttaaacccccccgtgtgatag

SEQ ID NO: 302350 - DNA, 3395 bp, Homo sapiens
  misc_feature (380)..(380): n is a, c, g, or t
tctatatccagtcccactaccagctggaactgcagtgctgcatcgactggacccatgtcactgacccccttcataggaaccagaagctccaggaagaaaaacataaaagcataactgaggcacttaggagacaggagcagaatataaagagttttgaggagacctatgaccgaaagctcaagaatgaacttctaaacttccacaggctgcatggtgtctgcctggctttgggaatcctcatatgactttggcaggtgttggagtttggaggctcttcgccacaggagtgcttctatttccttttggaaccaaaagggcagctggtaacagctgggaaagggaagtgaaactgtgaaaatgtgccttttggtattgctaanccggatataatgctcttggcagttggctctcaggactgtgcttagtccctgagcacaaaagttcttaccttggttgggggtgggcagatggtacaggtggattggaagtgaccgtctgattatcatttgggattgagtctgttgtgtgctgtgtaaatttaatttacccctttgctctttgtgtcagttgagaccaactgaaaagtgattgctttcagtaagtaaccttatgataacacgacgcttcattttgtgtgattgagttttgggacccagtttataggatcaaggaagggttttactgggcattttatgttcaggggttatatccctggctttagtattgaggactttgaagtttacaagttgtcatgtttagcaccctcaggtgctcctgtgccatagataagctcctgcactgataacagtctttccagaaaaatgcctgaggagctcatatttagtcattctgattctcaggtatcaacttgaactgaaggatgactacatcattagaactaatcgactgattgaagatgaaaggaagaataaagaaaaagctgttcatttgcaagaggagctcatagctattaattcaaaaaaggaggaactcaatcaatctgtaaatcgtgtgaaagaacttgagcttgaattagagtctgtcaaagcccagtctttggcaataacaaaacaaaaccatatgctgaatgaaaaggttaaagagatgagtgattattcactactaaaagaagagaaactggagcttctggcacaaaataaattacttaaacaacaactggaagagagtagaaatgaaaacctgcgtctcctaaaccgcctagctcagccggctcctgaacttgcagtctttcagaaagaactacggaaagccgaaaaggctatagtggttgagcatgaggagttcgaaagctgcaggcaagctctgcacaaacaactgcaagacgaaattgagcattctgcacagctgaaggcccagattctaggttacaaagcttctgtaaagagtttaactactcaggttgccgatttaaaattgcaactgaagcaaactcagacagccctagagaatgaagtgtactgcaatccaaagcagtctgtgatcgatcgttctgtcaatggattaataaatggcaatgtggtgccttgcaatggtgagataagtggggatttcttgaacaatccttttaaacaggaaaacgttctagcacgtatggttgcatcaaggatcacaaattatccaactgcatgggtggagggtagttcccctgattctgaccttgagtttgtagccaatactaaggcaagggtcaaagagcttcagcaagaggccgaacgcttggaaaaggctttcagaagttaccatcggagagtcattaaaaactctgccaaaagcccactagcagcaaagagcccaccatctctgcacttgctggaagccttcaaaaacattacttccagttccccggaaagacatatttttggagaggacagagttgtctctgagcagcctcaagtgggcacacttgaagaaaggaatgacgtcgtggaagcactgacaggcagtgcagcctcgaggctccgcgggggcacttcctccagacgcctctcttccacaccccttccaaaagcaaaaagaagcctcgaaagtgaaatgtatctggaaggtctgggcagatcacacattgcttcccccagtccttgtcctgacagaatgcccctaccatcacccactgagtctaggcacagcctctccatccctcctgtctccagccctccggagcagaaagtgggtctttatcgaagacaaactgaacttcaagacaaaagtgaattttcagatgtggacaagctagcttttaaggataatgaggagtttgaatcatcttttgaatctgcagggaacatgccaaggcagttggaaatgggcgggctttctcctgccggggatatgtctcatgtggacgctgctgcagctgctgtgcccctctcatatcagcacccaagtgtagatcagaaacaaattgaagaacaaaaggaagaagaaaaaatacgggaacagcaagtgaaagaacgaaggcagagagaagaaagaaggcagagtaacctacaagaagttttagaaagggaacgaagagaactagaaaaactgtatcaggaaaggaagatgattgaagaatcactgaagattaaaataaaaaaggaattagaaatggaaaatgaattagaaatgagtaatcaagaaataaaagacaaatctgctcacagtgaaaatcctttagagaaatacatgaaaatcatccagcaggagcaagaccaggagtcggcagataagagctcaaaaaagatggtccaagaaggctccctagtggacacgctgcaatctagtgacaaagtcgaaagtttaacaggcttttctcatgaagaactagacgactcttggtaaccatgtttgctgcccagcttctaacttacataccgtgagaagttacgtaacatttactcctttgtaaatgtttccctatcatcagacaaaactcaataaaaatgtgtgtaatccaatgtgggtttttttttccataattaattttgataccatagtgtgtgaaccaagaataatctagtcacgtgaaacctcttctccagtcatagtatttctcattcattataataaaagtaactggcttttaacctccttatttttgtcttaaatttataaatgagtataacctatcttactgctcaactgcaggcctacattttggaagtataagctgtgttctttcctctccaaagttgggctgccacctgtaaaacaggaggtcatttttcctagcacactcctgttttgtccctgaacataaaaacagatttttctaggcattagaaatagtaagaaagatactgcctctggtctttacttctgatgtctgtggtttgtatgtatgtgtccctccaaaattcatatgttggaatttaaacccccccgtgtgatag

SEQ ID NO: 302351 - DNA, 1600 bp, Homo sapiens
  misc_feature (12)..(12): n is a, c, g, or t
tgcttgaggatncccaaaagccatctctgcacttgctggaagccttcaaaaacattacttccagttccccggaaagacatatttttggagaggacagagttgtctctgagcagcctcaagtgggcacacttgaagaaaggaatgacgtcgtggaagcactgacaggcagtgcagcctcgaggctccgcgggggcacttcctccagacgcctctcttccacaccccttccaaaagcaaaaagaagcctcgaaagtgaaatgtatctggaaggtctgggcagatcacacattgcttcccccagtccttgtcctgacagaatgcccctaccatcacccactgagtctaggcacagcctctccatccctcctgtctccagccctccggagcagaaagtgggtctttatcgaagacaaactgaacttcaagacaaaagtgaattttcagatgtggacaagctagcttttaaggataatgaggagtttgaatcatcttttgaatctgcagggaacatgccaaggcagttggaaatgggcgggctttctcctgccggggatatgtctcatgtggacgctgctgcagctgctgtgcccctctcatatcagcacccaagtgtagatcagaaacaaattgaagaacaaaaggaagaagaaaaaatacgggaacagcaagtgaaagaacgaaggcagagagaagaaagaaggcagagtaacctacaagaagttttagaaagggaacgaagagaactagaaaaactgtatcaggaaaggaagatgattgaagaatcactgaagattaaaataaaaaaggaattagaaatggaaaatgaattagaaatgagtaatcaagaaataaaagacaaatctgctcacagtgaaaatcctttagagaaatacatgaaaatcatccagcaggagcaagaccaggagtcggcagataagagctcaaaaaagatggtccaagaaggctccctagtggacacgctgcaatctagtgacaaagtcgaaagtttaacaggcttttctcatgaagaactagacgactcttggtaaccatgtttgctgcccagcttctaacttacataccgtgagaagttacgtaacatttactcctttgtaaatgtttccctatcatcagacaaaactcaataaaaatgtgtgtaatccaatgtgggtttttttttccataattaattttgataccatagtgtgtgaaccaagaataatctagtcacgtgaaacctcttctccagtcatagtatttctcattcattataataaaagtaactggcttttaacctccttatttttgtcttaaatttataaatgagtataacctatcttactgctcaactgcaggcctacattttggaagtataagctgtgttctttcctctccaaagttgggctgccacctgtaaaacaggaggtcatttttcctagcacactcctgttttgtccctgaacataaaaacagatttttctaggcattagaaatagtaagaaagatactgcctctggtctttacttctgatgtctgtggtttgtatgtatgtgtccctccaaaattcatatgttggaatttaaacccccccgtgtgatag

SEQ ID NO: 302352 - DNA, 1470 bp, Homo sapiens
gggtctcagcgtgttagccaggatgatctcgatctcctgacctcgtgatccgcccgcctcggcctcccaaagtgctgggattacaggcgtgagccaccacgcccgacccatttcaatgtatttctaggaaattgctgtaacaagaagttgaagttttggtggaaatttcaagtagattcctgggaggaaaccagggttagatagttgatgttgaccagatacccaatgtgtggctactgtctccagccctccggagcagaaagtgggtctttatcgaagacaaactgaacttcaagacaaaagtgaattttcagatgtggacaagctagcttttaaggataatgaggagtttgaatcatcttttgaatctgcagggaacatgccaaggcagttggaaatgggcgggctttctcctgccggggatatgtctcatgtggacgctgctgcagctgctgtgcccctctcatatcagcacccaagtgtagatcagaaacaaattgaagaacaaaaggaagaagaaaaaatacgggaacagcaagtgaaagaacgaaggcagagagaagaaagaaggcagagtaacctacaagaagttttagaaagggaacgaagagaactagaaaaactgtatcaggaaaggaagatgattgaagaatcactgaagattaaaataaaaaaggaattagaaatggaaaatgaattagaaatgagtaatcaagaaataaaagacaaatctgctcacagtgaaaatcctttagagaaatacatgaaaatcatccagcaggagcaagaccaggagtcggcagataagagctcaaaaaagatggtccaagaaggctccctagtggacacgctgcaatctagtgacaaagtcgaaagtttaacaggcttttctcatgaagaactagacgactcttggtaaccatgtttgctgcccagcttctaacttacataccgtgagaagttacgtaacatttactcctttgtaaatgtttccctatcatcagacaaaactcaataaaaatgtgtgtaatccaatgtgggtttttttttccataattaattttgataccatagtgtgtgaaccaagaataatctagtcacgtgaaacctcttctccagtcatagtatttctcattcattataataaaagtaactggcttttaacctccttatttttgtcttaaatttataaatgagtataacctatcttactgctcaactgcaggcctacattttggaagtataagctgtgttctttcctctccaaagttgggctgccacctgtaaaacaggaggtcatttttcctagcacactcctgttttgtccctgaacataaaaacagatttttctaggcattagaaatagtaagaaagatactgcctctggtctttacttctgatgtctgtggtttgtatgtatgtgtccctccaaaattcatatgttggaatttaaacccccccgtgtgatag

SEQ ID NO: 302353 - DNA, 1435 bp, Homo sapiens
catggctcagaacctcagggatgcgggccctgtgccctgctcctccaagggcctggaccatcccctactacaaggctgtgtgtccctggacaagttactccccttctctgggcctctgttccctgcttccacagggtgtgctgtgctggaagaactgatgctcagattgaatttcgtggtcttggcatcagctcccccctgatctctccagccctccggagcagaaagtgggtctttatcgaagacaaactgaacttcaagacaaaagtgaattttcagatgtggacaagctagcttttaaggataatgaggagtttgaatcatcttttgaatctgcagggaacatgccaaggcagttggaaatgggcgggctttctcctgccggggatatgtctcatgtggacgctgctgcagctgctgtgcccctctcatatcagcacccaagtgtagatcagaaacaaattgaagaacaaaaggaagaagaaaaaatacgggaacagcaagtgaaagaacgaaggcagagagaagaaagaaggcagagtaacctacaagaagttttagaaagggaacgaagagaactagaaaaactgtatcaggaaaggaagatgattgaagaatcactgaagattaaaataaaaaaggaattagaaatggaaaatgaattagaaatgagtaatcaagaaataaaagacaaatctgctcacagtgaaaatcctttagagaaatacatgaaaatcatccagcaggagcaagaccaggagtcggcagataagagctcaaaaaagatggtccaagaaggctccctagtggacacgctgcaatctagtgacaaagtcgaaagtttaacaggcttttctcatgaagaactagacgactcttggtaaccatgtttgctgcccagcttctaacttacataccgtgagaagttacgtaacatttactcctttgtaaatgtttccctatcatcagacaaaactcaataaaaatgtgtgtaatccaatgtgggtttttttttccataattaattttgataccatagtgtgtgaaccaagaataatctagtcacgtgaaacctcttctccagtcatagtatttctcattcattataataaaagtaactggcttttaacctccttatttttgtcttaaatttataaatgagtataacctatcttactgctcaactgcaggcctacattttggaagtataagctgtgttctttcctctccaaagttgggctgccacctgtaaaacaggaggtcatttttcctagcacactcctgttttgtccctgaacataaaaacagatttttctaggcattagaaatagtaagaaagatactgcctctggtctttacttctgatgtctgtggtttgtatgtatgtgtccctccaaaattcatatgttggaatttaaacccccccgtgtgatag

SEQ ID NO: 302354 - DNA, 3158 bp, Homo sapiens
  misc_feature (1574)..(1574): n is a, c, g, or t
gaagttgccggactggctgtgaggcggtcctgcctcgctgccttcagtccctagtgtctgggtccccgccctccagccgcctttgagtcgtgcctgggtcctcgcccttgcctcagaaccgcgaagaaaggaagctcgcgtgtttgctagaaaacctagttgggagtgcgaggcagagaacgttcagcacctttgttcctcccgaaccctcgggacagaggcagggttctgagggcagggattccccctcgtcttggccccaccgcccgggctgggcactaaactcgggccgcggcggggcgagcgaggcgggctccggagggagctgacgcctgatgatggcgcagtccaacatgtttaccgtggctgatgtgttgagtcaagatgaactgcgcaaaaagctataccagacgtttaaggatcggggtatactggatacactcaagacacaacttcgaaaccagctaattcatgagttgatgcaccctgtattgagtggagaactgcagcctcggtccatttcagtagaagggagctccctcttaataggcgcctctaactctttagtggcagatcacttacaaagatgtggctatgaatattcactttctgttttctttccagaaagtggtttggcaaaagaaaaggtatttactatgcaggatctattacaactcattaaaatcaaccctacttccagtctctacaaatcactggtttcaggatctgataaagaaaatcaaaaaggttttcttatgcattttttaaaagaattggcagaatatcatcaagctaaagagagttgtaatatggaaactcagacaagttcgacatttaacagagattctctggctgagaagcttcagcttattgatgatcagtttgcagatgcttaccctcagcgtatcaagttcgaatctttagaaataaagctaaatgagtataagagagaaatagaagagcaacttcgggcagaaatgtgtcaaaagttgaagttttttaaagataccgagatagcaaaaattaaaatggaagcaaaaaaaaagtatgaaaaggagttaaccatgttccagaatgattttgaaaaagcttgtcaagcaaaatctgaagctctcgttcttcgggaaaagagtacccttgaaagaattcacaagcaccaagagattgaaacaaaagaaatttatgctcaaaggcaacttttactaaaagatatggatttgctaagaggaagagaagcagagctgaagcaaagagttgaagcttttgaattgaaccagaagctccaggaagaaaaacataaaagcataactgaggcacttaggagacaggagcagaatataaagagttttgaggagacctatgaccgaaagctcaagaatgaacttctaaacttccacaggctgcatggtgtctgcctggctttgggaatcctcatatgactttggcaggtgttggagtttggaggctcttcgccacaggagtgcttctatttccttttggaaccaaaagggcagctggtaacagctgggaaagggaagtgaaactgtgaaaatgtgccttttggtattgctaanccggatataatgctcttggcagttggctctcaggactgtgcttagtccctgagcacaaaagttcttaccttggttgggggtgggcagatggtacaggtggattggaagtgaccgtctgattatcatttgggattgagtctgttgtgtgctgtgtaaatttaatttacccctttgctctttgtgtcagttgagaccaactgaaaagtgattgctttcagtaagtaaccttatgataacacgacgcttcattttgtgtgattgagttttgggacccagtttataggatcaaggaagggttttactgggcattttatgttcaggggttatatccctggctttagtattgaggactttgaagtttacaagttgtcatgtttagcaccctcaggtgctcctgtgccatagataagctcctgcactgataacagtctttccagaaaaatgcctgaggagctcatatttagtcattctgattctcaggtatcaacttgaactgaaggatgactacatcattagaactaatcgactgattgaagatgaaaggaagaataaagaaaaagctgttcatttgcaagaggagctcatagctattaattcaaaaaaggaggaactcaatcaatctgtaaatcgtgtgaaagaacttgagcttgaattagagtctgtcaaagcccagtctttggcaataacaaaacaaaaccatatgctgaatgaaaaggttaaagagatgagtgattattcactactaaaagaagagaaactggagcttctggcacaaaataaattacttaaacaacaactggaagagagtagaaatgaaaacctgcgtctcctaaaccgcctagctcagccggctcctgaacttgcagtctttcagaaagaactacggaaagccgaaaaggctatagtggttgagcatgaggagttcgaaagctgcaggcaagctctgcacaaacaactgcaagacgaaattgagcattctgcacagctgaaggcccagattctaggttacaaagcttctgtaaagagtttaactactcaggttgccgatttaaaattgcaactgaagcaaactcagacagccctagagaatgaagtgtactgcaatccaaagcagtctgtgatcgatcgttctgtcaatggattaataaatggcaatgtggtgccttgcaatggtgagataagtggggatttcttgaacaatccttttaaacaggaaaacgttctagcacgtatggttgcatcaaggatcacaaattatccaactgcatgggtggagggtagttcccctgattctgaccttgagtttgtagccaatactaaggcaagggtcaaagagcttcagcaagaggccgaacgcttggaaaaggctttcagaagttaccatcggagagtcattaaaaactctgccaaaagcccactagcagcaaagagcccaccatctctgcacttgctggaagccttcaaaaacattacttccagttccccggaaagacatatttttggagaggacagagttgtctcagtgcttccacgacgtcattcctttctgccaagtgtgcccacttgaggctgctcagagtcgac

SEQ ID NO: 302355 - DNA, 1158 bp, Homo sapiens
  misc_feature (156)..(156): n is a, c, g, or t
  misc_feature (162)..(162): n is a, c, g, or t
  misc_feature (171)..(171): n is a, c, g, or t
  misc_feature (194)..(194): n is a, c, g, or t
  misc_feature (199)..(199): n is a, c, g, or t
aaccaaaagagcaacaattgccattacgccattaaggcttgggaacttatggaaaggcgattcggtggggcctgtattgcacagctgggaaaggggattggctgcaaggcgtttaagttggtaccgcaaggttttccagtcacgccttgtaacgcnggcatnaatggtatncactcctataggcgaatgggtcngggcncccctcgaaaaaatacgggaacagcaagtgaaagaacgaaggcagagagaagaaagaaggcagagtaacctacaagaagttttagaaagggaacgaagagaactagaaaaactgtatcaggaaaggaagatgattgaagaatcactgaagattaaaataaaaaaggaattagaaatggaaaatgaattagaaatgagtaatcaagaaataaaagacaaatctgctcacagtgaaaatcctttagagaaatacatgaaaatcatccagcaggagcaagaccaggagtcggcagataagagctcaaaaaagatggtccaagaaggctccctagtggacacgctgcaatctagtgacaaagtcgaaagtttaacaggcttttctcatgaagaactagacgactcttggtaaccatgtttgctgcccagcttctaacttacataccgtgagaagttacgtaacatttactcctttgtaaatgtttccctatcatcagacaaaactcaataaaaatgtgtgtaatccaatgtgggtttttttttccataattaattttgataccatagtgtgtgaaccaagaataatctagtcacgtgaaacctcttctccagtcatagtatttctcattcattataataaaagtaactggcttttaacctccttatttttgtcttaaatttataaatgagtataacctatcttactgctcaactgcaggcctacattttggaagtataagctgtgttctttcctctccaaagttgggctgccacctgtaaaacaggaggtcatttttcctagcacactcctgttttgtccctgaacataaaaacagatttttctaggcattagaaatagtaagaaagatactgcctctggtctttacttctgatgtctgtggtttgtatgtatgtgtccctccaaaattcatatgttggaatttaaacccccccgtgtgatag

SEQ ID NO: 302356 - DNA, 1359 bp, Homo sapiens
gggtctcagcgtgttagccaggatgatctcgatctcctgacctcgtgatccgcccgcctcggcctcccaaagtgctgggattacaggcgtgagccaccacgcccgacccatttcaatgtatttctaggaaattgctgtaacaagaagttgaagttttggtggaaatttcaagtagattcctgggaggaaaccagggttagatagttgatgttgaccagatacccaatgtgtggctactgtctccagccctccggagcagaaagtgggtctttatcgaagacaaactgaacttcaagacaaaagtgaattttcagatgtggacaagctagcttttaaggataatgaggagtttgaatcatcttttgaatgtgtagatcagaaacaaattgaagaacaaaaggaagaagaaaaaatacgggaacagcaagtgaaagaacgaaggcagagagaagaaagaaggcagagtaacctacaagaagttttagaaagggaacgaagagaactagaaaaactgtatcaggaaaggaagatgattgaagaatcactgaagattaaaataaaaaaggaattagaaatggaaaatgaattagaaatgagtaatcaagaaataaaagacaaatctgctcacagtgaaaatcctttagagaaatacatgaaaatcatccagcaggagcaagaccaggagtcggcagataagagctcaaaaaagatggtccaagaaggctccctagtggacacgctgcaatctagtgacaaagtcgaaagtttaacaggcttttctcatgaagaactagacgactcttggtaaccatgtttgctgcccagcttctaacttacataccgtgagaagttacgtaacatttactcctttgtaaatgtttccctatcatcagacaaaactcaataaaaatgtgtgtaatccaatgtgggtttttttttccataattaattttgataccatagtgtgtgaaccaagaataatctagtcacgtgaaacctcttctccagtcatagtatttctcattcattataataaaagtaactggcttttaacctccttatttttgtcttaaatttataaatgagtataacctatcttactgctcaactgcaggcctacattttggaagtataagctgtgttctttcctctccaaagttgggctgccacctgtaaaacaggaggtcatttttcctagcacactcctgttttgtccctgaacataaaaacagatttttctaggcattagaaatagtaagaaagatactgcctctggtctttacttctgatgtctgtggtttgtatgtatgtgtccctccaaaattcatatgttggaatttaaacccccccgtgtgatag

SEQ ID NO: 302357 - DNA, 1650 bp, Homo sapiens
gaagttgccggactggctgtgaggcggtcctgcctcgctgccttcagtccctagtgtctgggtccccgccctccagccgcctttgagtcgtgcctgggtcctcgcccttgcctcagaaccgcgaagaaaggaagctcgcgtgtttgctagaaaacctagttgggagtgcgaggcagagaacgttcagcacctttgttcctcccgaaccctcgggacagaggcagggttctgagggcagggattccccctcgtcttggccccaccgcccgggctgggcactaaactcgggccgcggcggggcgagcgaggcgggctccggagggagctgacgcctgatgatggcgcagtccaacatgtttaccgtggctgatgtgttgagtcaagatgaactgcgcaaaaagctataccagacgtttaaggatcggggtatactggatacactcaagacacaacttcgaaaccagctaattcatgagttgatgcaccctgtattgagtggagaactgcagcctcggtccatttcagtagaagggagctccctcttaataggcgcctctaactctttagtggcagatcacttacaaagatgtggctatgaatattcactttctgttttctttccagaaagtggtttggcaaaagaaaaggtatttactatgcaggatctattacaactcattaaaatcaaccctacttccagtctctacaaatcactggtttcaggatctgataaagaaaatcaaaaaggttttcttatgcattttttaaaagaattggcagaatatcatcaagctaaagagagttgtaatatggaaactcagacaagttcgacatttaacagagattctctggctgagaagcttcagcttattgatgatcagtttgcagatgcttaccctcagcgtatcaagttcgaatctttagaaataaagctaaatgagtataagagagaaatagaagagcaacttcgggcagaaatgtgtcaaaagttgaagttttttaaagataccgagatagcaaaaattaaaatggaagcaaaacaaaatctgaagctctcgttcttcgggaaaagagtacccttgaaagaattcacaagcaccaagaggtggtatttacaaatattttatgggtggctatttcctgcagctattagtaggttggctcgagatccagcaacaggatggtacagttgatggaacaaggccccagaagagcaatagggactggggccaagagtgcaaatagaaggatggtccttgaaaaggatacacaaatttgcttcctctgagactgatggaaaggcgagaactgtggaggtgaacaatcaagttgggattatgagaaacacaccctaaataagctccatctcctcaggcagattagagggttagatcttgggttttaggagcagattggaggtgcagagtagttcctgtgggtaagggaagaacagccctttaaagcagagaggactgatcacctgtattgaggccaacgtggaggggggccggactgaaaggtcaccaggctgtaacaataacgacaatcagggaatgagattccaacccaaacgtgaaaggagaccgaaaacacagcctgtcaaaggacacaaaatggctgcgagagagggcagagcaacccacgagaccg

SEQ ID NO: 302358 - DNA, 466 bp, Homo sapiens
ttctcttttggagtgcatgtcttgtgagataattttattctgaagtaatcagtatggacaataaggaattagaacagtaattgaagttaaactattaaaataaaaaaggaattagaaatggaaaatgaattagaaatgagtaatcaagaaataaaagacaaatctgctcacagtgaaaatcctttagagaaatacatgaaaatcatccagcaggagcaagaccaggagtcggcagataagagctcaaaaaagatggtccaagaaggctccctagtggacacgctgcaatctagtgacaaagtcgaaagtttaacaggcttttctcatgaagaactagacgactcttggtaaccatgtttgctgcccagcttctaacttacataccgtgagaagttacgtaacatttactcctttgtaaatgtttccctatcatcagacaaaactcaataaaaatgtgtgtaatcca

SEQ ID NO: 302359 - DNA, 1018 bp, Homo sapiens
gaagttgccggactggctgtgaggcggtcctgcctcgctgccttcagtccctagtgtctgggtccccgccctccagccgcctttgagtcgtgcctgggtcctcgcccttgcctcagaaccgcgaagaaaggaagctcgcgtgtttgctagaaaacctagttgggagtgcgaggcagagaacgttcagcacctttgttcctcccgaaccctcgggacagaggcagggttctgagggcagggattccccctcgtcttggccccaccgcccgggctgggcactaaactcgggccgcggcggggcgagcgaggcgggctccggagggagctgacgcctgatgatggcgcagtccaacatgtttaccgtggctgatgtgttgagtcaagatgaactgcgcaaaaagctataccagacgtttaaggatcggggtatactggatacactcaagacacaacttcgaaaccagctaattcatgagttgatgcaccctgtattgagtggagaactgcagcctcggtccatttcagtagaagggagctccctcttaataggcgcctctaactctttagtggcagatcacttacaaagatgtggctatgaatattcactttctgttttctttccagaaagtggtttggcaaaagaaaaggtatttactatgcaggatctattacaactcattaaaatcaaccctacttccagtctctacaaatcactggtttcaggatctgataaagaaaatcaaaaaggtaggagccgtcatctttgtagagaacagcaacagttttctatgtactttttcctctaaaagaatgaagcaaatttttagggagaagagtaaaatttaatttgatttaaattatttgatttctgcaggtcatttcccctatatttccatttttgtaataacttttagatattcaattaaaaaaactgtagacagtatcaaaggccctacagacaggctgaaagatactgtttgtaaaaatacccactgttgggaatatttctgcaaaaaaa

SEQ ID NO: 302360 - DNA, 1105 bp, Homo sapiens
gaagttgccggactggctgtgaggcggtcctgcctcgctgccttcagtccctagtgtctgggtccccgccctccagccgcctttgagtcgtgcctgggtcctcgcccttgcctcagaaccgcgaagaaaggaagctcgcgtgtttgctagaaaacctagttgggagtgcgaggcagagaacgttcagcacctttgttcctcccgaaccctcgggacagaggcagggttctgagggcagggattccccctcgtcttggccccaccgcccgggctgggcactaaactcgggccgcggcggggcgagcgaggcgggctccggagggagctgacgcctgatgatggcgcagtccaacatgtttaccgtggctgatgtgttgagtcaagatgaactgcgcaaaaagctataccagacgtttaaggatcggggtatactggatacactcaagacacaacttcgaaaccagctaattcatgagttgatgcaccctgtattgagtggagaactgcagcctcggtccatttcagtagaagggagctccctcttaataggcgcctctaactctttagtggcagatcacttacaaagatgtggctatgaatattcactttctgttttctttccagaaagtggtttggcaaaagaaaaggtatttactatgcaggatctattacaactcattaaaatcaaccctacttccagtctctacaaatcactggtaagatggcttagtttctgtaatctactttggtttgttaattataactgaatagctgaataaaagtgaaatattttcttttaacaggtttcaggatctgataaagaaaatcaaaaaggtaggagccgtcatctttgtagagaacagcaacagttttctatgtactttttcctctaaaagaatgaagcaaatttttagggagaagagtaaaatttaatttgatttaaattatttgatttctgcaggtcatttcccctatatttccatttttgtaataacttttagatattcaattaaaaaaactgtagacagtatcaaaggccctacagacaggctgaaagatactgtttgtaaaaatacccactgttgggaatatttctgcaaaaaaa

SEQ ID NO: 302361 - DNA, 471 bp, Homo sapiens
ctctctgccttagcacttagagagtaggaagagactccagtattttctgacttaaactgtactcttggctttctttttcctctaacatttcatgatgaacattttcaaacatacagaaaagttgaaacaattttagcgaacacttgtatacccaccacctagatgtcactattacacttgtgttatacttgcttcatcatttttatctgtccatccattcatccaccttcctttttttgtatttcaaagtaagttgcagataatccctacactttcccctaagtatcctctttacttttgaaccagaggtctggcgtcttacgcacctgacgatgtttctatgtcctaatttgatgtgttattttttaatagctgagaagcttcagcttattgatgatcagtttgcagatgcttaccctcagcgtatcaagttcgaatctttagaaataaagctaaatgagtataagagag

SEQ ID NO: 302362 - DNA, 368 bp, Homo sapiens
gtgtgattattgttgggttcttggttgcctctggaaaatgggatgataatcttagaaggacttgcttcatgggatgcggcctataaaagttctgccccaactgtagggcggaagataattttcgttattgtagttagagtcttattgtagagaatcagacttctgtctagtgaccttaattaaattgtgacaccatgcttaaaggagcctgccagcttttacttttgcagtactgtaaagtcattattcaaatgtaaattttcctttttgaattttagcttgaattagagtctgtcaaagcccagtctttggcaataacaaaacaaaaccatatgctgaatgaaaaggttaaagagatgagtgattat

SEQ ID NO: 302363 - DNA, 2205 bp, Homo sapiens
cccctccctccctgcctctctctctctccctctccctcgagctcccggctggctgcggctccctggcgctctccctctctctccggtaggctcaccgagcgatgcgagctctgggagacagcgacgccgcctcccgctagagacctgcccctcggcccggccccctgcccaaccctgcccagcgcgcgggggtcggcgaaggcgccgcggacgcaccgacggctgaagagcggcgatgcacatgcactagcagcaccccctaactcactccctccacatcccgcgccgccgccgccgcctcctccacctcctcctccgccgccgccgcctcctcctcctccggcagccgcggcagcaggacccaccctgccccccaccccaccctctgtcggctccggctgcggctccagcctcgactattattttatttattttgggtcgtgcacaagcctcagtgcctgcagtccgcgcctcctcggcccgcgggcgcctcctcccttggctccggagccccagaccccggccaccctcgattcgacaaccccagacccctgccagctgccgcgagtctccgctgctggaatcttgttagcggctgtctttttggagggttctggtttcccgacatttttgtttccagcccaggagaggatatcgtgattttccccccttgagcccaggctctgctctctgggggggtggggggcgctccaagccggggagccgtgccagccgagtcgtgcgggctgtggcagggaaggggccaccatgggatgtactctgagcgcagaggagagagccgccctcgagcggagcaaggcgattgagaaaaacctcaaagaggatggcatcagcgccgccaaagacgtgaaattactcctgctcggggctggagaatcaggaaaaagcaccattgtgaagcagatgaagtaagtccctgtggcattgggattcgtacttttattaagaataatttttaaatcgtttttattacattgcttactccacattgctctccaggcctgttttttaattcgtgcacacacacacacacacacacacacccctatatttgactcccctcccccactccctacgttggttctgggtcctccaccctaactcctgggtgggtgttttttgggagggggaaggggagcgcctgtagttgtatgaatgacagtgtccgccatattgatcagaacatcacactattggcatgattatgatcattactcttgcttgtggaatattttctgtgtctcactgcctccatttctgtctgtgtctctgtttcattctgtctctatttctttctcctcttccctccatacctccctatcccccaaggtccgtaatcccacttccccctgctcttttcctggggcagtgattttgaacttggctaacatggaggggacccagccctagactggggtggaggatcaagtgtctgctgttcatgcgtttggtgctgaattggaggctgtggtttctacatcccctcgcaccccctcccccgcaaaaaaagagggccagggttaggggaggggtcgtgtgctaggggaaggagtgggtttccaaacgtaggtgacgggcacagttttatccaaggtagaggtggaagggggagggaagctgcctgtgaggctgaatgtccgccccttgctgcccccagctcctctcctcccccaccctcccagcattgctctcctgacacccgcagttttcgttcgctccgtggcctttatcagtgtatttatttacactctgcataggccgtgttccatgtaatctacccacaatgcggatttcaggccccacttgccgccgcccccttctgccttagctatcagtttcccctcctaattaactgggggtggatttgagtgatggttgaaaattaaaacaaaatgggatattccttcccttccacactttctcaataaggagcctcgcccctcctttccacttgcaggctcgcttcttgccctatccactcggcagttcctggtgatccccaggcaggtttgcttggggagggggtggccggcagcgaaggggtgtgcgccctccgggcctcctgtttcggttggcctgtcagttcgagacggaggagttcgtttagaccgtttagcgaagattccacgtcgctttgctgtgacaccttcgtgcacacacagctcctaattaggggttgctgtg

SEQ ID NO: 302364 - DNA, 1436 bp, Homo sapiens
tttaagctacaaagcacatgagaaatgttctgtttttcctttaaaatcaaagaaaatggtcagactggaccccttatctctctctctacagactgcttcacggactctttgctgttgacgttgatctcctggtagcatgaccttttggcctttgtaagacacacagcctttctgtatcaagcccctgtctaacctacgaccccagagtgactgacggctgtgtatttctgtagaatgctgtagaatccggttttagttgagtcttcacatttagaatttgaaaggaaaaacagaacatttctcatgtgctttgtagcttaaaaaaaggaaaactcaccatttcatccatatttctttttcttgcaaaacaaacatacccatctgcaccgacgcctgcccccgtcccacctcgcggcgcagcccctggagctcctgctggggggcagggcccatctgccgcctggggctccggtgcggtgcactggtccgaggagtgtgctcaggccgggctttccagaaggccacaggccactgcaaaccctgctgcctgccggccgcccagacaccacagacgccacctggcggccctaagccactcccgccacacgctcactccaggttcgtatagaaaaagcacagctctcactggccagtagctgccaaaaagaacacccatcgtataaggaaatccagccccatagaaaacaatctgcccaccgaccccctttctaaggatagcctttgtaggggttttttggttcctttttttttttttcagtttttgtttttacttttgtcccgccgagtactatgtattaccagccccccaccccacagatcagttttcctagtctttgggaaacgggttgtgttttttttcctttgccgtgttggatttccggtcccggctgacacctcccttcgtgtgtgcgcccctccccacccctgcctttgtttcggtgccctgtgtccgctctctcatgtggggatgtttgtgctgcagacaaaaagaacaaaaaaaaatttttaaataccacaagatggaaaaaaaaaacaaaaaaatttaaaaagatggaatgtagtgtttacattaaagccgccgttttcatgaccaatcctatgtcatttctactttgactaatacccaaaccctaaacctcttcacggtttcacttttaagacttaatctttgctgaagaagaccagtcacagccatttcaaataaagaggaggcaaaaagacaaaacacacaaaaaattaaaaaaaaaaacttaaaaaaaaaaggaaaaaagaaaaaaaagcccacgggtctttgtaagcctttctattcccaatcggtgaggtttctgtgatatcttacacactgccagtctacttctctgactaatggaaaattcctgtgtagctcaataaaagagaatgtttgtctgtactcc

SEQ ID NO: 302365 - DNA, 1068 bp, Homo sapiens
cccctccctccctgcctctctctctctccctctccctcgagctcccggctggctgcggctccctggcgctctccctctctctccggtaggctcaccgagcgatgcgagctctgggagacagcgacgccgcctcccgctagagacctgcccctcggcccggccccctgcccaaccctgcccagcgcgcgggggtcggcgaaggcgccgcggacgcaccgacggctgaagagcggcgatgcacatgcactagcagcaccccctaactcactccctccacatcccgcgccgccgccgccgcctcctccacctcctcctccgccgccgccgcctcctcctcctccggcagccgcggcagcaggacccaccctgccccccaccccaccctctgtcggctccggctgcggctccagcctcgactattattttatttattttgggtcgtgcacaagcctcagtgcctgcagtccgcgcctcctcggcccgcgggcgcctcctcccttggctccggagccccagaccccggccaccctcgattcgacaaccccagacccctgccagctgccgcgagtctccgctgctggaatcttgttagcggctgtctttttggagggttctggtttcccgacatttttgtttccagcccaggagaggatatcgtgattttccccccttgagcccaggctctgctctctgggggggtggggggcgctccaagccggggagccgtgccagccgagtcgtgcgggctgtggcagggaaggggccaccatgggatgtactctgagcgcagaggagagagccgccctcgagcggagcaaggcgattgagaaaaacctcaaagaggatggcatcagcgccgccaaagacgtgaaattactcctgctcggggctggagaatcaggaaaaagcaccattgtgaagcagatgaaatatccattgagcttctactctgtaccgagcaccatcttaagtgttgtaactgagcaagacacacaaaatctctgccctcctggagtgttctgacattcttgttaggggagacaggcaataaataaggaaaatacatag

SEQ ID NO: 302366 - DNA, 593 bp, Homo sapiens
agaaattactggacaggtagcttccagataagagtgatgaactatcatttctgacaaaagatgttggacaggctgtggcagcaaggaggtgatcagaagactccctagagcacaggggatctggcaggctttttctataaaatgacatggatacacacagggtcaggctgcctgtgggcagagacgtccccaggagccctgcccggtggccagcaccacggacatctgctcacctgtggcagaactcggagtctcacagctaagccaggccagacccagttgctactttttggtcaagacccgctctaggaattcttccagggaagagggaatgtgaatttgtctgttttcagatatgtgtagcctttacacaaaagtgtttgaaattatttggttaaaatgctttccatcgaggttattctttctttcttcttttttttttcccactctgcagatatccattgagcttctactctgtaccgagcaccatcttaagtgttgtaactgagcaagacacacaaaatctctgccctcctggagtgttctgacattcttgttaggggagacaggcaataaataaggaaaatacatag

SEQ ID NO: 302367 - DNA, 3206 bp, Homo sapiens
cccctccctccctgcctctctctctctccctctccctcgagctcccggctggctgcggctccctggcgctctccctctctctccggtaggctcaccgagcgatgcgagctctgggagacagcgacgccgcctcccgctagagacctgcccctcggcccggccccctgcccaaccctgcccagcgcgcgggggtcggcgaaggcgccgcggacgcaccgacggctgaagagcggcgatgcacatgcactagcagcaccccctaactcactccctccacatcccgcgccgccgccgccgcctcctccacctcctcctccgccgccgccgcctcctcctcctccggcagccgcggcagcaggacccaccctgccccccaccccaccctctgtcggctccggctgcggctccagcctcgactattattttatttattttgggtcgtgcacaagcctcagtgcctgcagtccgcgcctcctcggcccgcgggcgcctcctcccttggctccggagccccagaccccggccaccctcgattcgacaaccccagacccctgccagctgccgcgagtctccgctgctggaatcttgttagcggctgtctttttggagggttctggtttcccgacatttttgtttccagcccaggagaggatatcgtgattttccccccttgagcccaggctctgctctctgggggggtggggggcgctccaagccggggagccgtgccagccgagtcgtgcgggctgtggcagggaaggggccaccatgggatgtactctgagcgcagaggagagagccgccctcgagcggagcaaggcgattgagaaaaacctcaaagaggatggcatcagcgccgccaaagacgtgaaattactcctgctcggggctggagaatcaggaaaaagcaccattgtgaagcagatgaagatcatccatgaagatggcttctccggagaagacgtgaaacagtacaagcctgttgtctacagcaacactatccagtccctggcagccatcgtccgggccatggacactttgggcatcgaatatggtgataaggagagaaaggctgacgccaagatggtgtgtgatgtggtgagtcggatggaagacaccgagcccttctctgcagagctgctttctgccatgatgcggctctggggcgactcaggaatccaagagtgcttcaaccggtcccgggagtatcagctcaacgactctgccaaatactacctggacagcctggatcggattggggccgccgactaccagcccaccgagcaggacatcctccgaaccagggtcaaaaccactggcatcgtagaaacccacttcacattcaagaacctccacttcaggctgtttgacgtcggaggccagcgatctgaacgcaagaagtggatccattgcttcgaggacgtcacggccatcattttctgtgtcgcgctcagcggctatgaccaggtgctccacgaagacgaaaccacgaaccgcatgcacgagtctctcatgctcttcgactccatctgtaacaacaagttcttcatcgatacctccatcattctcttcctcaacaagaaagatctctttggcgagaagatcaagaagtcacctttgaccatctgctttcctgaatacacaggccccaatacctatgaagacgcagccgcctacatccaagcacaatttgaaagcaaaaaccgctcacccaacaaagaaatatattgtcacatgacttgtgccacagacacgaataacatccaggtggtgttcgacgccgtcaccgacatcatcattgccaacaacctccggggctgcggcttgtactgacctcttgtcctgtatagcaacctatttgactgcttcacggactctttgctgttgacgttgatctcctggtagcatgaccttttggcctttgtaagacacacagcctttctgtatcaagcccctgtctaacctacgaccccagagtgactgacggctgtgtatttctgtagaatgctgtagaatccggttttagttgagtcttcacatttagaatttgaaaggaaaaacagaacatttctcatgtgctttgtagcttaaaaaaaggaaaactcaccatttcatccatatttctttttcttgcaaaacaaacatacccatctgcaccgacgcctgcccccgtcccacctcgcggcgcagcccctggagctcctgctggggggcagggcccatctgccgcctggggctccggtgcggtgcactggtccgaggagtgtgctcaggccgggctttccagaaggccacaggccactgcaaaccctgctgcctgccggccgcccagacaccacagacgccacctggcggccctaagccactcccgccacacgctcactccaggttcgtatagaaaaagcacagctctcactggccagtagctgccaaaaagaacacccatcgtataaggaaatccagccccatagaaaacaatctgcccaccgaccccctttctaaggatagcctttgtaggggttttttggttcctttttttttttttcagtttttgtttttacttttgtcccgccgagtactatgtattaccagccccccaccccacagatcagttttcctagtctttgggaaacgggttgtgttttttttcctttgccgtgttggatttccggtcccggctgacacctcccttcgtgtgtgcgcccctccccacccctgcctttgtttcggtgccctgtgtccgctctctcatgtggggatgtttgtgctgcagacaaaaagaacaaaaaaaaatttttaaataccacaagatggaaaaaaaaaacaaaaaaatttaaaaagatggaatgtagtgtttacattaaagccgccgttttcatgaccaatcctatgtcatttctactttgactaatacccaaaccctaaacctcttcacggtttcacttttaagacttaatctttgctgaagaagaccagtcacagccatttcaaataaagaggaggcaaaaagacaaaacacacaaaaaattaaaaaaaaaaacttaaaaaaaaaaggaaaaaagaaaaaaaagcccacgggtctttgtaagcctttctattcccaatcggtgaggtttctgtgatatcttacacactgccagtctacttctctgactaatggaaaattcctgtgtagctcaataaaagagaatgtttgtctgtactcc

SEQ ID NO: 302368 - DNA, 4237 bp, Homo sapiens
  misc_feature (2142)..(2142): n is a, c, g, or t
cccctccctccctgcctctctctctctccctctccctcgagctcccggctggctgcggctccctggcgctctccctctctctccggtaggctcaccgagcgatgcgagctctgggagacagcgacgccgcctcccgctagagacctgcccctcggcccggccccctgcccaaccctgcccagcgcgcgggggtcggcgaaggcgccgcggacgcaccgacggctgaagagcggcgatgcacatgcactagcagcaccccctaactcactccctccacatcccgcgccgccgccgccgcctcctccacctcctcctccgccgccgccgcctcctcctcctccggcagccgcggcagcaggacccaccctgccccccaccccaccctctgtcggctccggctgcggctccagcctcgactattattttatttattttgggtcgtgcacaagcctcagtgcctgcagtccgcgcctcctcggcccgcgggcgcctcctcccttggctccggagccccagaccccggccaccctcgattcgacaaccccagacccctgccagctgccgcgagtctccgctgctggaatcttgttagcggctgtctttttggagggttctggtttcccgacatttttgtttccagcccaggagaggatatcgtgattttccccccttgagcccaggctctgctctctgggggggtggggggcgctccaagccggggagccgtgccagccgagtcgtgcgggctgtggcagggaaggggccaccatgggatgtactctgagcgcagaggagagagccgccctcgagcggagcaaggcgattgagaaaaacctcaaagaggatggcatcagcgccgccaaagacgtgaaattactcctgctcggggctggagaatcaggaaaaagcaccattgtgaagcagatgaagatcatccatgaagatggcttctccggagaagacgtgaaacagtacaagcctgttgtctacagcaacactatccagtccctggcagccatcgtccgggccatggacactttgggcatcgaatatggtgataaggagagaaaggctgacgccaagatggtgtgtgatgtggtgagtcggatggaagacaccgagcccttctctgcagagctgctttctgccatgatgcggctctggggcgactcaggaatccaagagtgcttcaaccggtcccgggagtatcagctcaacgactctgccaaatactacctggacagcctggatcggattggggccgccgactaccagcccaccgagcaggacatcctccgaaccagggtcaaaaccactggcatcgtagaaacccacttcacattcaagaacctccacttcaggctgtttgacgtcggaggccagcgatctgaacgcaagaagtggatccattgcttcgaggacgtcacggccatcattttctgtgtcgcgctcagcggctatgaccaggtgctccacgaagacgaaaccacgaaccgcatgcacgagtctctcatgctcttcgactccatctgtaacaacaagttcttcatcgatacctccatcattctcttcctcaacaagaaagatctctttggcgagaagatcaagaagtcacctttgaccatctgctttcctgaatacacaggccccaatacctatgaagacgcagccgcctacatccaagcacaatttgaaagcaaaaaccgctcacccaacaaagaaatatattgtcacatgacttgtgccacagacacgaataacatccaggtggtgttcgacgccgtcaccgacatcatcattgccaacaacctccggggctgcggcttgtactgacctcttgtcctgtatagcaacctatttggtaatgattccagcacccacagaacagcttgcgtgcgcgcgcatacacacacacacacacacacacacacacaccactaacaaatgcaagttggtaaataaactttaaagaggcataacaaaaccttatatatatatatatatatacaaatatatatttaaaaaatctttttagtttgtactagaaagagctgcggacagaactgaccaccatcccatagctcatggaggttttcctgggacggcacgtgagcatgcacgtgtgtgtgtgtacacacactncacacatgtccagatgggagcttggtttgggagtccctccttttgaggatagccccggggtgttcctctcagccccatttctgagaacaggtgaatggcagaacagccctggccttggcccagccagctctctgtgttgcgcccttagagcctctgcgccctcagttccgtcctgctcttggcaaattccagaccctttcagaaatggccgaagccctaagcctctcctcactctgcactcccaaaaacagaacaatttaaggatgcttctctttcgggtggtggtggttgttaatttcaggaatttagaagaatcattgctccgaccaaatccactgtctcctgagttttctttattcatgttaagatggcaagaatcagagaacagggagacttggtctgctttctaaaagcagctgacaggaggggactcaagttcacctgcagagttgaaaccagccccgctccaagagggcatgtgggaaggtggggagcgaggggaacaggcgtggcggggagggccggacttgtgggcctgacccgagtcagggtctcaggggggggccaggcttccccaggtgcccgggatgggccttcaaatggggttccctgaaccccctcgtgctgctgccccatctcgccccaacccccagcagtagtcaaaatgttcctagggttttttggttggttggttggtttttaaaatcaaagaaaatggtcagactggaccccttatctctctctctacagactgcttcacggactctttgctgttgacgttgatctcctggtagcatgaccttttggcctttgtaagacacacagcctttctgtatcaagcccctgtctaacctacgaccccagagtgactgacggctgtgtatttctgtagaatgctgtagaatccggttttagttgagtcttcacatttagaatttgaaaggaaaaacagaacatttctcatgtgctttgtagcttaaaaaaaggaaaactcaccatttcatccatatttctttttcttgcaaaacaaacatacccatctgcaccgacgcctgcccccgtcccacctcgcggcgcagcccctggagctcctgctggggggcagggcccatctgccgcctggggctccggtgcggtgcactggtccgaggagtgtgctcaggccgggctttccagaaggccacaggccactgcaaaccctgctgcctgccggccgcccagacaccacagacgccacctggcggccctaagccactcccgccacacgctcactccaggttcgtatagaaaaagcacagctctcactggccagtagctgccaaaaagaacacccatcgtataaggaaatccagccccatagaaaacaatctgcccaccgaccccctttctaaggatagcctttgtaggggttttttggttcctttttttttttttcagtttttgtttttacttttgtcccgccgagtactatgtattaccagccccccaccccacagatcagttttcctagtctttgggaaacgggttgtgttttttttcctttgccgtgttggatttccggtcccggctgacacctcccttcgtgtgtgcgcccctccccacccctgcctttgtttcggtgccctgtgtccgctctctcatgtggggatgtttgtgctgcagacaaaaagaacaaaaaaaaatttttaaataccacaagatggaaaaaaaaaacaaaaaaatttaaaaagatggaatgtagtgtttacattaaagccgccgttttcatgaccaatcctatgtcatttctactttgactaatacccaaaccctaaacctcttcacggtttcacttttaagacttaatctttgctgaagaagaccagtcacagccatttcaaataaagaggaggcaaaaagacaaaacacacaaaaaattaaaaaaaaaaacttaaaaaaaaaaggaaaaaagaaaaaaaagcccacgggtctttgtaagcctttctattcccaatcggtgaggtttctgtgatatcttacacactgccagtctacttctctgactaatggaaaattcctgtgtagctcaataaaagagaatgtttgtctgtactcc

SEQ ID NO: 302369 - DNA, 4083 bp, Homo sapiens
  misc_feature (1988)..(1988): n is a, c, g, or t
cccctccctccctgcctctctctctctccctctccctcgagctcccggctggctgcggctccctggcgctctccctctctctccggtaggctcaccgagcgatgcgagctctgggagacagcgacgccgcctcccgctagagacctgcccctcggcccggccccctgcccaaccctgcccagcgcgcgggggtcggcgaaggcgccgcggacgcaccgacggctgaagagcggcgatgcacatgcactagcagcaccccctaactcactccctccacatcccgcgccgccgccgccgcctcctccacctcctcctccgccgccgccgcctcctcctcctccggcagccgcggcagcaggacccaccctgccccccaccccaccctctgtcggctccggctgcggctccagcctcgactattattttatttattttgggtcgtgcacaagcctcagtgcctgcagtccgcgcctcctcggcccgcgggcgcctcctcccttggctccggagccccagaccccggccaccctcgattcgacaaccccagacccctgccagctgccgcgagtctccgctgctggaatcttgttagcggctgtctttttggagggttctggtttcccgacatttttgtttccagcccaggagaggatatcgtgattttccccccttgagcccaggctctgctctctgggggggtggggggcgctccaagccggggagccgtgccagccgagtcgtgcgggctgtggcagggaaggggccaccatgggatgtactctgagcgcagaggagagagccgccctcgagcggagcaaggcgattgagaaaaacctcaaagaggatggcatcagcgccgccaaagacgtgaaattactcctgctcggggctggagaatcaggaaaaagcaccattgtgaagcagatgaagatcatccatgaagatggcttctccggagaagacgtgaaacagtacaagcctgttgtctacagcaacactatccagtccctggcagccatcgtccgggccatggacactttgggcatcgaatatggtgataaggagagaaaggctgacgccaagatggtgtgtgatgtggtgagtcggatggaagacaccgagcccttctctgcagagctgctttctgccatgatgcggctctggggcgactcaggaatccaagagtgcttcaaccggtcccgggagtatcagctcaacgactctgccaaatactacctggacagcctggatcggattggggccgccgactaccagcccaccgagcaggacatcctccgaaccagggtcaaaaccactggcatcgtagaaacccacttcacattcaagaacctccacttcaggctgtttgacgtcggaggccagcgatctgaacgcaagaagtggatccattgcttcgaggacgtcacggccatcattttctgtgtcgcgctcagcggctatgaccaggtgctccacgaagacgaaaccacggccccaatacctatgaagacgcagccgcctacatccaagcacaatttgaaagcaaaaaccgctcacccaacaaagaaatatattgtcacatgacttgtgccacagacacgaataacatccaggtggtgttcgacgccgtcaccgacatcatcattgccaacaacctccggggctgcggcttgtactgacctcttgtcctgtatagcaacctatttggtaatgattccagcacccacagaacagcttgcgtgcgcgcgcatacacacacacacacacacacacacacacaccactaacaaatgcaagttggtaaataaactttaaagaggcataacaaaaccttatatatatatatatatatacaaatatatatttaaaaaatctttttagtttgtactagaaagagctgcggacagaactgaccaccatcccatagctcatggaggttttcctgggacggcacgtgagcatgcacgtgtgtgtgtgtacacacactncacacatgtccagatgggagcttggtttgggagtccctccttttgaggatagccccggggtgttcctctcagccccatttctgagaacaggtgaatggcagaacagccctggccttggcccagccagctctctgtgttgcgcccttagagcctctgcgccctcagttccgtcctgctcttggcaaattccagaccctttcagaaatggccgaagccctaagcctctcctcactctgcactcccaaaaacagaacaatttaaggatgcttctctttcgggtggtggtggttgttaatttcaggaatttagaagaatcattgctccgaccaaatccactgtctcctgagttttctttattcatgttaagatggcaagaatcagagaacagggagacttggtctgctttctaaaagcagctgacaggaggggactcaagttcacctgcagagttgaaaccagccccgctccaagagggcatgtgggaaggtggggagcgaggggaacaggcgtggcggggagggccggacttgtgggcctgacccgagtcagggtctcaggggggggccaggcttccccaggtgcccgggatgggccttcaaatggggttccctgaaccccctcgtgctgctgccccatctcgccccaacccccagcagtagtcaaaatgttcctagggttttttggttggttggttggtttttaaaatcaaagaaaatggtcagactggaccccttatctctctctctacagactgcttcacggactctttgctgttgacgttgatctcctggtagcatgaccttttggcctttgtaagacacacagcctttctgtatcaagcccctgtctaacctacgaccccagagtgactgacggctgtgtatttctgtagaatgctgtagaatccggttttagttgagtcttcacatttagaatttgaaaggaaaaacagaacatttctcatgtgctttgtagcttaaaaaaaggaaaactcaccatttcatccatatttctttttcttgcaaaacaaacatacccatctgcaccgacgcctgcccccgtcccacctcgcggcgcagcccctggagctcctgctggggggcagggcccatctgccgcctggggctccggtgcggtgcactggtccgaggagtgtgctcaggccgggctttccagaaggccacaggccactgcaaaccctgctgcctgccggccgcccagacaccacagacgccacctggcggccctaagccactcccgccacacgctcactccaggttcgtatagaaaaagcacagctctcactggccagtagctgccaaaaagaacacccatcgtataaggaaatccagccccatagaaaacaatctgcccaccgaccccctttctaaggatagcctttgtaggggttttttggttcctttttttttttttcagtttttgtttttacttttgtcccgccgagtactatgtattaccagccccccaccccacagatcagttttcctagtctttgggaaacgggttgtgttttttttcctttgccgtgttggatttccggtcccggctgacacctcccttcgtgtgtgcgcccctccccacccctgcctttgtttcggtgccctgtgtccgctctctcatgtggggatgtttgtgctgcagacaaaaagaacaaaaaaaaatttttaaataccacaagatggaaaaaaaaaacaaaaaaatttaaaaagatggaatgtagtgtttacattaaagccgccgttttcatgaccaatcctatgtcatttctactttgactaatacccaaaccctaaacctcttcacggtttcacttttaagacttaatctttgctgaagaagaccagtcacagccatttcaaataaagaggaggcaaaaagacaaaacacacaaaaaattaaaaaaaaaaacttaaaaaaaaaaggaaaaaagaaaaaaaagcccacgggtctttgtaagcctttctattcccaatcggtgaggtttctgtgatatcttacacactgccagtctacttctctgactaatggaaaattcctgtgtagctcaataaaagagaatgtttgtctgtactcc

SEQ ID NO: 302370 - DNA, 2848 bp, Homo sapiens
  misc_feature (2142)..(2142): n is a, c, g, or t
  misc_feature (2476)..(2476): n is a, c, g, or t
  misc_feature (2509)..(2509): n is a, c, g, or t
  misc_feature (2542)..(2542): n is a, c, g, or t
  misc_feature (2544)..(2544): n is a, c, g, or t
  misc_feature (2546)..(2547): n is a, c, g, or t
  misc_feature (2555)..(2555): n is a, c, g, or t
  misc_feature (2560)..(2561): n is a, c, g, or t
  misc_feature (2564)..(2564): n is a, c, g, or t
  misc_feature (2579)..(2579): n is a, c, g, or t
cccctccctccctgcctctctctctctccctctccctcgagctcccggctggctgcggctccctggcgctctccctctctctccggtaggctcaccgagcgatgcgagctctgggagacagcgacgccgcctcccgctagagacctgcccctcggcccggccccctgcccaaccctgcccagcgcgcgggggtcggcgaaggcgccgcggacgcaccgacggctgaagagcggcgatgcacatgcactagcagcaccccctaactcactccctccacatcccgcgccgccgccgccgcctcctccacctcctcctccgccgccgccgcctcctcctcctccggcagccgcggcagcaggacccaccctgccccccaccccaccctctgtcggctccggctgcggctccagcctcgactattattttatttattttgggtcgtgcacaagcctcagtgcctgcagtccgcgcctcctcggcccgcgggcgcctcctcccttggctccggagccccagaccccggccaccctcgattcgacaaccccagacccctgccagctgccgcgagtctccgctgctggaatcttgttagcggctgtctttttggagggttctggtttcccgacatttttgtttccagcccaggagaggatatcgtgattttccccccttgagcccaggctctgctctctgggggggtggggggcgctccaagccggggagccgtgccagccgagtcgtgcgggctgtggcagggaaggggccaccatgggatgtactctgagcgcagaggagagagccgccctcgagcggagcaaggcgattgagaaaaacctcaaagaggatggcatcagcgccgccaaagacgtgaaattactcctgctcggggctggagaatcaggaaaaagcaccattgtgaagcagatgaagatcatccatgaagatggcttctccggagaagacgtgaaacagtacaagcctgttgtctacagcaacactatccagtccctggcagccatcgtccgggccatggacactttgggcatcgaatatggtgataaggagagaaaggctgacgccaagatggtgtgtgatgtggtgagtcggatggaagacaccgagcccttctctgcagagctgctttctgccatgatgcggctctggggcgactcaggaatccaagagtgcttcaaccggtcccgggagtatcagctcaacgactctgccaaatactacctggacagcctggatcggattggggccgccgactaccagcccaccgagcaggacatcctccgaaccagggtcaaaaccactggcatcgtagaaacccacttcacattcaagaacctccacttcaggctgtttgacgtcggaggccagcgatctgaacgcaagaagtggatccattgcttcgaggacgtcacggccatcattttctgtgtcgcgctcagcggctatgaccaggtgctccacgaagacgaaaccacgaaccgcatgcacgagtctctcatgctcttcgactccatctgtaacaacaagttcttcatcgatacctccatcattctcttcctcaacaagaaagatctctttggcgagaagatcaagaagtcacctttgaccatctgctttcctgaatacacaggccccaatacctatgaagacgcagccgcctacatccaagcacaatttgaaagcaaaaaccgctcacccaacaaagaaatatattgtcacatgacttgtgccacagacacgaataacatccaggtggtgttcgacgccgtcaccgacatcatcattgccaacaacctccggggctgcggcttgtactgacctcttgtcctgtatagcaacctatttggtaatgattccagcacccacagaacagcttgcgtgcgcgcgcatacacacacacacacacacacacacacacaccactaacaaatgcaagttggtaaataaactttaaagaggcataacaaaaccttatatatatatatatatatacaaatatatatttaaaaaatctttttagtttgtactagaaagagctgcggacagaactgaccaccatcccatagctcatggaggttttcctgggacggcacgtgagcatgcacgtgtgtgtgtgtacacacactncacacatgtccagatgggagcttggtttgggagtccctccttttgaggatagccccggggtgttcctctcagccccatttctgagaacaggtgaatggcagaacagccctggccttggcccagccagctctctgtgttgcgcccttagagcctctgcgccctcagttccgtcctgctcttggcaaattccagaccctttcagaaatggccgaagccctaagcctctcctcactctgcactcccaaaaacagaacaatttaaggatgcttctctttcgggtggtggtggttgttaatttcaggaatttagaagaatcattgctccgaccaaaaanaaaaaaaaagaaaaaaaaaaaagggggggcccngccagaatcttcccctcgcgagggggccccaanancnnaccgccgnacccnnagntttctgtggccacanaggggtgtgccccaatagagtgagaagacgaattagcataagcataaggcgacgtggccgcgaccgcgaattacaagcaaagcgccgcggagaacctgggggcaaacaaccggcctaacgaccgggcgacaacctctgggtgaacaaagggaaacacctataacatatcgcgggggggggggggaggaaccaataaaggggggcaacacaacaatacaccctctaccggcagttttaaaaacgcccccaaagaggcactacacattaaa

SEQ ID NO: 302371 - DNA, 2635 bp, Homo sapiens
  misc_feature (2142)..(2142): n is a, c, g, or t
  misc_feature (2495)..(2495): n is a, c, g, or t
  misc_feature (2501)..(2502): n is a, c, g, or t
cccctccctccctgcctctctctctctccctctccctcgagctcccggctggctgcggctccctggcgctctccctctctctccggtaggctcaccgagcgatgcgagctctgggagacagcgacgccgcctcccgctagagacctgcccctcggcccggccccctgcccaaccctgcccagcgcgcgggggtcggcgaaggcgccgcggacgcaccgacggctgaagagcggcgatgcacatgcactagcagcaccccctaactcactccctccacatcccgcgccgccgccgccgcctcctccacctcctcctccgccgccgccgcctcctcctcctccggcagccgcggcagcaggacccaccctgccccccaccccaccctctgtcggctccggctgcggctccagcctcgactattattttatttattttgggtcgtgcacaagcctcagtgcctgcagtccgcgcctcctcggcccgcgggcgcctcctcccttggctccggagccccagaccccggccaccctcgattcgacaaccccagacccctgccagctgccgcgagtctccgctgctggaatcttgttagcggctgtctttttggagggttctggtttcccgacatttttgtttccagcccaggagaggatatcgtgattttccccccttgagcccaggctctgctctctgggggggtggggggcgctccaagccggggagccgtgccagccgagtcgtgcgggctgtggcagggaaggggccaccatgggatgtactctgagcgcagaggagagagccgccctcgagcggagcaaggcgattgagaaaaacctcaaagaggatggcatcagcgccgccaaagacgtgaaattactcctgctcggggctggagaatcaggaaaaagcaccattgtgaagcagatgaagatcatccatgaagatggcttctccggagaagacgtgaaacagtacaagcctgttgtctacagcaacactatccagtccctggcagccatcgtccgggccatggacactttgggcatcgaatatggtgataaggagagaaaggctgacgccaagatggtgtgtgatgtggtgagtcggatggaagacaccgagcccttctctgcagagctgctttctgccatgatgcggctctggggcgactcaggaatccaagagtgcttcaaccggtcccgggagtatcagctcaacgactctgccaaatactacctggacagcctggatcggattggggccgccgactaccagcccaccgagcaggacatcctccgaaccagggtcaaaaccactggcatcgtagaaacccacttcacattcaagaacctccacttcaggctgtttgacgtcggaggccagcgatctgaacgcaagaagtggatccattgcttcgaggacgtcacggccatcattttctgtgtcgcgctcagcggctatgaccaggtgctccacgaagacgaaaccacgaaccgcatgcacgagtctctcatgctcttcgactccatctgtaacaacaagttcttcatcgatacctccatcattctcttcctcaacaagaaagatctctttggcgagaagatcaagaagtcacctttgaccatctgctttcctgaatacacaggccccaatacctatgaagacgcagccgcctacatccaagcacaatttgaaagcaaaaaccgctcacccaacaaagaaatatattgtcacatgacttgtgccacagacacgaataacatccaggtggtgttcgacgccgtcaccgacatcatcattgccaacaacctccggggctgcggcttgtactgacctcttgtcctgtatagcaacctatttggtaatgattccagcacccacagaacagcttgcgtgcgcgcgcatacacacacacacacacacacacacacacaccactaacaaatgcaagttggtaaataaactttaaagaggcataacaaaaccttatatatatatatatatatacaaatatatatttaaaaaatctttttagtttgtactagaaagagctgcggacagaactgaccaccatcccatagctcatggaggttttcctgggacggcacgtgagcatgcacgtgtgtgtgtgtacacacactncacacatgtccagatgggagcttggtttgggagtccctccttttgaggatagccccggggtgttcctctcagccccatttctgagaacaggtgaatggcagaacagccctggccttggcccagccagctctctgtgttgcgcccttagagcctctgcgccctcagttccgtcctgctcttggcaaattccagaccctttcagaaatggccgaagccctaagcctctcctcactctgcactcccaaaaacagaacaatttaaggatgcttctctttcgggtggtggtggttgttaatttcaggaatttagaagaatcattgctccgaccaatgaaatacagatagatagacaanaataannaagaaaatagtggggggcccggaacataattgatttccccctccgggaaggcgtgccgcctgactagcttctccgcgctatttcccccgaggcttcttctttgtgcacacaagagggtggcccccaataatag

SEQ ID NO: 302372 - DNA, 1646 bp, Homo sapiens
cccctccctccctgcctctctctctctccctctccctcgagctcccggctggctgcggctccctggcgctctccctctctctccggtaggctcaccgagcgatgcgagctctgggagacagcgacgccgcctcccgctagagacctgcccctcggcccggccccctgcccaaccctgcccagcgcgcgggggtcggcgaaggcgccgcggacgcaccgacggctgaagagcggcgatgcacatgcactagcagcaccccctaactcactccctccacatcccgcgccgccgccgccgcctcctccacctcctcctccgccgccgccgcctcctcctcctccggcagccgcggcagcaggacccaccctgccccccaccccaccctctgtcggctccggctgcggctccagcctcgactattattttatttattttgggtcgtgcacaagcctcagtgcctgcagtccgcgcctcctcggcccgcgggcgcctcctcccttggctccggagccccagaccccggccaccctcgattcgacaaccccagacccctgccagctgccgcgagtctccgctgctggaatcttgttagcggctgtctttttggagggttctggtttcccgacatttttgtttccagcccaggagaggatatcgtgattttccccccttgagcccaggctctgctctctgggggggtggggggcgctccaagccggggagccgtgccagccgagtcgtgcgggctgtggcagggaaggggccaccatgggatgtactctgagcgcagaggagagagccgccctcgagcggagcaaggcgattgagaaaaacctcaaagaggatggcatcagcgccgccaaagacgtgaaattactcctgctcggggctggagaatcaggaaaaagcaccattgtgaagcagatgaagatcatccatgaagatggcttctccggagaagacgtgaaacagtacaagcctgttgtctacagcaacactatccagtccctggcagccatcgtccgggccatggacactttgggcatcgaatatggtgataaggagagaaaggctgacgccaagatggtgtgtgatgtggtgagtcggatggaagacaccgagcccttctctgcagagctgctttctgccatgatgcggctctggggcgactcaggaatccaagagtgcttcaaccggtcccgggagtatcagctcaacgactctgccaaatactacctggacagcctggatcggattggggccgccgactaccagcccaccgagcaggacatcctccgaaccagggtcaaaaccactggcatcgtagaaacccacttcacattcaagaacctccacttcaggctgtttgacgtcggaggccagcgatctgaacgcaagaagtggatccattgcttcgaggacgtcacggccatcattttctgtgtcgcgctcagcggctatgaccaggtgctccacgaagacgaaaccacggacacgacctgcactggcacgaatccctgaagcttgatgatcagattcgaaacaacaaatgggtacaaaacggtactaatcaaccgtggttgtaacagaaggatatactgaatagagtagatcagagttgtcccagtccgaccacgcgtcaggga

SEQ ID NO: 302373 - DNA, 1427 bp, Homo sapiens
cccctccctccctgcctctctctctctccctctccctcgagctcccggctggctgcggctccctggcgctctccctctctctccggtaggctcaccgagcgatgcgagctctgggagacagcgacgccgcctcccgctagagacctgcccctcggcccggccccctgcccaaccctgcccagcgcgcgggggtcggcgaaggcgccgcggacgcaccgacggctgaagagcggcgatgcacatgcactagcagcaccccctaactcactccctccacatcccgcgccgccgccgccgcctcctccacctcctcctccgccgccgccgcctcctcctcctccggcagccgcggcagcaggacccaccctgccccccaccccaccctctgtcggctccggctgcggctccagcctcgactattattttatttattttgggtcgtgcacaagcctcagtgcctgcagtccgcgcctcctcggcccgcgggcgcctcctcccttggctccggagccccagaccccggccaccctcgattcgacaaccccagacccctgccagctgccgcgagtctccgctgctggaatcttgttagcggctgtctttttggagggttctggtttcccgacatttttgtttccagcccaggagaggatatcgtgattttccccccttgagcccaggctctgctctctgggggggtggggggcgctccaagccggggagccgtgccagccgagtcgtgcgggctgtggcagggaaggggccaccatgggatgtactctgagcgcagaggagagagccgccctcgagcggagcaaggcgattgagaaaaacctcaaagaggatggcatcagcgccgccaaagacgtgaaattactcctgctcggggctggagaatcaggaaaaagcaccattgtgaagcagatgaagatcatccatgaagatggcttctccggagaagacgtgaaacagtacaagcctgttgtctacagcaacactatccagtccctggcagccatcgtccgggccatggacactttgggcatcgaatatggtgataaggagagaaaggtaggcccctgagcccataagcacagcaacaagaggttctgtctgtgttaccccactgcctcctctttatagtgctgggctgccttaaatgaacgagaagagactccgctatgtttgaaagatatatggtggcacagtcaccaacctaagccattgcatccacccctctggcaaactcccagcaaactcaccaactttgcaagttgcaggggctacaaaactcccggatttattttgcagatgaggaagagttggtgacagttctaaattggagctgccacaacactgtctaagtacctgtccttgggcaattaacttgtacagaaaaaaatatgtattaaacaaaacaagccttg

SEQ ID NO: 302374 - DNA, 215 bp, Homo sapiens
cgacgcgtgcccacgcgtccggcagcagaagggggtggtgtctccaaccccccagcactgaggaagaacggggctcttctcatttcacccctccctttctcccctgcccccaggactgggccacttctgggtggggcagtgggtcccagattggctcacactgagaatgtaagaactacaaacaaaatttctattaaattaaattttgtgtctcc

SEQ ID NO: 302375 - DNA, 337 bp, Homo sapiens
cttcttcctcctccttaagcctctgctcctcgtcctgtttgtccttcatttgtttctctgctgccttggatccacccagaaattgacaaccccgagtattctcccgatcccagtatctatgcctatgataactttggcgtgctgggcctggacctctggcaggtcaagtctggcaccatctttgacaacttcctcatcaccaacgatgaggcatacgctgaggagtttggcaacgagacgtggggcgtaacaaagcagcagagaaacaaatgaaggacaaacaggtccagggcagaggaccaacgtcgacgcggccgcgaatttagtagtagtagcc

SEQ ID NO: 302376 - DNA, 477 bp, Homo sapiens
  misc_feature (157)..(157): n is a, c, g, or t
aactcgggaccccctttgttgtatccgtggtggtaactgtgggtcactgcctgtgcacgggattgccagtaattggaggaggatatgatagcacagataatctctgtcagaactgtgacaaatcaaaggcggtcccggtttaacccgggaccccctntgattcagaacctgagtacaaggtgagtggaagccccggcagatcgacaacccagattacaagggcacttggatccacccagaaattgacaaccccgagtattctcccgatcccagtatctatgcctatgataactttggcgtgctgggcctggacctctggcaggtcaagtctggcaccatctttgacaacttcctcatcaccaacgatgaggcatacgctgaggagtttggcaacgagacgtggggcgtaacaaagcagcagagaaacaaatgaaggacaaacaggcctctggagttggacaggcctctggagttggg

SEQ ID NO: 302377 - DNA, 1839 bp, Homo sapiens
agaggtatcccttcctgattcgcgaagactagcttgcgcatcctctggctggccgtcgccgagcctgccgtctacttcaaggagcagtttctggacggagacgggtggacttcccgctggatcgaatccaaacacaagtcagattttggcaaattcgttctcagttccggcaagttctacggtgacgaggagaaagataaaggtttgcagacaagccaggatgcacgcttttatgctctgtcggccagtttcgagcctttcagcaacaaaggccagacgctggtggtgcagttcacggtgaaacatgagcagaacatcgactgtgggggcggctatgtgaagctgtttcctaatagtttggaccagacagacatgcacggagactcagaatacaacatcatgtttggtcccgacatctgtggccctggcaccaagaaggttcatgtcatcttcaactacaagggcaagaacgtgctgatcaacaaggacatccgttgcaaggatgatgagtttacacacctgtacacactgattgtgcggccagacaacacctatgaggtgaagattgacaacagccaggtggagtccggctccttggaagacgattgggacttcctgccacccaagaagataaaggatcctgatgcttcaaaaccggaagactgggatgagcgggccaagatcgatgatcccacagactccaagcctgaggactgggacaagcccgagcatatccctgaccctgatgctaagaagcccgaggactgggatgaagagatggacggagagtgggaacccccagtgattcagaaccctgagtacaagggtgagtggaagccccggcagatcgacaacccagattacaagggcacttggatccacccagaaattgacaaccccgagtattctcccgatcccagtatctatgcctatgataactttggcgtgctgggcctggacctctggcaggtcaagtctggcaccatctttgacaacttcctcatcaccaacgatgaggcatacgctgaggagtttggcaacgagacgtggggcgtaacaaaggcagcagagaaacaaatgaaggacaaacaggacgaggagcagaggcttaaggaggaggaagaagacaagaaacgcaaagaggaggaggaggcagaggacaaggaggatgatgaggacaaagatgaggatgaggaggatgaggaggacaaggaggaagatgaggaggaagatgtccccggccaggccaaggacgagctgtagagaggcctgcctccagggctggactgaggcctgagcgctcctgccgcagagcttgccgcgccaaataatgtctctgtgagactcgagaactttcatttttttccaggctggttcggatttggggtggattttggttttgttcccctcctccactctcccccaccccctccccgccctttttttttttttttttaaactggtattttatctttgattctccttcagccctcacccctggttctcatctttcttgatcaacatcttttcttgcctctgtccccttctctcatctcttagctcccctccaacctggggggcagtggtgtggagaagccacaggcctgagatttcatctgctctccttcctggagcccagaggagggcagcagaagggggtggtgtctccaaccccccagcactgaggaagaacggggctcttctcatttcacccctccctttctcccctgcccccaggactgggccacttctgggtggggcagtgggtcccagattggctcacactgagaatgtaagaactacaaacaaaatttctattaaattaaattttgtgtctcc

SEQ ID NO: 302378 - DNA, 2327 bp, Homo sapiens
agaggtatcccttcctgattcgcgaagactagcttgcgcatcctctggctggccgtcgccgagcctgccgtctacttcaaggagcagtttctggacggagacgggtggacttcccgctggatcgaatccaaacacaagtcagattttggcaaattcgttctcagttccggcaagttctacggtgacgaggagaaagataaaggtttgcagacaagccaggatgcacgcttttatgctctgtcggccagtttcgagcctttcagcaacaaaggccagacgctggtggtgcagttcacggtgaaacatgagcagaacatcgactgtgggggcggctatgtgaagctgtttcctaatagtttggaccagacagacatgcacggagactcagaatacaacatcatgtttggtcccgacatctgtggccctggcaccaagaaggttcatgtcatcttcaactacaagggcaagaacgtgctgatcaacaaggacatccgttgcaaggatgatgagtttacacacctgtacacactgattgtgcggccagacaacacctatgaggtgaagattgacaacagccaggtggagtccggctccttggaagacgattgggacttcctgccacccaagaagataaaggatcctgatgcttcaaaaccggaagactgggatgagcgggccaagatcgatgatcccacagactccaagcctgaggactgggacaagcccgagcatatccctgaccctgatgctaagaagcccgaggactgggatgaagagatggacggagagtgggaacccccagtgattcagaaccctgagtacaagggtgagtggaagccccggcagatcgacaacccagattacaagggcacttggatccacccagaaattgacaaccccgagtattctcccgatcccagtatctatgcctatgataactttggcgtgctgggcctggacctctggcaggtcaagtctggcaccatctttgacaacttcctcatcaccaacgatgaggcatacgctgaggagtttggcaacgagacgtggggcgtaacaaaggcagcagagaaacaaatgaaggacaaacaggacgaggagcagaggcttaaggaggaggaagaagacaagaaacgcaaagaggaggaggaggcagaggacaaggaggatgatgaggacaaagatgaggatgaggaggatgaggaggacaaggaggaagatgaggaggaagatgtccccggccaggccaaggacgagctgtagagaggcctgcctccagggctggactgaggcctgagcgctcctgccgcagagcttgccgcgccaaataatgtctctgtgagactcgagaactttcatttttttccaggctggttcggatttggggtggattttggttttgttcccctcctccactctcccccaccccctccccgccctttttttttttttttttaaactggtattttatctttgattctccttcagccctcacccctggttctcatctttcttgatcaacatcttttcttgcctctgtccccttctctcatctcttagctcccctccaacctggggggcagtggtgtggagaagccacaggcctgagatttcatctgctctccttcctggagcccagaggagggcagcagaagggggtggtgtctccaaccccccagcactgaggaagaacggggctcttctcatttcacccctccctttctcccctgcccccaggactgggccacttctgggtggggcagtgggtcccagattggctcacactgagaatgtaagaactacaaacaaaatttctattaaattaaattttgtgtctccaaaaaaaaaaaaaaaaaaaaaaaaaaaaaagagggggggcgcgccccaagaagtttcccccgcggggggccccagttttccgcgcgttccccggttttttgtgttccaagggtggtcccctattggggggagcccgctattatattagagccatgaggccagcggggccgcgcgcggttttcaccaacgcgttcggggactgtggggaagacacgcggccttagccgtgggggcacccttctgtggggaagggaaccctttactttcgtggggcgtgggcacttatttgggcccaaattctacctctccgagagagatataaaaggctctccaaggggaactttacttaacatttttaagcggggtgttttacggggtgttaacacctatgggtggaattatgcctggcgggtctggaaaggtttgggcctaagcggggtattggattttgtgacaacttttttccgcgggctttttgacataaatac

SEQ ID NO: 302379 - DNA, 2275 bp, Homo sapiens
  misc_feature (2063)..(2063): n is a, c, g, or t
  misc_feature (2170)..(2170): n is a, c, g, or t
agaggtatcccttcctgattcgcgaagactagcttgcgcatcctctggctggccgtcgccgagcctgccgtctacttcaaggagcagtttctggacggagacgggtggacttcccgctggatcgaatccaaacacaagtcagattttggcaaattcgttctcagttccggcaagttctacggtgacgaggagaaagataaaggtttgcagacaagccaggatgcacgcttttatgctctgtcggccagtttcgagcctttcagcaacaaaggccagacgctggtggtgcagttcacggtgaaacatgagcagaacatcgactgtgggggcggctatgtgaagctgtttcctaatagtttggaccagacagacatgcacggagactcagaatacaacatcatgtttggtcccgacatctgtggccctggcaccaagaaggttcatgtcatcttcaactacaagggcaagaacgtgctgatcaacaaggacatccgttgcaaggatgatgagtttacacacctgtacacactgattgtgcggccagacaacacctatgaggtgaagattgacaacagccaggtggagtccggctccttggaagacgattgggacttcctgccacccaagaagataaaggatcctgatgcttcaaaaccggaagactgggatgagcgggccaagatcgatgatcccacagactccaagcctgaggactgggacaagcccgagcatatccctgaccctgatgctaagaagcccgaggactgggatgaagagatggacggagagtgggaacccccagtgattcagaaccctgagtacaagggtgagtggaagccccggcagatcgacaacccagattacaagggcacttggatccacccagaaattgacaaccccgagtattctcccgatcccagtatctatgcctatgataactttggcgtgctgggcctggacctctggcaggtcaagtctggcaccatctttgacaacttcctcatcaccaacgatgaggcatacgctgaggagtttggcaacgagacgtggggcgtaacaaaggcagcagagaaacaaatgaaggacaaacaggacgaggagcagaggcttaaggaggaggaagaagacaagaaacgcaaagaggaggaggaggcagaggacaaggaggatgatgaggacaaagatgaggatgaggaggatgaggaggacaaggaggaagatgaggaggaagatgtccccggccaggccaaggacgagctgtagagaggcctgcctccagggctggactgaggcctgagcgctcctgccgcagagcttgccgcgccaaataatgtctctgtgagactcgagaactttcatttttttccaggctggttcggatttggggtggattttggttttgttcccctcctccactctcccccaccccctccccgccctttttttttttttttttaaactggtattttatctttgattctccttcagccctcacccctggttctcatctttcttgatcaacatcttttcttgcctctgtccccttctctcatctcttagctcccctccaacctggggggcagtggtgtggagaagccacaggcctgagatttcatctgctctccttcctggagcccagaggagggcagcagaagggggtggtgtctccaaccccccagcactgaggaagaacggggctcttctcatttcacccctccctttctcccctgcccccaggactgggccacttctgggtggggcagtgggtcccagattggctcacactgagaatgtaagaactacaaacaaaatttctattaaattaaattttgtgtctccaaaaaaaaaaaaaaaaaaaaaaaaaaaaaaaaaaaaaaaaaaaaaaaaaaaaaaaaaaaaaaaaaaaagtgggggggtttttttgtggggtggcggggaaaaacaggggtataagtagaaaggtgggcgccacgtgtgtggtccgatgtagggtgtgtttcctgtgagacccaagattttttcttgtgtacaacaaaggggtgtggtaaatatctcgtgggggngagcgtctcgcacctaatagtaagggggagagcgaccgagttatttaaaatatctttcgagagaataagacgcacgccaggtgattatgcccacgcgtttgtttatnttatgttaaactagctcgatgctgaaggacagaaagtagtgcgaatccgatacttagacacagagaagtcagaatgagaactgattggactatatcaacatgagg

SEQ ID NO: 302380 - DNA, 1816 bp, Homo sapiens
agaggtatcccttcctgattcgcgaagactagcttgcgcatcctctggctggccgtcgccgagcctgccgtctacttcaaggagcagtttctggacggagacgggtggacttcccgctggatcgaatccaaacacaagtcagattttggcaaattcgttctcagttccggcaagttctacggtgacgaggagaaagataaaggtttgcagacaagccaggatgcacgcttttatgctctgtcggccagtttcgagcctttcagcaacaaaggccagacgctggtggtgcagttcacggtgaaacatgagcagaacatcgactgtgggggcggctatgtgaagctgtttcctaatagtttggaccagacagacatgcacggagactcagaatacaacatcatgtttggtcccgacatctgtggccctggcaccaagaaggttcatgtcatcttcaactacaagggcaagaacgtgctgatcaacaaggacatccgttgcaaggatgatgagtttacacacctgtacacactgattgtgcggccagacaacacctatgaggtgaagattgacaacagccaggtggagtccggctccttggaagacgattgggacttcctgccacccaagaagataaaggatcctgatgcttcaaaaccggaagactgggatgagcgggccaagatcgatgatcccacagactccaagcctgaggactgggacaagcccgagcatatccctgaccctgatgctaagaagcccgaggactgggatgaagagatggacggagagtgggaacccccagtgattcagaaccctgagtacaagggtgagtggaagccccggcagatcgacaacccagattacaagggcacttggatccacccagaaattgacaaccccgagtattctcccgatcccagtatctatgcctatgataactttggcgtgctgggcctggacctctggcaggtcaagtctggcaccatctttgacaacttcctcatcaccaacgatgaggcatacgctgaggagtttggcaacgagacgtggggcgtaacaaaggcagcagagaaacaaatgaaggacaaacaggacgaggagcagaggcttaaggaggaggaagaagacaagaaacgacaaggaggatgatgaggacaaagatgaggatgaggaggatgaggaggacaaggaggaagatgaggaggaagatgtccccggccaggccaaggacgagctgtagagaggcctgcctccagggctggactgaggcctgagcgctcctgccgcagagcttgccgcgccaaataatgtctctgtgagactcgagaactttcatttttttccaggctggttcggatttggggtggattttggttttgttcccctcctccactctcccccaccccctccccgccctttttttttttttttttaaactggtattttatctttgattctccttcagccctcacccctggttctcatctttcttgatcaacatcttttcttgcctctgtccccttctctcatctcttagctcccctccaacctggggggcagtggtgtggagaagccacaggcctgagatttcatctgctctccttcctggagcccagaggagggcagcagaagggggtggtgtctccaaccccccagcactgaggaagaacggggctcttctcatttcacccctccctttctcccctgcccccaggactgggccacttctgggtggggcagtgggtcccagattggctcacactgagaatgtaagaactacaaacaaaatttctattaaattaaattttgtgtctcc

SEQ ID NO: 302381 - DNA, 1863 bp, Homo sapiens
agaggtatcccttcctgattcgcgaagactagcttgcgcatcctctggctggccgtcgccgagcctgccgtctacttcaaggagcagtttctggacggagacgggtggacttcccgctggatcgaatccaaacacaagtcagattttggcaaattcgttctcagttccggcaagttctacggtgacgaggagaaagataaaggtttgcagacaagccaggatgcacgcttttatgctctgtcggccagtttcgagcctttcagcaacaaaggccagacgctggtggtgcagttcacggtgaaacatgagcagaacatcgactgtgggggcggctatgtgaagctgtttcctaatagtttggaccagacagacatgcacggagactcagaatacaacatcatgtttggtcccgacatctgtggccctggcaccaagaaggttcatgtcatcttcaactacaagggcaagaacgtgctgatcaacaaggacatccgttgcaaggatgatgagtttacacacctgtacacactgattgtgcggccagacaacacctatgaggtgaagattgacaacagccaggtggagtccggctccttggaagacgattgggacttcctgccacccaagaagataaaggatcctgatgcttcaaaaccggaagactgggatgagcgggccaagatcgatgatcccacagactccaagcctgaggactgggacaagcccgagcatatccctgaccctgatgctaagaagcccgaggactgggatgaagagatggacggagagtgggaacccccagtgattcagaaccctgagtacaagggtgagtggaagccccggcagatcgacaacccagattacaagggcacttggatccacccagaaattgacaaccccgagtattctcccgatcccagtatctatgcctatgataactttggcgtgctgggcctggacctctggcaggtcaagtctggcaccatctttgacaacttcctcatcaccaacgatgaggcatacgctgaggagtttggcaacgagacgtggggcgtaacaaaggcagcagagaaacaaatgaaggacaaacaggacgaggagcagaggcttaaggaggaggaagaagacaagaaacgcaaagaggaggaggaggcagaggacaaggaggatgatgaggacaaagatgaggatgaggaggatgaggaggacaaggaggaagatgaggaggaagatgtccccggccaggccaaggacgagctgtagagaggcctgcctccagggctggactgaggcctgagcgctcctgccgcagagcttgccgcgccaaataatgtctctgtgagactcgagaactttcatttttttccaggctggttcggatttggggtggattttggttttgttcccctcctccactctcccccaccccctccccgccctttttttttttttttttaaactggtattttatctttgattctccttcagccctcacccctggttctcatctttcttgatcaacatcttttcttgcctctgtccccttctctcatctcttagctcccctccaacctggggggcagtggtgtggagaagccacaggcctgagatttcatctgctctccttcctggagcccagaggagggcagcagaagggggtggtgtctccaaccccccagcactgaggaagaacggggctcttctcatttcacccctccctttctcccctgcccccaggactgggccacttctgggtggggcagtgggtcccagattggctcacactgagaatgtaagaactacaaacaaaatttctattaaattaaattttgtgtctccaaaaaaaacctgcagcccggggga

SEQ ID NO: 302382 - DNA, 1880 bp, Homo sapiens
agaggtatcccttcctgattcgcgaagactagcttgcgcatcctctggctggccgtcgccgagcctgccgtctacttcaaggagcagtttctggacggagacgggtggacttcccgctggatcgaatccaaacacaagtcagattttggcaaattcgttctcagttccggcaagttctacggtgacgaggagaaagataaaggtttgcagacaagccaggatgcacgcttttatgctctgtcggccagtttcgagcctttcagcaacaaaggccagacgctggtggtgcagttcacggtgaaacatgagcagaacatcgactgtgggggcggctatgtgaagctgtttcctaatagtttggaccagacagacatgcacggagactcagaatacaacatcatgtttggtcccgacatctgtggccctggcaccaagaaggttcatgtcatcttcaactacaagggcaagaacgtgctgatcaacaaggacatccgttgcaaggatgatgagtttacacacctgtacacactgattgtgcggccagacaacacctatgaggtgaagattgacaacagccaggtggagtccggctccttggaagacgattgggacttcctgccacccaagaagataaaggatcctgatgcttcaaaaccggaagactgggatgagcgggccaagatcgatgatcccacagactccaagcctgaggactgggacaagcccgagcatatccctgaccctgatgctaagaagcccgaggactgggatgaagagatggacggagagtgggaacccccagtgattcagaaccctgagtacaagggtgagtggaagccccggcagatcgacaacccagattacaagggcacttggatccacccagaaattgacaaccccgagtattctcccgatcccagtatctatgcctatgataactttggcgtgctgggcctggacctctggcaggtcaagtctggcaccatctttgacaacttcctcatcaccaacgatgaggcatacgctgaggagtttggcaacgagacgtggggcgtaacaaaggcagcagagaaacaaatgaaggacaaacaggacgaggagcagaggcttaaggaggaggaagaagacaagaaacgcaaagaggaggaggaggcagaggacaaggaggatgatgaggacaaagatgaggatgaggaggatgaggaggacaaggaggaagatgaggaggaagatgtccccggccaggccaaggacgagctgtagagaggcctgcctccagggctggactgaggcctgagcgctcctgccgcagagcttgccgcgccaaataatgtctctgtgagactcgagaactttcatttttttccaggctggttcggatttggggtggattttggttttgttcccctcctccactctcccccaccccctccccgccctttttttttttttttttaaactggtattttatctttgattctccttcagccctcacccctggttctcatctttcttgatcaacatcttttcttgcctctgtccccttctctcatctcttagctcccctccaacctggggggcagtggtgtggagaagccacaggcctgagatttcatctgctctccttcctggagcccagaggagggcagcagaagggggtggtgtctccaaccccccagcactgaggaagaacggggctcttctcatttcacccctccctttctcccctgcccccaggactgggccacttctgggtggggcagtgggtcccagattggctcacactgagaatgtaagaactacaaacaaaatttctattaaattaaattttgtgtctcctccctcctgtgtctccttctggggaaagacagacttaagga

SEQ ID NO: 302383 - DNA, 2245 bp, Homo sapiens
  misc_feature (2033)..(2033): n is a, c, g, or t
  misc_feature (2140)..(2140): n is a, c, g, or t
agaggtatcccttcctgattcgcgaagactagcttgcgcatcctctggctggccgtcgccgagcctgccgtctacttcaaggagcagtttctggacggagacgggtggacttcccgctggatcgaatccaaacacaagtcagattttggcaaattcgttctcagttccggcaagttctacggtgacgaggagaaagataaaggtttgcagacaagccaggatgcacgcttttatgctctgtcggccagtttcgagcctttcagcaacaaaggccagacgctggtggtgcagttcacggtgaaacatgagcagaacatcgactgtgggggcggctatgtgaagctgtttcctaatagtttggaccagacagacatgcacggagactcagaatacaacatcatgtttggtcccgacatctgtggccctggcaccaagaaggttcatgtcatcttcaactacaagggcaagaacgtgctgatcaacaaggacatccgttgcaaggatgatgagtttacacacctgtacacactgattgtgcggccagacaacacctatgaggtgaagattgacaacagccaggtggagtccggctccttggaagacgattgggacttcctgccacccaagaagataaaggatcctgatgcttcaaaaccggaagactgggatgagcgggccaagatcgatgatcccacagactccaagcctgaggactgggacaagcccgagcatatccctgaccctgatgctaagaagcccgaggactgggatgaagagatggacggagagtgggaacccccagtgattcagaaccctgagtacaagggtgagtggaagccccggcagatcgacaacccagattacaagggcacttggatccacccagaaattgacaaccccgagtattctcccgatcccagtatctatgcctatgataactttggcgtgctgggcctggacctctggcaggtcaagtctggcaccatctttgacaacttcctcatcaccaacgatgaggcatacgctgaggagtttggcaacgagacgtggggcgtaacaaaggcagcagagaaacaaatgaaggacaaacaggacgaggagcagaggcttaaggaggaggaagaagacaagaaacgcaaagaggaggaggaggcagaggacaaggaggatgatgaggacaaagatgaggatgaggaggatgaggaggacaaggaggaagatgaggaggaagatgtccccggccaggccaaggacgagctgtagagaggcctgcctccagggctggactgaggcctgagcgctcctgccgcagagcttgccgcgccaaataatgtctctgtgagactcgagaactttcatttttttccaggctggttcggatttggggtggattttggttttgttcccctcctccactctcccccaccccctccccgccctttttttttttttttttaaactggtattttatctttgattctccttcagccctcacccctggttctcatctttcttgatcaacatcttttcttgcctctgtccccttctctcatctcttagctcccctccaacctggggggcagtggtgtggagaagccacaggcctgagatttcatctgctctccttcctggagcccagaggagggcagcagaagggggtggtgtctccaaccccccagcactgaggaagaacggggctcttctcatttcacccctccctttctcccctgcccccaggactgggccacttctgggtggggcagtgggtcccagattggctcacactgagaatgtaagaactacaaacaaaatttctattaaattaaattttgtgtctccaaaaaaaaaaaaaaaaaaaaaaaaaaaaaaaaaaaaaagtgggggggtttttttgtggggtggcggggaaaaacaggggtataagtagaaaggtgggcgccacgtgtgtggtccgatgtagggtgtgtttcctgtgagacccaagattttttcttgtgtacaacaaaggggtgtggtaaatatctcgtgggggngagcgtctcgcacctaatagtaagggggagagcgaccgagttatttaaaatatctttcgagagaataagacgcacgccaggtgattatgcccacgcgtttgtttatnttatgttaaactagctcgatgctgaaggacagaaagtagtgcgaatccgatacttagacacagagaagtcagaatgagaactgattggactatatcaacatgagg

SEQ ID NO: 302384 - DNA, 1872 bp, Homo sapiens
agaggtatcccttcctgattcgcgaagactagcttgcgcatcctctggctggccgtcgccgagcctgccgtctacttcaaggagcagtttctggacggagacgggtggacttcccgctggatcgaatccaaacacaagtcagattttggcaaattcgttctcagttccggcaagttctacggtgacgaggagaaagataaaggtttgcagacaagccaggatgcacgcttttatgctctgtcggccagtttcgagcctttcagcaacaaaggccagacgctggtggtgcagttcacggtgaaacatgagcagaacatcgactgtgggggcggctatgtgaagctgtttcctaatagtttggaccagacagacatgcacggagactcagaatacaacatcatgtttggtcccgacatctgtggccctggcaccaagaaggttcatgtcatcttcaactacaagggcaagaacgtgctgatcaacaaggacatccgttgcaaggatgatgagtttacacacctgtacacactgattgtgcggccagacaacacctatgaggtgaagattgacaacagccaggtggagtccggctccttggaagacgattgggacttcctgccacccaagaagataaaggatcctgatgcttcaaaaccggaagactgggatgagcgggccaagatcgatgatcccacagactccaagcctgaggactgggacaagcccgagcatatccctgaccctgatgctaagaagcccgaggactgggatgaagagatggacggagagtgggaacccccagtgattcagaaccctgagtacaagggtgagtggaagccccggcagatcgacaacccagattacaagggcacttggatccacccagaaattgacaaccccgagtattctcccgatcccagtatctatgcctatgataactttggcgtgctgggcctggacctctggcaggtcaagtctggcaccatctttgacaacttcctcatcaccaacgatgaggcatacgctgaggagtttggcaacgagacgtggggcgtaacaaaggcagcagagaaacaaatgaaggacaaacaggacgaggagcagaggcttaaggaggaggaagaagacaagaaacgcaaagaggaggaggaggcagaggacaaggaggatgatgaggacaaagatgaggatgaggaggatgaggaggacaaggaggaagatgaggaggaagatgtccccggccaggccaaggacgagctgtagagaggcctgcctccagggctggactgaggcctgagcgctcctgccgcagagcttgccgcgccaaataatgtctctgtgagactcgagaactttcatttttttccaggctggttcggatttggggtggattttggttttgttcccctcctccactctcccccaccccctccccgccctttttttttttttttttaaactggtattttatctttgattctccttcagccctcacccctggttctcatctttcttgatcaacatcttttcttgcctctgtccccttctctcatctcttagctcccctccaacctggggggcagtggtgtggagaagccacaggcctgagatttcatctgctctccttcctggagcccagaggagggcagcagaagggggtggtgtctccaaccccccagcactgaggaagaacggggctcttctcatttcacccctccctttctcccctgcccccaggactgggccacttctgggtggggcagtgggtcccagattggctcacactgagaatgtaagaactacaaacaaaatttctattaaattaaattttgtgtctccgtcgacgcggccgcgaatttagtagtagtagcc

SEQ ID NO: 302385 - DNA, 1863 bp, Homo sapiens
agaggtatcccttcctgattcgcgaagactagcttgcgcatcctctggctggccgtcgccgagcctgccgtctacttcaaggagcagtttctggacggagacgggtggacttcccgctggatcgaatccaaacacaagtcagattttggcaaattcgttctcagttccggcaagttctacggtgacgaggagaaagataaaggtttgcagacaagccaggatgcacgcttttatgctctgtcggccagtttcgagcctttcagcaacaaaggccagacgctggtggtgcagttcacggtgaaacatgagcagaacatcgactgtgggggcggctatgtgaagctgtttcctaatagtttggaccagacagacatgcacggagactcagaatacaacatcatgtttggtcccgacatctgtggccctggcaccaagaaggttcatgtcatcttcaactacaagggcaagaacgtgctgatcaacaaggacatccgttgcaaggatgatgagtttacacacctgtacacactgattgtgcggccagacaacacctatgaggtgaagattgacaacagccaggtggagtccggctccttggaagacgattgggacttcctgccacccaagaagataaaggatcctgatgcttcaaaaccggaagactgggatgagcgggccaagatcgatgatcccacagactccaagcctgaggactgggacaagcccgagcatatccctgaccctgatgctaagaagcccgaggactgggatgaagagatggacggagagtgggaacccccagtgattcagaaccctgagtacaagggtgagtggaagccccggcagatcgacaacccagattacaagggcacttggatccacccagaaattgacaaccccgagtattctcccgatcccagtatctatgcctatgataactttggcgtgctgggcctggacctctggcaggtcaagtctggcaccatctttgacaacttcctcatcaccaacgatgaggcatacgctgaggagtttggcaacgagacgtggggcgtaacaaaggcagcagagaaacaaatgaaggacaaacaggacgaggagcagaggcttaaggaggaggaagaagacaagaaacgcaaagaggaggaggaggcagaggacaaggaggatgatgaggacaaagatgaggatgaggaggatgaggaggacaaggaggaagatgaggaggaagatgtccccggccaggccaaggacgagctgtagagaggcctgcctccagggctggactgaggcctgagcgctcctgccgcagagcttgccgcgccaaataatgtctctgtgagactcgagaactttcatttttttccaggctggttcggatttggggtggattttggttttgttcccctcctccactctcccccaccccctccccgccctttttttttttttttttaaactggtattttatctttgattctccttcagccctcacccctggttctcatctttcttgatcaacatcttttcttgcctctgtccccttctctcatctcttagctcccctccaacctggggggcagtggtgtggagaagccacaggcctgagatttcatctgctctccttcctggagcccagaggagggcagcagaagggggtggtgtctccaaccccccagcactgaggaagaacggggctcttctcatttcacccctccctttctcccctgcccccaggactgggccacttctgggtggggcagtgggtcccagattggctcacactgagaatgtaagaactacaaacaaaatttctattaaattaaattttgtgtctccaaaaaaaaaaaaaaaaaaaaaaaa

SEQ ID NO: 302386 - DNA, 1713 bp, Homo sapiens
agaggtatcccttcctgattcgcgaagactagcttgcgcatcctctggctggccgtcgccgagcctgccgtctacttcaaggagcagtttctggacggagacgggtggacttcccgctggatcgaatccaaacacaagtcagattttggcaaattcgttctcagttccggcaagttctacggtgacgaggagaaagataaaggtttgcagacaagccaggatgcacgcttttatgctctgtcggccagtttcgagcctttcagcaacaaaggccagacgctggtggtgcagttcacggtgaaacatgagcagaacatcgactgtgggggcggctatgtgaagctgtttcctaatagtttggaccagacagacatgcacggagactcagaatacaacatcatgtttggtcccgacatctgtggccctggcaccaagaaggttcatgtcatcttcaactacaagggcaagaacgtgctgatcaacaaggacatccgttgcaaggatgatgagtttacacacctgtacacactgattgtgcggccagacaacacctatgaggtgaagattgacaacagccaggtggagtccggctccttggaagacgattgggacttcctgccacccaagaagataaaggatcctgatgcttcaaaaccggaagactgggatgagcgggccaagatcgatgatcccacagactccaagcctgaggactgggacaagcccgagcatatccctgaccctgatgctaagaagcccgaggactgggatgaagagatggacggagagtgggaacccccagtgattcagaaccctgagtacaagggtgagtggaagccccggcagatcgacaacccagattacaagggcacttggatccacccagaaattgacaaccccgagtattctcccgatcccagtatctatgcctatgataactttggcgtgctgggcctggacctctggcaggtcaagtctggcaccatctttgacaacttcctcatcaccaacgatgaggcatacgctgaggagtttggcaacgagacgtggggcgtaacaaaggatgaggaggatgaggaggacaaggaggaagatgaggaggaagatgtccccggccaggccaaggacgagctgtagagaggcctgcctccagggctggactgaggcctgagcgctcctgccgcagagcttgccgcgccaaataatgtctctgtgagactcgagaactttcatttttttccaggctggttcggatttggggtggattttggttttgttcccctcctccactctcccccaccccctccccgccctttttttttttttttttaaactggtattttatctttgattctccttcagccctcacccctggttctcatctttcttgatcaacatcttttcttgcctctgtccccttctctcatctcttagctcccctccaacctggggggcagtggtgtggagaagccacaggcctgagatttcatctgctctccttcctggagcccagaggagggcagcagaagggggtggtgtctccaaccccccagcactgaggaagaacggggctcttctcatttcacccctccctttctcccctgcccccaggactgggccacttctgggtggggcagtgggtcccagattggctcacactgagaatgtaagaactacaaacaaaatttctattaaattaaattttgtgtctcc

SEQ ID NO: 302387 - DNA, 1700 bp, Homo sapiens
agaggtatcccttcctgattcgcgaagactagcttgcgcatcctctggctggccgtcgccgagcctgccgtctacttcaaggagcagtttctggacggagacgggtggacttcccgctggatcgaatccaaacacaagtcagattttggcaaattcgttctcagttccggcaagttctacggtgacgaggagaaagataaaggtttgcagacaagccaggatgcacgcttttatgctctgtcggccagtttcgagcctttcagcaacaaaggccagacgctggtggtgcagttcacggtgaaacatgagcagaacatcgactgtgggggcggctatgtgaagctgtttcctaatagtttggaccagacagacatgcacggagactcagaatacaacatcatgtttggtcccgacatctgtggccctggcaccaagaaggttcatgtcatcttcaactacaagggcaagaacgtgctgatcaacaaggacatccgttgcaaggatgatgagtttacacacctgtacacactgattgtgcggccagacaacacctatgaggtgaagattgacaacagccaggtggagtccggctccttggaagacgattgggacttcctgccacccaagaagataaaggatcctgatgcttcaaaaccggaagactgggatgagcgggccaagatcgatgatcccacagactccaagcctgaggactgggacaagcccgagcatatccctgaccctgatgctaagaagcccgaggactgggatgaagagatggacggagagtgggaacccccagtgattcagaaccctgagtacaagggtgagtggaagccccggcagatcgacaacccagattacaagggcacttggatccacccagaaattgacaaccccgagtattctcccgatcccagtatctatgcctatgataactttggcgtgctgggcctggacctctggcaggtcaagtctggcaccatctttgacaacttcctcatcaccaacgatgaggcatacgctgaggagtttggcaacgagacgtggggcgtaacaaaggcagcagagaaacaaatgaaggacaaacaggacgaggagcagaggcttaaggaggaggaagaagacaagaaacgcaaagaggaggaggaggcagaggacaaggaggatgatgaggacaaagatgaggatgaggaggatgaggaggacaaggaggaagatgaggaggaagatgtccccggccaggccaaggacgagctgtagagaggcctgcctccagggctggactgaggcctgagcgctcctgccgcagagcttgccgcgccaaataatgtctctgtgagactcgagaactttcatttttttccaggctggttcggatttggggtggattttggttttgttcccctcctccactctcccccaccccctccccgccctttttttttttttttttaaactggtattttatctttgattctccttcagccctcacccctggttctcatctttcttgatcaacatcttttcttgcctctgtccccttctctcatctcttagctcccctccaacctggggggcagtggtgtggagaagccacaggcctgagatttcatctgctctccttcctggagcccagaggagggaatgttttcatgttacttatactaacattagttcttctatagggtgatagatct

SEQ ID NO: 302388 - DNA, 1653 bp, Homo sapiens
agaggtatcccttcctgattcgcgaagactagcttgcgcatcctctggctggccgtcgccgagcctgccgtctacttcaaggagcagtttctggacggagacgggtggacttcccgctggatcgaatccaaacacaagtcagattttggcaaattcgttctcagttccggcaagttctacggtgacgaggagaaagataaaggtttgcagacaagccaggatgcacgcttttatgctctgtcggccagtttcgagcctttcagcaacaaaggccagacgctggtggtgcagttcacggtgaaacatgagcagaacatcgactgtgggggcggctatgtgaagctgtttcctaatagtttggaccagacagacatgcacggagactcagaatacaacatcatgtttggtcccgacatctgtggccctggcaccaagaaggttcatgtcatcttcaactacaagggcaagaacgtgctgatcaacaaggacatccgttgcaaggatgatgagtttacacacctgtacacactgattgtgcggccagacaacacctatgaggtgaagattgacaacagccaggtggagtccggctccttggaagacgattgggacttcctgccacccaagaagataaaggatcctgatgcttcaaaaccggaagactgggatgagcgggccaagatcgatgatcccacagactccaagcctgaggactgggacaagcccgagcatatccctgaccctgatgctaagaagcccgaggactgggatgaagagatggacggagagtgggaacccccagtgattcagaaccctgagtacaagggtgagtggaagccccggcagatcgacaacccagattacaagggcacttggatccacccagaaattgacaaccccgagtattctcccgatcccagtatctatgcctatgataactttggcgtgctgggcctggacctctggcaggtcaagtctggcaccatctttgacaacttcctcatcaccaacgatgaggcatacgctgaggagtttggcaacgagacgtggggcgtaacaaaggcagcagagaaacaaatgaaggacaaacaggacgaggagcagaggcttaaggaggaggaagaagacaagaaacgcaaagaggaggaggaggcagaggacaaggaggatgatgaggacaaagatgaggatgaggaggatgaggaggacaaggaggaagatgaggaggaagatgtccccggccaggccaaggacgagctgtagagaggcctgcctccagggctggactgaggcctgagcgctcctgccgcagagcttgccgcgccaaataatgtctctgtgagactcgagaactttcatttttttccaggctggttcggatttggggtggattttggttttgttcccctcctccactctcccccaccccctccccgccctttttttttttttttttaaactggtattttatctttgattctccttcagccctcacccctggttctcatctttcttgatcaacatcttttcttgcctctgtccccttctcaggactgggccacttctgggtggggcagtgggtcccagattggctcacactgagaatgtaagaactacaaacaaaatttctattaaattaaattttgtgtctcc

SEQ ID NO: 302389 - DNA, 1927 bp, Homo sapiens
agaggtatcccttcctgattcgcgaagactagcttgcgcatcctctggctggccgtcgccgagcctgccgtctacttcaaggagcagtttctggacggagacgggtggacttcccgctggatcgaatccaaacacaagtcagattttggcaaattcgttctcagttccggcaagttctacggtgacgaggagaaagataaaggtttgcagacaagccaggatgcacgcttttatgctctgtcggccagtttcgagcctttcagcaacaaaggccagacgctggtggtgcagttcacggtgaaacatgagcagaacatcgactgtgggggcggctatgtgaagctgtttcctaatagtttggaccagacagacatgcacggagactcagaatacaacatcatgtttggtcccgacatctgtggccctggcaccaagaaggttcatgtcatcttcaactacaagggcaagaacgtgctgatcaacaaggacatccgttgcaaggatgatgagtttacacacctgtacacactgattgtgcggccagacaacacctatgaggtgaagattgacaacagccaggtggagtccggctccttggaagacgattgggacttcctgccacccaagaagataaaggatcctgatgcttcaaaaccggaagactgggatgagcgggccaagatcgatgatcccacagactccaagcctgaggactgggacaagcccgagcatatccctgaccctgatgctaagaagcccgaggactgggatgaagagatggacggagagtgggaacccccagtgattcagaaccctgagtacaagggtgagtggaagccccggcagatcgacaacccagattacaagggcacttggatccacccagaaattgacaaccccgagtattctcccgatcccagtatctatgcctatgataactttggcgtgctgggcctggacctctggcaggtgagacttggaggaaaaaggaggatccctggggtacctcaagtgcataagatcacccaagaggaaagggacagggtaggcaccccaggtcaagtctggcaccatctttgacaacttcctcatcaccaacgatgaggcatacgctgaggagtttggcaacgagacgtggggcgtaacaaaggcagcagagaaacaaatgaaggacaaacaggacgaggagcagaggcttaaggaggaggaagaagacaagaaacgcaaagaggaggaggaggcagaggacaaggaggatgatgaggacaaagatgaggatgaggaggatgaggaggacaaggaggaagatgaggaggaagatgtccccggccaggccaaggacgagctgtagagaggcctgcctccagggctggactgaggcctgagcgctcctgccgcagagcttgccgcgccaaataatgtctctgtgagactcgagaactttcatttttttccaggctggttcggatttggggtggattttggttttgttcccctcctccactctcccccaccccctccccgccctttttttttttttttttaaactggtattttatctttgattctccttcagccctcacccctggttctcatctttcttgatcaacatcttttcttgcctctgtccccttctctcatctcttagctcccctccaacctggggggcagtggtgtggagaagccacaggcctgagatttcatctgctctccttcctggagcccagaggagggcagcagaagggggtggtgtctccaaccccccagcactgaggaagaacggggctcttctcatttcacccctccctttctcccctgcccccaggactgggccacttctgggtggggcagtgggtcccagattggctcacactgagaatgtaagaactacaaacaaaatttctattaaattaaattttgtgtctcc

SEQ ID NO: 302390 - DNA, 1538 bp, Homo sapiens
agaggtatcccttcctgattcgcgaagactagcttgcgcatcctctggctggccgtcgccgagcctgccgtctacttcaaggagcagtttctggacggagacgggtggacttcccgctggatcgaatccaaacacaagtcagattttggcaaattcgttctcagttccggcaagttctacggtgacgaggagaaagataaaggtttgcagacaagccaggatgcacgcttttatgctctgtcggccagtttcgagcctttcagcaacaaaggccagacgctggtggtgcagttcacggtgaaacatgagcagaacatcgactgtgggggcggctatgtgaagctgtttcctaatagtttggaccagacagacatgcacggagactcagaatacaacatcatgtttggtcccgacatctgtggccctggcaccaagaaggttcatgtcatcttcaactacaagggcaagaacgtgctgatcaacaaggacatccgttgcaaggatgatgagtttacacacctgtacacactgattgtgcggccagacaacacctatgaggtgaagattgacaacagccaggtggagtccggctccttggaagacgattgggacttcctgccacccaagaagataaaggatcctgatgcttcaaaaccggaagactgggatgagcgggccaagatcgatgatcccacagactccaagcctgaggactgggacaagcccgagcatatccctgaccctgatgctaagaagcccgaggactgggatgaagagatggacggagagtgggaacccccagtgattcagaaccctgagtacaagggtgagtggaagccccggcagatcgacaacccagattacaagggcacttggatccacccagaaattgacaaccccgagtattctcccgatcccagtatctatgcctatgataactttggcgtgctgggcctggacctctggcaggtcaagtctggcaccatctttgacaacttcctcatcaccaacgatgaggcatacgctgaggagtttggcaacgagacgtggggcgtaacaaaggcagcagagaaacaaatgaaggacaaacaggacgaggagcagaggcttaaggaggaggaagaagacaagaaacgcaaagaggaggaggaggcagaggacaaggaggatgatgaggacaaagatgaggatgaggaggatgaggaggacaaggaggaagatgaggaggaagatgtccccggccaggccaaggacgagctgtagagaggcctgcctccagggctggactgaggcctgagcgctcctgccgcagagcttgccgcgccaaataatgtctctgtgagactcgagaactttcatttttttccaggctggttcggatttggggtggattttggttttgttcccctcctccactctcccccgcctaccacacattcgaagaacccgtatacataaaatctagacaaaaaaggaaaaaaaaaaaaaaaaaaaaaaaaaaaaaaaaaaaaaaaaaaaaaaaaaaaaaaaaaaaaaaa

SEQ ID NO: 302391 - DNA, 1636 bp, Homo sapiens
agaggtatcccttcctgattcgcgaagactagcttgcgcatcctctggctggccgtcgccgagcctgccgtctacttcaaggagcagtttctggacggagacgggtggacttcccgctggatcgaatccaaacacaagtcagattttggcaaattcgttctcagttccggcaagttctacggtgacgaggagaaagataaaggtttgcagacaagccaggatgcacgcttttatgctctgtcggccagtttcgagcctttcagcaacaaaggccagacgctggtggtgcagttcacggtgaaacatgagcagaacatcgactgtgggggcggctatgtgaagctgtttcctaatagtttggaccagacagacatgcacggagactcagaatacaacatcatgtttggtcccgacatctgtggccctggcaccaagaaggttcatgtcatcttcaactacaagggcaagaacgtgctgatcaacaaggacatccgttgcaaggatgatgagtttacacacctgtacacactgattgtgcggccagacaacacctatgaggtgaagattgacaacagccaggtggagtccggctccttggaagacgattgggacttcctgccacccaagaagataaaggatcctgatgcttcaaaaccggaagactgggatgagcgggccaagatcgatgatcccacagactccaagcctgaggactgggacaagcccgagcatatccctgaccctgatgctaagaagcccgaggactgggatgaagagatggacggagagtgggaacccccagtgattcagaaccctgagtacaagggtgagtggaagccccggcagatcgacaacccagattacaagggcacttggatccacccagaaattgacaaccccgagtattctcccgatcccagtatctatgcctatgataactttggcgtgctgggcctggacctctggcaggtcaagtctggcaccatctttgacaacttcctcatcaccaacgatgaggcatacgctgaggagtttggcaacgagacgtggggcgtaacaaaggcagcagagaaacaaatgaaggacaaacaggacgaggagcagaggcttaaggaggaggaagaagacaagaaacgcaaagaggaggaggaggcagaggacaaggaggatgatgaggacaaagatgaggatgaggaggatgaggaggacaaggaggaagatgaggaggaagatgtccccggccaggccaaggacgagctgtagagaggcctgcctccagggctggactgaggcctgagcgctcctgccgcagagcttgccgcgccaaataatgtctctgtgagactcgagaactttcatttttttccaggctggttcggatttggggtggattttggttttgttcccctcctccactctcccccgccgactcgtccgcgcagaccgccatgcaccgcgacgcgcatggagctggtggggatataatcagacggcccgtggaatgccttcgtggtggcactctccaactgcatgatgctgctggctcgacgctgcgtgtccattgaggcaagcatgctgagcctatgtccctggtcccgttgcgctgcactgccgtgggggtctgtccagctgggtg

SEQ ID NO: 302392 - DNA, 1486 bp, Homo sapiens
agaggtatcccttcctgattcgcgaagactagcttgcgcatcctctggctggccgtcgccgagcctgccgtctacttcaaggagcagtttctggacggagacgggtggacttcccgctggatcgaatccaaacacaagtcagattttggcaaattcgttctcagttccggcaagttctacggtgacgaggagaaagataaaggtttgcagacaagccaggatgcacgcttttatgctctgtcggccagtttcgagcctttcagcaacaaaggccagacgctggtggtgcagttcacggtgaaacatgagcagaacatcgactgtgggggcggctatgtgaagctgtttcctaatagtttggaccagacagacatgcacggagactcagaatacaacatcatgtttggtcccgacatctgtggccctggcaccaagaaggttcatgtcatcttcaactacaagggcaagaacgtgctgatcaacaaggacatccgttgcaaggatgatgagtttacacacctgtacacactgattgtgcggccagacaacacctatgaggtgaagattgacaacagccaggtggagtccggctccttggaagacgattgggacttcctgccacccaagaagataaaggatcctgatgcttcaaaaccggaagactgggatgagcgggccaagatcgatgatcccacagactccaagcctgaggactgggacaagcccgagcatatccctgaccctgatgctaagaagcccgaggactgggatgaagagatggacggagagtgggaacccccagtgattcagaaccctgagtacaagggtgagtggaagccccggcagatcgacaacccagattacaagggcacttggatccacccagaaattgacaaccccgagtattctcccgatcccagtatctatgcctatgataactttggcgtgctgggcctggacctctggcaggtcaagtctggcaccatctttgacaacttcctcatcaccaacgatgaggcatacgctgaggagtttggcaacgagacgtggggcgtaacaaaggcagcagagaaacaaatgaaggacaaacaggacgaggagcagaggcttaaggaggaggaagaagacaagaaacgcaaagaggaggaggaggcagaggacaaggaggatgatgaggacaaagatgaggatgaggaggatgaggaggacaaggaggaagatgaggaggaagatgtccccggccaggccaaggacgagctgtagagaggcctgcctccagggctggactgaggcctgagcgctcctgccgcagagcttgccgcgccaaataatgtctctgtgagactcgagaactttcatttttttccaggctggttcggatttggggtggattttggttttgttcccctcctccactctccccctcatcctcatcttgtcctcatcatcctcctgtcctctgcctcctcctcctctttggttctgc

SEQ ID NO: 302393 - DNA, 1737 bp, Homo sapiens
  misc_feature (1354)..(1354): n is a, c, g, or t
  misc_feature (1386)..(1386): n is a, c, g, or t
agaggtatcccttcctgattcgcgaagactagcttgcgcatcctctggctggccgtcgccgagcctgccgtctacttcaaggagcagtttctggacggagacgggtggacttcccgctggatcgaatccaaacacaagtcagattttggcaaattcgttctcagttccggcaagttctacggtgacgaggagaaagataaaggtttgcagacaagccaggatgcacgcttttatgctctgtcggccagtttcgagcctttcagcaacaaaggccagacgctggtggtgcagttcacggtgaaacatgagcagaacatcgactgtgggggcggctatgtgaagctgtttcctaatagtttggaccagacagacatgcacggagactcagaatacaacatcatgtttggtcccgacatctgtggccctggcaccaagaaggttcatgtcatcttcaactacaagggcaagaacgtgctgatcaacaaggacatccgttgcaaggatgatgagtttacacacctgtacacactgattgtgcggccagacaacacctatgaggtgaagattgacaacagccaggtggagtccggctccttggaagacgattgggacttcctgccacccaagaagataaaggatcctgatgcttcaaaaccggaagactgggatgagcgggccaagatcgatgatcccacagactccaagcctgaggactgggacaagcccgagcatatccctgaccctgatgctaagaagcccgaggactgggatgaagagatggacggagagtgggaacccccagtgattcagaaccctgagtacaagggtgagtggaagccccggcagatcgacaacccagattacaagggcacttggatccacccagaaattgacaaccccgagtattctcccgatcccagtatctatgcctatgataactttggcgtgctgggcctggacctctggcaggtcaagtctggcaccatctttgacaacttcctcatcaccaacgatgaggcatacgctgaggagtttggcaacgagacgtggggcgtaacaaaggcagcagagaaacaaatgaaggacaaacaggacgaggagcagaggcttaaggaggaggaagaagacaagaaacgcaaagaggaggaggaggcagaggacaaggaggatgatgaggacaaagatgaggatgaggaggatgaggaggacaaggaggaagatgaggaggaagatgtccccggccaggccaaggacgagctgtagagaggcctgcctccagggctggactgaggcctgagcgctcctgccgcagagcttgccgcgccaaataatgtctctgtgagactcgagaaancccctttttttttcccactttttttttttttntttcccaccctggttctcatctttcttgatcaacatcttttcttgcctctgtccccttctctcatctcttagctcccctccaacctggggggcagtggtgtggagaagccacaggcctgagatttcatctgctctccttcctggagcccagaggagggcagcagaagggggtggtgtctccaaccccccagcactgaggaagaacggggctcttctcatttcacccctccctttctcccctgcccccaggactgggccacttctgggtggggcagtgggtcccagattggctcacactgagaatgtaagaactacaaacaaaatttctattaaattaaattttgtgtctcc

SEQ ID NO: 302394 - DNA, 1641 bp, Homo sapiens
agaggtatcccttcctgattcgcgaagactagcttgcgcatcctctggctggccgtcgccgagcctgccgtctacttcaaggagcagtttctggacggagacgggtggacttcccgctggatcgaatccaaacacaagtcagattttggcaaattcgttctcagttccggcaagttctacggtgacgaggagaaagataaaggtttgcagacaagccaggatgcacgcttttatgctctgtcggccagtttcgagcctttcagcaacaaaggccagacgctggtggtgcagttcacggtgaaacatgagcagaacatcgactgtgggggcggctatgtgaagctgtttcctaatagtttggaccagacagacatgcacggagactcagaatacaacatcatgtttggtcccgacatctgtggccctggcaccaagaaggttcatgtcatcttcaactacaagggcaagaacgtgctgatcaacaaggacatccgttgcaaggatgatgagtttacacacctgtacacactgattgtgcggccagacaacacctatgaggtgaagattgacaacagccaggtggagtccggctccttggaagacgattgggacttcctgccacccaagaagataaaggatcctgatgcttcaaaaccggaagactgggatgagcgggccaagatcgatgatcccacagactccaagcctgaggactgggacaagcccgagcatatccctgaccctgatgctaagaagcccgaggactgggatgaagagatggacggagagtgggaacccccagtgattcagaaccctgagtacaagggtgagtggaagccccggcagatcgacaacccagattacaagggcacttggatccacccagaaattgacaaccccgagtattctcccgatcccagtatctatgcctatgataactttggcgtgctgggcctggacctctggcaggtcaagtctggcaccatctttgacaacttcctcatcaccaacgatgaggcatacgctgaggagtttggcaacgagacgtggggcgtaacaaaggcagcagagaaacaaatgaaggacaaacaggacgaggagcagaggcttaaggaggaggaagaagacaagaaacgcaaagaggaggaggaggcagaggacaaggaggatgatgaggacaaagatgaggatgaggaggatgaggaggacaaggaggaagatgaggaggaagatgtccccggccaggccaaggacgagctgtagagaggcctgcctccagggctggactgaggcctgagcgctcctgccgcagagcttgccgcgccaaataatgtctctgtgagactcgagatcatctcttagctcccctccaacctggggggcagtggtgtggagaagccacaggcctgagatttcatctgctctccttcctggagcccagaggagggcagcagaagggggtggtgtctccaaccccccagcactgaggaagaacggggctcttctcatttcacccctccctttctcccctgcccccaggactgggccacttctgggtggggcagtgggtcccagattggctcacactgagaatgtaagaactacaaacaaaatttctattaaattaaattttgtgtctcc

SEQ ID NO: 302395 - DNA, 2129 bp, Homo sapiens
agaggtatcccttcctgattcgcgaagactagcttgcgcatcctctggctggccgtcgccgagcctgccgtctacttcaaggagcagtttctggacggagacgggtggacttcccgctggatcgaatccaaacacaagtcagattttggcaaattcgttctcagttccggcaagttctacggtgacgaggagaaagataaaggtttgcagacaagccaggatgcacgcttttatgctctgtcggccagtttcgagcctttcagcaacaaaggccagacgctggtggtgcagttcacggtgaaacatgagcagaacatcgactgtgggggcggctatgtgaagctgtttcctaatagtttggaccagacagacatgcacggagactcagaatacaacatcatgtttggtcccgacatctgtggccctggcaccaagaaggttcatgtcatcttcaactacaagggcaagaacgtgctgatcaacaaggacatccgttgcaaggatgatgagtttacacacctgtacacactgattgtgcggccagacaacacctatgaggtgaagattgacaacagccaggtggagtccggctccttggaagacgattgggacttcctgccacccaagaagataaaggatcctgatgcttcaaaaccggaagactgggatgagcgggccaagatcgatgatcccacagactccaagcctgaggactgggacaagcccgagcatatccctgaccctgatgctaagaagcccgaggactgggatgaagagatggacggagagtgggaacccccagtgattcagaaccctgagtacaagggtgagtggaagccccggcagatcgacaacccagattacaagggcacttggatccacccagaaattgacaaccccgagtattctcccgatcccagtatctatgcctatgataactttggcgtgctgggcctggacctctggcaggtcaagtctggcaccatctttgacaacttcctcatcaccaacgatgaggcatacgctgaggagtttggcaacgagacgtggggcgtaacaaaggcagcagagaaacaaatgaaggacaaacaggacgaggagcagaggcttaaggaggaggaagaagacaagaaacgcaaagaggaggaggaggcagaggacaaggaggatgatgaggacaaagatgaggatgaggaggatgaggaggacaaggaggaagatgaggaggaagatgtccccggccaggccaaggacgagctgtagagaggcctgcctccagggctggactgaggcctgagcgctcctgccgcagagcttgccgcgccaaataatgtctctgtgagactcgagatcatctcttagctcccctccaacctggggggcagtggtgtggagaagccacaggcctgagatttcatctgctctccttcctggagcccagaggagggcagcagaagggggtggtgtctccaaccccccagcactgaggaagaacggggctcttctcatttcacccctccctttctcccctgcccccaggactgggccacttctgggtggggcagtgggtcccagattggctcacactgagaatgtaagaactacaaacaaaatttctattaaattaaattttgtgtctccaaaaaaaaaaaaaaaaaaaaaaaaaaaaaagagggggggcgcgccccaagaagtttcccccgcggggggccccagttttccgcgcgttccccggttttttgtgttccaagggtggtcccctattggggggagcccgctattatattagagccatgaggccagcggggccgcgcgcggttttcaccaacgcgttcggggactgtggggaagacacgcggccttagccgtgggggcacccttctgtggggaagggaaccctttactttcgtggggcgtgggcacttatttgggcccaaattctacctctccgagagagatataaaaggctctccaaggggaactttacttaacatttttaagcggggtgttttacggggtgttaacacctatgggtggaattatgcctggcgggtctggaaaggtttgggcctaagcggggtattggattttgtgacaacttttttccgcgggctttttgacataaatac

SEQ ID NO: 302396 - DNA, 1417 bp, Homo sapiens
agaggtatcccttcctgattcgcgaagactagcttgcgcatcctctggctggccgtcgccgagcctgccgtctacttcaaggagcagtttctggacggagacgggtggacttcccgctggatcgaatccaaacacaagtcagattttggcaaattcgttctcagttccggcaagttctacggtgacgaggagaaagataaaggtttgcagacaagccaggatgcacgcttttatgctctgtcggccagtttcgagcctttcagcaacaaaggccagacgctggtggtgcagttcacggtgaaacatgagcagaacatcgactgtgggggcggctatgtgaagctgtttcctaatagtttggaccagacagacatgcacggagactcagaatacaacatcatgtttggtcccgacatctgtggccctggcaccaagaaggttcatgtcatcttcaactacaagggcaagaacgtgctgatcaacaaggacatccgttgcaaggatgatgagtttacacacctgtacacactgattgtgcggccagacaacacctatgaggtgaagattgacaacagccaggtggagtccggctccttggaagacgattgggacttcctgccacccaagaagataaaggatcctgatgcttcaaaaccggaagactgggatgagcgggccaagatcgatgatcccacagactccaagcctgaggactgggacaagcccgagcatatccctgaccctgatgctaagaagcccgaggactgggatgaagagatggacggagagtgggaacccccagtgattcagaaccctgagtacaagggtgagtggaagccccggcagatcgacaacccagattacaagggcacttggatccacccagaaattgacaaccccgagtattctcccgatcccagtatctatgcctatgataactttggcgtgctgggcctggacctctggcaggtcaagtctggcaccatctttgacaacttcctcatcaccaacgatgaggcatacgctgaggagtttggcaacgagacgtggggcgtaacaaaggcagcagagaaacaaatgaaggacaaacaggacgaggagcagaggcttaaggaggaggaagaagacaagaaacgcaaagaggaggaggaggcagaggacaaggaggatgatgaggacaaagatgaggatgaggaggatgaggaggacaaggaggaagatgaggaggaagatgtccccggccaggccaaggacgagctgtagagaggcctgcctccagggctggactgaggcctgagcgctcctgccgcagagcttgccgcgccaaataatgtctctgtgagactcgagaattggctcacactgagaatgtaagaactacaaacaaaatttctattaaattaaattttgtgtctcc

SEQ ID NO: 302397 - DNA, 1626 bp, Homo sapiens
ctctagaggatcttgggctcagtgatcctcggcagtttcgagcctttcagcaacaaaggccagacgctggtggtgcagttcacggtgaaacatgagcagaacatcgactgtgggggcggctatgtgaagctgtttcctaatagtttggaccagacagacatgcacggagactcagaatacaacatcatgtttggtcccgacatctgtggccctggcaccaagaaggttcatgtcatcttcaactacaagggcaagaacgtgctgatcaacaaggacatccgttgcaaggatgatgagtttacacacctgtacacactgattgtgcggccagacaacacctatgaggtgaagattgacaacagccaggtggagtccggctccttggaagacgattgggacttcctgccacccaagaagataaaggatcctgatgcttcaaaaccggaagactgggatgagcgggccaagatcgatgatcccacagactccaagcctgaggactgggacaagcccgagcatatccctgaccctgatgctaagaagcccgaggactgggatgaagagatggacggagagtgggaacccccagtgattcagaaccctgagtacaagggtgagtggaagccccggcagatcgacaacccagattacaagggcacttggatccacccagaaattgacaaccccgagtattctcccgatcccagtatctatgcctatgataactttggcgtgctgggcctggacctctggcaggtcaagtctggcaccatctttgacaacttcctcatcaccaacgatgaggcatacgctgaggagtttggcaacgagacgtggggcgtaacaaaggcagcagagaaacaaatgaaggacaaacaggacgaggagcagaggcttaaggaggaggaagaagacaagaaacgcaaagaggaggaggaggcagaggacaaggaggatgatgaggacaaagatgaggatgaggaggatgaggaggacaaggaggaagatgaggaggaagatgtccccggccaggccaaggacgagctgtagagaggcctgcctccagggctggactgaggcctgagcgctcctgccgcagagcttgccgcgccaaataatgtctctgtgagactcgagaactttcatttttttccaggctggttcggatttggggtggattttggttttgttcccctcctccactctcccccaccccctccccgccctttttttttttttttttaaactggtattttatctttgattctccttcagccctcacccctggttctcatctttcttgatcaacatcttttcttgcctctgtccccttctctcatctcttagctcccctccaacctggggggcagtggtgtggagaagccacaggcctgagatttcatctgctctccttcctggagcccagaggagggcagcagaagggggtggtgtctccaaccccccagcactgaggaagaacggggctcttctcatttcacccctccctttctcccctgcccccaggactgggccacttctgggtggggcagtgggtcccagattggctcacactgagaatgtaagaactacaaacaaaatttctattaaattaaattttgtgtctcc

SEQ ID NO: 302398 - DNA, 1832 bp, Homo sapiens
  misc_feature (844)..(844): n is a, c, g, or t
  misc_feature (861)..(861): n is a, c, g, or t
  misc_feature (864)..(864): n is a, c, g, or t
  misc_feature (876)..(876): n is a, c, g, or t
  misc_feature (885)..(886): n is a, c, g, or t
  misc_feature (888)..(888): n is a, c, g, or t
  misc_feature (894)..(895): n is a, c, g, or t
  misc_feature (916)..(916): n is a, c, g, or t
  misc_feature (918)..(918): n is a, c, g, or t
  misc_feature (936)..(936): n is a, c, g, or t
  misc_feature (959)..(959): n is a, c, g, or t
  misc_feature (962)..(962): n is a, c, g, or t
  misc_feature (964)..(966): n is a, c, g, or t
  misc_feature (970)..(970): n is a, c, g, or t
  misc_feature (973)..(973): n is a, c, g, or t
agaggtatcccttcctgattcgcgaagactagcttgcgcatcctctggctggccgtcgccgagcctgccgtctacttcaaggagcagtttctggacggagacgggtggacttcccgctggatcgaatccaaacacaagtcagattttggcaaattcgttctcagttccggcaagttctacggtgacgaggagaaagataaaggtttgcagacaagccaggatgcacgcttttatgctctgtcggccagtttcgagcctttcagcaacaaaggccagacgctggtggtgcagttcacggtgaaacatgagcagaacatcgactgtgggggcggctatgtgaagctgtttcctaatagtttggaccagacagacatgcacggagactcagaatacaacatcatgtttggtcccgacatctgtggccctggcaccaagaaggttcatgtcatcttcaactacaagggcaagaacgtgctgatcaacaaggacatccgttgcaaggatgatgagtttacacacctgtacacactgattgtgcggccagacaacacctatgaggtgaagattgacaacagccaggtggagtccggctccttggaagacgattgggacttcctgccacccaagaagataaaggatcctgatgcttcaaaaccggaagactgggatgagcgggccaagatcgatgatcccacagactccaagcctgaggactgggacaagcccgagcatatccctgaccctgatgctaagaagcccgaggactgggatgaagagatggacggagagtgggaacccccagtgattcagaaccctgagtacaagggaagccccggcagagcgncaacccataggacaagngtncggggatcctcntagaaaggnncnaccccnnggaggcgccctagcccatgancnagcccgagtagaacgggncccgttggccctggcaccgcgtncantnnnaggnggncattagcgggtacaatttcctcatcaccaacgatgaggcatacgctgaggagtttggcaacgagacgtggggcgtaacaaaggcagcagagaaacaaatgaaggacaaacaggacgaggagcagaggcttaaggaggaggaagaagacaagaaacgcaaagaggaggaggaggcagaggacaaggaggatgatgaggacaaagatgaggatgaggaggatgaggaggacaaggaggaagatgaggaggaagatgtccccggccaggccaaggacgagctgtagagaggcctgcctccagggctggactgaggcctgagcgctcctgccgcagagcttgccgcgccaaataatgtctctgtgagactcgagaactttcatttttttccaggctggttcggatttggggtggattttggttttgttcccctcctccactctcccccaccccctccccgccctttttttttttttttttaaactggtattttatctttgattctccttcagccctcacccctggttctcatctttcttgatcaacatcttttcttgcctctgtccccttctctcatctcttagctcccctccaacctggggggcagtggtgtggagaagccacaggcctgagatttcatctgctctccttcctggagcccagaggagggcagcagaagggggtggtgtctccaaccccccagcactgaggaagaacggggctcttctcatttcacccctccctttctcccctgcccccaggactgggccacttctgggtggggcagtgggtcccagattggctcacactgagaatgtaagaactacaaacaaaatttctattaaattaaattttgtgtctcc

SEQ ID NO: 302399 - DNA, 1738 bp, Homo sapiens
  misc_feature (1295)..(1295): n is a, c, g, or t
  misc_feature (1298)..(1298): n is a, c, g, or t
  misc_feature (1342)..(1342): n is a, c, g, or t
  misc_feature (1344)..(1344): n is a, c, g, or t
  misc_feature (1377)..(1377): n is a, c, g, or t
  misc_feature (1396)..(1397): n is a, c, g, or t
  misc_feature (1402)..(1406): n is a, c, g, or t
  misc_feature (1420)..(1420): n is a, c, g, or t
  misc_feature (1422)..(1422): n is a, c, g, or t
  misc_feature (1438)..(1442): n is a, c, g, or t
  misc_feature (1444)..(1445): n is a, c, g, or t
  misc_feature (1463)..(1463): n is a, c, g, or t
  misc_feature (1477)..(1477): n is a, c, g, or t
  misc_feature (1533)..(1533): n is a, c, g, or t
  misc_feature (1562)..(1562): n is a, c, g, or t
  misc_feature (1599)..(1599): n is a, c, g, or t
  misc_feature (1609)..(1609): n is a, c, g, or t
  misc_feature (1621)..(1621): n is a, c, g, or t
  misc_feature (1623)..(1624): n is a, c, g, or t
  misc_feature (1627)..(1627): n is a, c, g, or t
  misc_feature (1630)..(1630): n is a, c, g, or t
  misc_feature (1658)..(1658): n is a, c, g, or t
  misc_feature (1672)..(1672): n is a, c, g, or t
  misc_feature (1682)..(1682): n is a, c, g, or t
agaggtatcccttcctgattcgcgaagactagcttgcgcatcctctggctggccgtcgccgagcctgccgtctacttcaaggagcagtttctggacggagacgggtggacttcccgctggatcgaatccaaacacaagtcagattttggcaaattcgttctcagttccggcaagttctacggtgacgaggagaaagataaaggtttgcagacaagccaggatgcacgcttttatgctctgtcggccagtttcgagcctttcagcaacaaaggccagacgctggtggtgcagttcacggtgaaacatgagcagaacatcgactgtgggggcggctatgtgaagctgtttcctaatagtttggaccagacagacatgcacggagactcagaatacaacatcatgtttggtcccgacatctgtggccctggcaccaagaaggttcatgtcatcttcaactacaagggcaagaacgtgctgatcaacaaggacatccgttgcaaggatgatgagtttacacacctgtacacactgattgtgcggccagacaacacctatgaggtgaagattgacaacagccaggtggagtccggctccttggaagacgattgggacttcctgccacccaagaagataaaggatcctgatgcttcaaaaccggaagactgggatgagcgggccaagatcgatgatcccacagactccaagcctgaggactgggacaagcccgagcatatccctgaccctgatgctaagaagcccgaggactgggatgaagagatggacggagagtgggaacccccagtgattcagaaccctgagtacaagggtgagtggaagccccggcagatcgacaacccagattacaagggcacttggatccacccagaaattgacaaccccgagtattctcccgatcccagtatctatgcctatgataactttggcgtgctgggcctggacctctggcaggtcaagtctggcaccatctttgacaacttcctcatcaccaacgatgaggcatacgctgaggagtttggcaacgagacgtggggcgtaacaaaggcagcagagaaacaaatgaaggacaaacaggacgaggagcagaggcttaaggaggaggaagaagacaagaaacgcaaagaggaggaggaggcagaggacaaggaggatgatgaggacaaagatgaggatgaggaggatgaggaggacaaggaggaagatgaggaggaagatgtccccggccaggccaaggacgagctgtagagaggcctgcctccagggctggactgaccccngcncccccccccccgcagccgcccccccccccaaacaaccccccccncnaaaccccagaactttcatttttttcccaccctngttcccatttaaaaaaaannccccnnnnnaaaccccccccccncncccccccccccccacnnnnntnntttttttttttttttttnaacaccaaaatttnatcttatatatgtcatactctttcgagctcgcttcgacccctcgattctccatctntcagcgaactacatctctcccctgccccncgccccgcatgctccccactcctggcgtgcgccacgngcgcgaaccnggggcggcgagngnngtnganaagccccacggcctcgcacgcaagtcgntcgggcggcgtccnacccagcgcncccccgagcagctccccacgctacgtggggccgcgcatcacacgaacgccgcccag

SEQ ID NO: 302400 - DNA, 1498 bp, Homo sapiens
agaggtatcccttcctgattcgcgaagactagcttgcgcatcctctggctggccgtcgccgagcctgccgtctacttcaaggagcagtttctggacggagacgggtggacttcccgctggatcgaatccaaacacaagtcagattttggcaaattcgttctcagttccggcaagttctacggtgacgaggagaaagataaaggtttgcagacaagccaggatgcacgcttttatgctctgtcggccagtttcgagcctttcagcaacaaaggccagacgctggtggtgcagttcacggtgaaacatgagcagaacatcgactgtgggggcggctatgtgaagctgtttcctaatagtttggaccagacagacatgcacggagactcagaatacaacatcatgtttggtcccgacatctgtggccctggcaccaagaaggttcatgtcatcttcaactacaagggcaagaacgtgctgatcaacaaggacatccgttgcaaggatgatgagtttacacacctgtacacactgattgtgcggccagacaacacctatgaggtgaagattgacaacagccaggtggagtccggctccttggaagacgattgggacttcctgccacccaagaagataaaggatcctgatgcttcaaaaccggaagactgggatgagcgggccaagatcgatgatcccacagactccaagcctgaggactgggacaagcccgagcatatccctgaccctgatgctaagaagcccgaggactgggatgaagagatggacggagagtgggaacccccagtgattcagaaccctgagtacaagggtgagtggaagccccggcagatcgacaacccagattacaagggcacaggaagatgaggaggaagatgtccccggccaggccaaggacgagctgtagagaggcctgcctccagggctggactgaggcctgagcgctcctgccgcagagcttgccgcgccaaataatgtctctgtgagactcgagaactttcatttttttccaggctggttcggatttggggtggattttggttttgttcccctcctccactctcccccaccccctccccgccctttttttttttttttttaaactggtattttatctttgattctccttcagccctcacccctggttctcatctttcttgatcaacatcttttcttgcctctgtccccttctctcatctcttagctcccctccaacctggggggcagtggtgtggagaagccacaggcctgagatttcatctgctctccttcctggagcccagaggagggcagcagaagggggtggtgtctccaaccccccagcactgaggaagaacggggctcttctcatttcacccctccctttctcccctgcccccaggactgggccacttctgggtggggcagtgggtcccagattggctcacactgagaatgtaagaactacaaacaaaatttctattaaattaaattttgtgtctcc

SEQ ID NO: 302401 - DNA, 1406 bp, Homo sapiens
agaggtatcccttcctgattcgcgaagactagcttgcgcatcctctggctggccgtcgccgagcctgccgtctacttcaaggagcagtttctggacggagacgggtggacttcccgctggatcgaatccaaacacaagtcagattttggcaaattcgttctcagttccggcaagttctacggtgacgaggagaaagataaaggtttgcagacaagccaggatgcacgcttttatgctctgtcggccagtttcgagcctttcagcaacaaaggccagacgctggtggtgcagttcacggtgaaacatgagcagaacatcgactgtgggggcggctatgtgaagctgtttcctaatagtttggaccagacagacatgcacggagactcagaatacaacatcatgtttggtcccgacatctgtggccctggcaccaagaaggttcatgtcatcttcaactacaagggcaagaacgtgctgatcaacaaggacatccgttgcaaggatgatgagtttacacacctgtacacactgattgtgcggccagacaacacctatgaggtgaagattgacaacagccaggtggagtccggctccttggaagacgattgggacttcctgccacccaagaagataaaggatcctgatgcttcaaaaccggaagactgggatgagcgggccaagatcgatgatcccacagactccaagcctgaggactgggacaagcccgagcatatccctgaccctgatgctaagaagcccgaggactgggatgaagagatggacggagagtgggaacccccagtgattcagaaccctgagtacaagggtgagtggaagccccggcagatcgacaacccagattacaagggcacttggatccacccagaaattgacaaccccgagtattctcccgatcccagtatctatgcctatgataactttggcgtgctgggcctggacctctggcaggtcaagtctggcaccatctttgacaacttcctcatcaccaacgatgaggcatacgctgaggagtttggcaacgagacgtggggcgtaacaaaggcagcagagaaacaaatgaaggacaaacaggacgaggagcagaggcttaaggaggaggaagaagacaagaaacgcaaagaggaggaggaggcagaggacaaggaggatgatgaggacaaagatgaggatgaggaggatgaggaggacaaggcagcagaagggggtggtgtctccaaccccccagcactgaggaagaacggggctcttctcatttcacccctccctttctcccctgcccccaggactgggccacttctgggtggggcagtgggtcccagattggctcacactgagaatgtaagaactacaaacaaaatttctattaaattaaattttgtgtctcc

SEQ ID NO: 302402 - DNA, 1898 bp, Homo sapiens
agaggtatcccttcctgattcgcgaagactagcttgcgcatcctctggctggccgtcgccgagcctgccgtctacttcaaggagcagtttctggacggagacgggtggacttcccgctggatcgaatccaaacacaagtcagattttggcaaattcgttctcagttccggcaagttctacggtgacgaggagaaagataaaggtttgcagacaagccaggatgcacgcttttatgctctgtcggccagtttcgagcctttcagcaacaaaggccagacgctggtggtgcagttcacggtgaaacatgagcagaacatcgactgtgggggcggctatgtgaagctgtttcctaatagtttggaccagacagacatgttgtatgtctgatcccgtgcatgtctgtctggtccaaactattaggaaacagcttcatgcacggagactcagaatacaacatcatgtttggtcccgacatctgtggccctggcaccaagaaggttcatgtcatcttcaactacaagggcaagaacgtgctgatcaacaaggacatccgttgcaaggatgatgagtttacacacctgtacacactgattgtgcggccagacaacacctatgaggtgaagattgacaacagccaggtggagtccggctccttggaagacgattgggacttcctgccacccaagaagataaaggatcctgatgcttcaaaaccggaagactgggatgagcgggccaagatcgatgatcccacagactccaagcctgaggactgggacaagcccgagcatatccctgaccctgatgctaagaagcccgaggactgggatgaagagatggacggagagtgggaacccccagtgattcagaaccctgagtacaagggtgagtggaagccccggcagatcgacaacccagattacaagggcacttggatccacccagaaattgacaaccccgagtattctcccgatcccagtatctatgcctatgataactttggcgtgctgggcctggacctctggcaggtcaagtctggcaccatctttgacaacttcctcatcaccaacgatgaggcatacgctgaggagtttggcaacgagacgtggggcgtaacaaaggcagcagagaaacaaatgaaggacaaacaggacgaggagcagaggcttaaggaggaggaagaagacaagaaacgcaaagaggaggaggaggcagaggacaaggaggatgatgaggacaaagatgaggatgaggaggatgaggaggacaaggaggaagatgaggaggaagatgtccccggccaggccaaggacgagctgtagagaggcctgcctccagggctggactgaggcctgagcgctcctgccgcagagcttgccgcgccaaataatgtctctgtgagactcgagaactttcatttttttccaggctggttcggatttggggtggattttggttttgttcccctcctccactctcccccaccccctccccgccctttttttttttttttttaaactggtattttatctttgattctccttcagccctcacccctggttctcatctttcttgatcaacatcttttcttgcctctgtccccttctctcatctcttagctcccctccaacctggggggcagtggtgtggagaagccacaggcctgagatttcatctgctctccttcctggagcccagaggagggcagcagaagggggtggtgtctccaaccccccagcactgaggaagaacggggctcttctcatttcacccctccctttctcccctgcccccaggactgggccacttctgggtggggcagtgggtcccagattggctcacactgagaatgtaagaactacaaacaaaatttctattaaattaaattttgtgtctcc

SEQ ID NO: 302403 - DNA, 1769 bp, Homo sapiens
agaggtatcccttcctgattcgcgaagactagcttgcgcatcctctggctggccgtcgccgagcctgccgtctacttcaaggagcagtttctggacggagacgggtggacttcccgctggatcgaatccaaacacaagtcagattttggcaaattcgttctcagttccggcaagttctacggtgacgaggagaaagataaaggtttgcagacaagccaggatgcacgcttttatgctctgtcggccagtttcgagcctttcagcaacaaaggccagacgctggtggtgcagttcacggtgaaacatgagcagaacatcgactgtgggggcggctatgtgaagctgtttcctaatagtttggaccagacagacatgcacggagactcagaatacaacatcatgtttggtcccgacatctgtggccctggcaccaagaaggttcatgtcatcttcaactacaagggcaagaacgtgctgatcaacaaggacatccgttgcaaggatgatgagtttacacacctgtacacactgattgtgcggccagacaacacctatgaggtgaagattgacaacagccaggtggagtccggctccttggaagacgattgggacttcctgccacccaagaagataaaggatcctgatgcttcaaaaccggaagactgggatgagcgggccaagatcgatgatcccacagactccaagcctgaggactgggacaagcccgagcatatccctgaccctgatgctaagaaggtgagtggaagccccggcagatcgacaacccagattacaagggcacttggatccacccagaaattgacaaccccgagtattctcccgatcccagtatctatgcctatgataactttggcgtgctgggcctggacctctggcaggtcaagtctggcaccatctttgacaacttcctcatcaccaacgatgaggcatacgctgaggagtttggcaacgagacgtggggcgtaacaaaggcagcagagaaacaaatgaaggacaaacaggacgaggagcagaggcttaaggaggaggaagaagacaagaaacgcaaagaggaggaggaggcagaggacaaggaggatgatgaggacaaagatgaggatgaggaggatgaggaggacaaggaggaagatgaggaggaagatgtccccggccaggccaaggacgagctgtagagaggcctgcctccagggctggactgaggcctgagcgctcctgccgcagagcttgccgcgccaaataatgtctctgtgagactcgagaactttcatttttttccaggctggttcggatttggggtggattttggttttgttcccctcctccactctcccccaccccctccccgccctttttttttttttttttaaactggtattttatctttgattctccttcagccctcacccctggttctcatctttcttgatcaacatcttttcttgcctctgtccccttctctcatctcttagctcccctccaacctggggggcagtggtgtggagaagccacaggcctgagatttcatctgctctccttcctggagcccagaggagggcagcagaagggggtggtgtctccaaccccccagcactgaggaagaacggggctcttctcatttcacccctccctttctcccctgcccccaggactgggccacttctgggtggggcagtgggtcccagattggctcacactgagaatgtaagaactacaaacaaaatttctattaaattaaattttgtgtctcc

SEQ ID NO: 302404 - DNA, 1281 bp, Homo sapiens
agaggtatcccttcctgattcgcgaagactagcttgcgcatcctctggctggccgtcgccgagcctgccgtctacttcaaggagcagtttctggacggagacgggtggacttcccgctggatcgaatccaaacacaagtcagattttggcaaattcgttctcagttccggcaagttctacggtgacgaggagaaagataaaggtttgcagacaagccaggatgcacgcttttatgctctgtcggccagtttcgagcctttcagcaacaaaggccagacgctggtggtgcagttcacggtgaaacatgagcagaacatcgactgtgggggcggctatgtgaagctgtttcctaatagtttggaccagacagacatgcacggagactcagaatacaacatcatgtttggtcccgacatctgtggccctggcaccaagaaggttcatgtcatcttcaactacaagggcaagaacgtgctgatcaacaaggacatccgttgcaaggatgatgagtttacacacctgtacacactgattgtgcggccagacaacacctatgaggtgaagattgacaacagccaggtggagtccggctccttggaagacgattgggacttcctgccacccaagaagataaaggatcctgatgcttcaaaaccggaagactgggatgagcgggccaagatcgatgatcccacagactccaagcctgaggactgggacaagcccgagcatatccctgaccctgatgctaagaagcccgaggactgggatgaagagatggacggagagtgggaacccccagtgattcagaaccctgagtacaagggtgagtggaagccccggcagatcgacaacccagattacaagggcacttggatccacccagaaattgacaaccccgagtattctcccgatcccagtatctatgcctatgataactttggcgtgctgggcctggacctctggcaggtcaagtctggcaccatctttgacaacttcctcatcaccaacgatgaggcatacgctgaggagtttggcaacgagacgtggggcgtaacaaaggcagcagagaaacaaatgaaggacaaacaggacgaggagcagaggctagagagagagaggaaagaaagaaagaaagaaaaagaaagaaagaaagaaagaaaagaaagaaagaaagaaagaaagaaagaaagacagcaacagcaggagaaacagcagaagaaaaaaagaagaagaaaaagagagaaagaaaaaaacagaaacaaaaaaacaaacggagag

SEQ ID NO: 302405 - DNA, 1934 bp, Homo sapiens
agaggtatcccttcctgattcgcgaagactagcttgcgcatcctctggctggccgtcgccgagcctgccgtctacttcaaggagcagtttctggacggagacgggtggacttcccgctggatcgaatccaaacacaagtcagattttggcaaattcgttctcagttccggcaagttctacggtgacgaggagaaagataaaggtttgcagacaagccaggatgcacgcttttatgctctgtcggccagtttcgagcctttcagcaacaaaggccagacgctggtggtgcagttcacggtgaaacatgagcagaacatcgactgtgggggcggctatgtgaagctgtttcctaatagtttggaccagacagacatgcacggagactcagaatacaacatcatgtttggtcccgacatctgtggccctggcaccaagaaggttcatgtcatcttcaactacaagggcaagaacgtgctgatcaacaaggacatccgttgcaaggtgtgcctgggggtggtggcaaatggctgtcatggggagattcagaggtcagcctcattggggggtggcccccgctcaccttcttccttcttcaggatgatgagtttacacacctgtacacactgattgtgcggccagacaacacctatgaggtgaagattgacaacagccaggtggagtccggctccttggaagacgattgggacttcctgccacccaagaagataaaggatcctgatgcttcaaaaccggaagactgggatgagcgggccaagatcgatgatcccacagactccaagcctgaggactgggacaagcccgagcatatccctgaccctgatgctaagaagcccgaggactgggatgaagagatggacggagagtgggaacccccagtgattcagaaccctgagtacaagggtgagtggaagccccggcagatcgacaacccagattacaagggcacttggatccacccagaaattgacaaccccgagtattctcccgatcccagtatctatgcctatgataactttggcgtgctgggcctggacctctggcaggtcaagtctggcaccatctttgacaacttcctcatcaccaacgatgaggcatacgctgaggagtttggcaacgagacgtggggcgtaacaaaggcagcagagaaacaaatgaaggacaaacaggacgaggagcagaggcttaaggaggaggaagaagacaagaaacgcaaagaggaggaggaggcagaggacaaggaggatgatgaggacaaagatgaggatgaggaggatgaggaggacaaggaggaagatgaggaggaagatgtccccggccaggccaaggacgagctgtagagaggcctgcctccagggctggactgaggcctgagcgctcctgccgcagagcttgccgcgccaaataatgtctctgtgagactcgagaactttcatttttttccaggctggttcggatttggggtggattttggttttgttcccctcctccactctcccccaccccctccccgccctttttttttttttttttaaactggtattttatctttgattctccttcagccctcacccctggttctcatctttcttgatcaacatcttttcttgcctctgtccccttctctcatctcttagctcccctccaacctggggggcagtggtgtggagaagccacaggcctgagatttcatctgctctccttcctggagcccagaggagggcagcagaagggggtggtgtctccaaccccccagcactgaggaagaacggggctcttctcatttcacccctccctttctcccctgcccccaggactgggccacttctgggtggggcagtgggtcccagattggctcacactgagaatgtaagaactacaaacaaaatttctattaaattaaattttgtgtctcc

SEQ ID NO: 302406 - DNA, 1144 bp, Homo sapiens
agaggtatcccttcctgattcgcgaagactagcttgcgcatcctctggctggccgtcgccgagcctgccgtctacttcaaggagcagtttctggacggagacgggtggacttcccgctggatcgaatccaaacacaagtcagattttggcaaattcgttctcagttccggcaagttctacggtgacgaggagaaagataaaggtttgcagacaagccaggatgcacgcttttatgctctgtcggccagtttcgagcctttcagcaacaaaggccagacgctggtggtgcagttcacggtgaaacatgagcagaacatcgactgtgggggcggctatgtgaagctgtttcctaatagtttggaccagacagacatgcacggagactcagaatacaacatcatgtttggtcccgacatctgtggccctggcaccaagaaggttcatgtcatcttcaactacaagggcaagaacgtgctgatcaacaaggacatccgttgcaaggatgatgagtttacacacctgtacacactgattgtgcggccagacaacacctatgaggtgaagattgacaacagccaggtggagtccggctccttggaagacgattgggacttcctgccacccaagaagataaaggatcctgatgcttcaaaaccggaagactgggatgagcgggccaagatcgatgatcccacagactccaagcctgaggactgggacaagcccgagcatatccctgaccctgatgctaagaagcccgaggactgggatgaagagatggacggagagtgggaacccccagtgattcagaaccctgagtacaagggtgagtggaagccccggcagatcgacaacccagattacaagggcacttggatccacccagaaattgacaaccccgagtattctcccgatcccagtatctatgcctatgataactttggcgtgctgggcctggacctctggcaggtcaagtctggcaccatctttgacaacttcctcatcaccaacgatgaggcatacgctgaggagtttggcaacgagacgtggggcgtaacaaagcagcagagaaacaaatgaaggacaaacaggtccagggcagaggaccaacgtcgacgcggccgcgaatttagtagtagtagcc

SEQ ID NO: 302407 - DNA, 1118 bp, Homo sapiens
agaggtatcccttcctgattcgcgaagactagcttgcgcatcctctggctggccgtcgccgagcctgccgtctacttcaaggagcagtttctggacggagacgggtggacttcccgctggatcgaatccaaacacaagtcagattttggcaaattcgttctcagttccggcaagttctacggtgacgaggagaaagataaaggtttgcagacaagccaggatgcacgcttttatgctctgtcggccagtttcgagcctttcagcaacaaaggccagacgctggtggtgcagttcacggtgaaacatgagcagaacatcgactgtgggggcggctatgtgaagctgtttcctaatagtttggaccagacagacatgcacggagactcagaatacaacatcatgtttggtcccgacatctgtggccctggcaccaagaaggttcatgtcatcttcaactacaagggcaagaacgtgctgatcaacaaggacatccgttgcaaggatgatgagtttacacacctgtacacactgattgtgcggccagacaacacctatgaggtgaagattgacaacagccaggtggagtccggctccttggaagacgattgggacttcctgccacccaagaagataaaggatcctgatgcttcaaaaccggaagactgggatgagcgggccaagatcgatgatcccacagactccaagcctgaggactgggacaagcccgagcatatccctgaccctgatgctaagaagcccgaggactgggatgaagagatggacggagagtgggaacccccagtgattcagaaccctgagtacaagggtgagtggaagccccggcagatcgacaacccagattacaagggcacttggatccacccagaaattgacaaccccgagtattctcccgatcccagtatctatgcctatgataactttggcgtgctgggcctggacctctggcaggtcaagtctggcaccatctttgacaacttcctcatcaccaacgatgaggcatacgctgaggagtttggcaacgagacgtggggcgtaacaaagcagcagagaaacaaatagaaggacaaacataaccgaggcgtgcaattgagatcctc

SEQ ID NO: 302408 - DNA, 1124 bp, Homo sapiens
agaggtatcccttcctgattcgcgaagactagcttgcgcatcctctggctggccgtcgccgagcctgccgtctacttcaaggagcagtttctggacggagacgggtggacttcccgctggatcgaatccaaacacaagtcagattttggcaaattcgttctcagttccggcaagttctacggtgacgaggagaaagataaaggtttgcagacaagccaggatgcacgcttttatgctctgtcggccagtttcgagcctttcagcaacaaaggccagacgctggtggtgcagttcacggtgaaacatgagcagaacatcgactgtgggggcggctatgtgaagctgtttcctaatagtttggaccagacagacatgcacggagactcagaatacaacatcatgtttggtcccgacatctgtggccctggcaccaagaaggttcatgtcatcttcaactacaagggcaagaacgtgctgatcaacaaggacatccgttgcaaggatgatgagtttacacacctgtacacactgattgtgcggccagacaacacctatgaggtgaagattgacaacagccaggtggagtccggctccttggaagacgattgggacttcctgccacccaagaagataaaggatcctgatgcttcaaaaccggaagactgggatgagcgggccaagatcgatgatcccacagactccaagcctgaggactgggacaagcccgagcatatccctgaccctgatgctaagaagcccgaggactgggatgaagagatggacggagagtgggaacccccagtgattcagaaccctgagtacaagggtgagtggaagccccggcagatcgacaacccagattacaagggcacttggatccacccagaaattgacaaccccgagtattctcccgatcccagtatctatgcctatgataactttggcgtgctgggcctggacctctggcaggtcaagtctggcaccatctttgacaacttcctcatcaccaacgatgaggcatacgctgaggagtttggcaacgagacgtggggcgtaacaaagcagcagagaaacaaatgaaggacaaacaggcctctggagttggacaggcctctggagttggg

SEQ ID NO: 302409 - DNA, 1029 bp, Homo sapiens
agaggtatcccttcctgattcgcgaagactagcttgcgcatcctctggctggccgtcgccgagcctgccgtctacttcaaggagcagtttctggacggagacgggtggacttcccgctggatcgaatccaaacacaagtcagattttggcaaattcgttctcagttccggcaagttctacggtgacgaggagaaagataaaggtttgcagacaagccaggatgcacgcttttatgctctgtcggccagtttcgagcctttcagcaacaaaggccagacgctggtggtgcagttcacggtgaaacatgagcagaacatcgactgtgggggcggctatgtgaagctgtttcctaatagtttggaccagacagacatgcacggagactcagaatacaacatcatgtttggtcccgacatctgtggccctggcaccaagaaggttcatgtcatcttcaactacaagggcaagaacgtgctgatcaacaaggacatccgttgcaaggatgatgagtttacacacctgtacacactgattgtgcggccagacaacacctatgaggtgaagattgacaacagccaggtggagtccggctccttggaagacgattgggacttcctgccacccaagaagataaaggatcctgatgcttcaaaaccggaagactgggatgagcgggccaagatcgatgatcccacagactccaagcctgaggactgggacaagcccgagcatatccctgaccctgatgctaagaagcccgaggactgggatgaagagatggacggagagtgggaacccccagtgattcagaaccctgagtacaagggtgagtggaagccccggcagatcgacaacccagattacaagggcacttggatccacccagaaattgacaaccccgagtattctcccgatcccagtatctatgcctatgataactttggcgtgctgggcctggacctctggcagcaagtctggcaccatcacttgacactcgatttccggtttatgggatactctagatcacca

SEQ ID NO: 302410 - DNA, 988 bp, Homo sapiens
agaggtatcccttcctgattcgcgaagactagcttgcgcatcctctggctggccgtcgccgagcctgccgtctacttcaaggagcagtttctggacggagacgggtggacttcccgctggatcgaatccaaacacaagtcagattttggcaaattcgttctcagttccggcaagttctacggtgacgaggagaaagataaaggtttgcagacaagccaggatgcacgcttttatgctctgtcggccagtttcgagcctttcagcaacaaaggccagacgctggtggtgcagttcacggtgaaacatgagcagaacatcgactgtgggggcggctatgtgaagctgtttcctaatagtttggaccagacagacatgcacggagactcagaatacaacatcatgtttggtcccgacatctgtggccctggcaccaagaaggttcatgtcatcttcaactacaagggcaagaacgtgctgatcaacaaggacatccgttgcaaggatgatgagtttacacacctgtacacactgattgtgcggccagacaacacctatgaggtgaagattgacaacagccaggtggagtccggctccttggaagacgattgggacttcctgccacccaagaagataaaggatcctgatgcttcaaaaccggaagactgggatgagcgggccaagatcgatgatcccacagactccaagcctgaggactgggacaagcccgagcatatccctgaccctgatgctaagaagcccgaggactgggatgaagagatggacggagagtgggaacccccagtgattcagaaccctgagtacaagggtgagtggaagccccggcagatcgacaacccagattacaagggcacttggatccacccagaaattgacaaccccgagtattcagaacctgagtacagggtgagtggaagccccgcagatcgacaacccagatacaagggcacttgatccacccagtgctggt

SEQ ID NO: 302411 - DNA, 1634 bp, Homo sapiens
  misc_feature (844)..(844): n is a, c, g, or t
  misc_feature (861)..(861): n is a, c, g, or t
  misc_feature (864)..(864): n is a, c, g, or t
  misc_feature (876)..(876): n is a, c, g, or t
  misc_feature (885)..(886): n is a, c, g, or t
  misc_feature (888)..(888): n is a, c, g, or t
  misc_feature (894)..(895): n is a, c, g, or t
  misc_feature (916)..(916): n is a, c, g, or t
  misc_feature (918)..(918): n is a, c, g, or t
  misc_feature (936)..(936): n is a, c, g, or t
  misc_feature (959)..(959): n is a, c, g, or t
  misc_feature (962)..(962): n is a, c, g, or t
  misc_feature (964)..(966): n is a, c, g, or t
  misc_feature (970)..(970): n is a, c, g, or t
  misc_feature (973)..(973): n is a, c, g, or t
agaggtatcccttcctgattcgcgaagactagcttgcgcatcctctggctggccgtcgccgagcctgccgtctacttcaaggagcagtttctggacggagacgggtggacttcccgctggatcgaatccaaacacaagtcagattttggcaaattcgttctcagttccggcaagttctacggtgacgaggagaaagataaaggtttgcagacaagccaggatgcacgcttttatgctctgtcggccagtttcgagcctttcagcaacaaaggccagacgctggtggtgcagttcacggtgaaacatgagcagaacatcgactgtgggggcggctatgtgaagctgtttcctaatagtttggaccagacagacatgcacggagactcagaatacaacatcatgtttggtcccgacatctgtggccctggcaccaagaaggttcatgtcatcttcaactacaagggcaagaacgtgctgatcaacaaggacatccgttgcaaggatgatgagtttacacacctgtacacactgattgtgcggccagacaacacctatgaggtgaagattgacaacagccaggtggagtccggctccttggaagacgattgggacttcctgccacccaagaagataaaggatcctgatgcttcaaaaccggaagactgggatgagcgggccaagatcgatgatcccacagactccaagcctgaggactgggacaagcccgagcatatccctgaccctgatgctaagaagcccgaggactgggatgaagagatggacggagagtgggaacccccagtgattcagaaccctgagtacaagggaagccccggcagagcgncaacccataggacaagngtncggggatcctcntagaaaggnncnaccccnnggaggcgccctagcccatgancnagcccgagtagaacgggncccgttggccctggcaccgcgtncantnnnaggnggncattagcgggtacaatttcctcatcaccaacgatgaggcatacgctgaggagtttggcaacgagacgtggggcgtaacaaaggcagcagagaaacaaatgaaggacaaacaggacgaggagcagaggcttaaggaggaggaagaagacaagaaacgcaaagaggaggaggaggcagaggacaaggaggatgatgaggacaaagatgaggatgaggaggatgaggaggacaaggaggaagatgaggaggaagatgtccccggccaggccaaggacgagctgtagagaggcctgcctccagggctggactgaggcctgagcgctcctgccgcagagcttgccgcgccaaataatgtctctgtgagactcgagatcatctcttagctcccctccaacctggggggcagtggtgtggagaagccacaggcctgagatttcatctgctctccttcctggagcccagaggagggcagcagaagggggtggtgtctccaaccccccagcactgaggaagaacggggctcttctcatttcacccctccctttctcccctgcccccaggactgggccacttctgggtggggcagtgggtcccagattggctcacactgagaatgtaagaactacaaacaaaatttctattaaattaaattttgtgtctcc

SEQ ID NO: 302412 - DNA, 955 bp, Homo sapiens
agaggtatcccttcctgattcgcgaagactagcttgcgcatcctctggctggccgtcgccgagcctgccgtctacttcaaggagcagtttctggacggagacgggtggacttcccgctggatcgaatccaaacacaagtcagattttggcaaattcgttctcagttccggcaagttctacggtgacgaggagaaagataaaggtttgcagacaagccaggatgcacgcttttatgctctgtcggccagtttcgagcctttcagcaacaaaggccagacgctggtggtgcagttcacggtgaaacatgagcagaacatcgactgtgggggcggctatgtgaagctgtttcctaatagtttggaccagacagacatgcacggagactcagaatacaacatcatgtttggtcccgacatctgtggccctggcaccaagaaggttcatgtcatcttcaactacaagggcaagaacgtgctgatcaacaaggacatccgttgcaaggatgatgagtttacacacctgtacacactgattgtgcggccagacaacacctatgaggtgaagattgacaacagccaggtggagtccggctccttggaagacgattgggacttcctgccacccaagaagataaaggatcctgatgcttcaaaaccggaagactgggatgagcgggccaagatcgatgatcccacagactccaagcctgaggactgggacaagcccgagcatatccctgaccctgatgctaagaagcccgaggactgggatgaagagatggacggagcagaagcaggaagcagcgggaagcaggaagcggcagaagcaggggcagaagcaggggcagaagcaggaagcaggaagtaatgtaatttggtttgatatagaggaataatccaagttaagatggaatcattaagcagaagtcaaacagtgcataaggaattgtcatgta

SEQ ID NO: 302413 - DNA, 650 bp, Homo sapiens
  misc_feature (21)..(21): n is a, c, g, or t
cccgggcccggggcccggggnaggaggaagatgaggaggaagatgtccccggccaggccaaggacgagctgtagagaggcctgcctccagggctggactgaggcctgagcgctcctgccgcagagcttgccgcgccaaataatgtctctgtgagactcgagaactttcatttttttccaggctggttcggatttggggtggattttggttttgttcccctcctccactctcccccaccccctccccgccctttttttttttttttttaaactggtattttatctttgattctccttcagccctcacccctggttctcatctttcttgatcaacatcttttcttgcctctgtccccttctctcatctcttagctcccctccaacctggggggcagtggtgtggagaagccacaggcctgagatttcatctgctctccttcctggagcccagaggagggcagcagaagggggtggtgtctccaaccccccagcactgaggaagaacggggctcttctcatttcacccctccctttctcccctgcccccaggactgggccacttctgggtggggcagtgggtcccagattggctcacactgagaatgtaagaactacaaacaaaatttctattaaattaaattttgtgtctcc

SEQ ID NO: 302414 - DNA, 912 bp, Homo sapiens
agaggtatcccttcctgattcgcgaagactagcttgcgcatcctctggctggccgtcgccgagcctgccgtctacttcaaggagcagtttctggacggagacgggtggacttcccgctggatcgaatccaaacacaagtcagattttggcaaattcgttctcagttccggcaagttctacggtgacgaggagaaagataaaggtttgcagacaagccaggatgcacgcttttatgctctgtcggccagtttcgagcctttcagcaacaaaggccagacgctggtggtgcagttcacggtgaaacatgagcagaacatcgactgtgggggcggctatgtgaagctgtttcctaatagtttggaccagacagacatgcacggagactcagaatacaacatcatgtttggtcccgacatctgtggccctggcaccaagaaggttcatgtcatcttcaactacaagggcaagaacgtgctgatcaacaaggacatccgttgcaaggatgatgagtttacacacctgtacacactgattgtgcggccagacaacacctatgaggtgaagattgacaacagccaggtggagtccggctccttggaagacgattgggacttcctgccacccaagaagataaaggatcctgatgcttcaaaaccggaagactgggatgagcgggccaagatcgatgatcccacagactccaagcctgaggactgggacaagcccgagcatatccctgaccctgatgctaagaatgaggaagaacggggctcttctcatttcacccctccctttctcccctgcccccaggactgggccacttctgggtggggcagtgggtcccagattggctcacactgagaatgtaagaactacaaacaaaatttctattaaattaaattttgtgtctcc

SEQ ID NO: 302415 - DNA, 821 bp, Homo sapiens
agaggtatcccttcctgattcgcgaagactagcttgcgcatcctctggctggccgtcgccgagcctgccgtctacttcaaggagcagtttctggacggagacgggtggacttcccgctggatcgaatccaaacacaagtcagattttggcaaattcgttctcagttccggcaagttctacggtgacgaggagaaagataaaggtttgcagacaagccaggatgcacgcttttatgctctgtcggccagtttcgagcctttcagcaacaaaggccagacgctggtggtgcagttcacggtgaaacatgagcagaacatcgactgtgggggcggctatgtgaagctgtttcctaatagtttggaccagacagacatgcacggagactcagaatacaacatcatgtttgaccccctccccgccctttttttttttttttttaaactggtattttatctttgattctccttcagccctcacccctggttctcatctttcttgatcaacatcttttcttgcctctgtccccttctctcatctcttagctcccctccaacctggggggcagtggtgtggagaagccacaggcctgagatttcatctgctctccttcctggagcccagaggagggcagcagaagggggtggtgtctccaaccccccagcactgaggaagaacggggctcttctcatttcacccctccctttctcccctgcccccaggactgggccacttctgggtggggcagtgggtcccagattggctcacactgagaatgtaagaactacaaacaaaatttctattaaattaaattttgtgtctcc

SEQ ID NO: 302416 - DNA, 1672 bp, Homo sapiens
agaggtatcccttcctgattcgcgaagactagcttgcgcatcctctggctggccgtcgccgagcctgccgtctacttcaaggagcagtttctggacggagacgggtggacttcccgctggatcgaatccaaacacaagtcagattttggcaaattcgttctcagttccggcaagttctacggtgacgaggagaaagataaaggtttgcagacaagccaggatgcacgcttttatgctctgtcggccagtttcgagcctttcagcaacaaaggccagacgctggtggtgcagttcacggtgaaacatgagcagaacatcgactgtgggggcggctatgtgaagctgtttcctaatagtttggaccagacagacatgcacggagactcagaatacaacatcatgtttggtcccgacatctgtggccctggcaccaagaaggttcatgtcatcttcaactacaagggcaagaacgtgctgatcaacaaggacatccgttgcaaggatgatgagtttacacacctgtacacactgattgtgcggccagacaacacctatgaggtgaagattgacaacagccaggtggagtccggctccttggaagacgattgggacttcctgccacccaagaagataaaggatcctgatgcttcaaacggagatggatacggccagatggttcccagatcactggttggagcgagttctctccgtgaaaccgcggtaaatggggggccatgactaatgagaccggacgatacggccacagctcctcttttccgcgctcccttcgggtcctccctcgcccaacgcacaacacggagagaacacgccaagagcaagaacgacaaaagaacgacgaacaaagaagatgagacacgcgtgacgaggaacgaagacaaacacagaagagagacgcaacatcgagcacgagagaaacagcaggaggcgaggacgaggacgaagaaggcagagagcaagcggacaagaacagaggaaagaaactaaacaagaacagacagaaggaagaagacgacaaacagggaaaaaacgagaacacagaaacaaaaacaagcgaacaaaacgaagaaaataacgacaaagaaacgcaagacaaaaggaagaaaaaagaaaaaagaaaagcaaaacaagagaacacgcgagaaacaaagcagacagaaacagacagaagcagggcgaaaagaagcgagaagagagtaagcatgacggaagagaagcagagaagagaagagcagagcgaagaaaaagaggagaatatgagaaggcagaagccagggaacagacgaagagcagagaggaaaggagcgagatggcacagaggaggaggcagcaggagagaggacgcagcgatgaccggaagcgcaagacggaggaggagggaggaaataacagaaagaagcagaaccgagacaaagaggagagggaagagcaagacaacacaagaactaagaacagagaaaagaaaatagcagagaacaaacgagagagagagaggaaagaaagaaagaaagaaaaagaaagaaagaaagaaagaaaagaaagaaagaaagaaagaaagaaagaaagacagcaacagcaggagaaacagcagaagaaaaaaagaagaagaaaaagagagaaagaaaaaaacagaaacaaaaaaacaaacggagag

SEQ ID NO: 302417 - DNA, 711 bp, Homo sapiens
agaggtatcccttcctgattcgcgaagactagcttgcgcatcctctggctggccgtcgccgagcctgccgtctacttcaaggagcagtttctggacggagacgggtggacttcccgctggatcgaatccaaacacaagtcagattttggcaaattcgttctcagttccggcaagttctacggtgacgaggagaaagataaaggtttgcagacaagccaggatgcacgcttttatgctctgtcggccagtttcgagcctttcagcaacaaaggccagacgctggtggtgcagttcacggtgaaacatgagcagaacatcgactgtgggggcggctatgtgaagctgtttcctaatagtttggaccagacagacatgcacggagactcagaatacaacatcatgtttggtcccgacatctgtggccctggcaccaagaaggttcatgtcatcttcaactacaagggcaagaacgtgctgatcaacaaggacatccgttgcaaggatgatgagtttacacacctgtacacactgattgtgcggccagacaacacctatgaggtgaagattgacaacagccaggtggagtccggctccttggaagacgattaggactgggccacttctgggtggggcagtgggtcccagattggctcacactgagaatgtaagaactacaaacaaaatttctattaaattaaattttgtgtctcc

SEQ ID NO: 302418 - DNA, 1037 bp, Homo sapiens
agaggtatcccttcctgattcgcgaagactagcttgcgcatcctctggctggccgtcgccgagcctgccgtctacttcaaggagcagtttctggacggagacgggtggacttcccgctggatcgaatccaaacacaagtcagattttggcaaattcgttctcagttccggcaagttctacggtgacgaggagaaagataaaggtttgcagacaagccaggatgcacgcttttatgctctgtcggccagtttcgagcctttcagcaacaaaggccagacgctggtggtgcagttcacggtgaaacatgagcagaacatcgactgtgggggcggctatgtgaagctgtttcctaatagtttggaccagacagacatgcacggagactcagaatacaacatcatgtttggtcccgacatctgtggccctggcaccaagaaggttcatgtcatcttcaactacaagggcaagaacgtgctgatcaacaaggacatccgttgcaaggtgtgcctgggggtggtggcaaatggctgtcatggggagattcagaggtcagcctcattggggggtggcccccgctcaccttcttccttcttcaggatgatgagtttacacacctgtacacactgattgtgcggccagacaacacctatgaggtgaagattgacaaccagccaccttgtgtcctgtagtcattgtcccccttttataggatcccccctgtcggacttcgtccagttgcacttccaatgtccctggagccaccatccgattatccatcaccttggttatttttgtcacccgagaaaggatagatgcctgttcagcagaattgggagcccggtcctgattcctcttcagcaaggcctcactgaaggaagtttcatcaggtgctggcttgacccggggaaaggccctttcacaccaatagaagtccaatgggatatgtggtaccaagggcctgaaccctcctcctgggcctcctctggaacccaagcgccccccacgaccacggcctctgtaccctgaatgagccccaa

SEQ ID NO: 302419 - DNA, 542 bp, Homo sapiens
ctctagaggatcttgggctcagtgatcctcggcagtttcgagcctttcagcaacaaaggccagacgctggtggtgcagttcacggtgaaacatgagcagaacatcgactgtgggggcggctatgtgaagctgtttcctaatagtttggaccagacagacatgttgtatgtctgatcccgtgcatgtctgtctggtccaaactattaggaaacagcttcatgcacggagactcagaatacaacatcatgtttgtcatctcttagctcccctccaacctggggggcagtggtgtggagaagccacaggcctgagatttcatctgctctccttcctggagcccagaggagggcagcagaagggggtggtgtctccaaccccccagcactgaggaagaacggggctcttctcatttcacccctccctttctcccctgcccccaggactgggccacttctgggtggggcagtgggtcccagattggctcacactgagaatgtaagaactacaaacaaaatttctattaaattaaattttgtgtctcc

SEQ ID NO: 302420 - DNA, 1113 bp, Homo sapiens
cgtgacaacgggggcgaagcgcaggcgcaaggagcaagcgcagattgtgggcggctgtgtcagctgacccaaggggccttcgaggtgccttaggccgcttgccttgctctcagaatcgctgccgccatggctagtcagtctcaggggattcagcagctgctgcaggccgagaagcgggcagccgagaaggtgtccgaggcccgcaaaagaaagaaccggaggctgaagcaggccaaagaagaagctcaggctgaaattgaacagtaccgcctgcagagggagaaagaattcaaggccaaggaagctgcggcattgggatcccgtggcagttgcagcactgaagtggagaaggagacccaggagaagatgaccatcctccagacatacttccggcagaacagggatgaagtcttggacaacctcttggcttttgtctgtgacattcggccagaaatccatgaaaactaccgcataaatggatagaagagagaagcacctgtgctgtggagtggcattttagatgccctcacgaatatgaagcttagcacagctctagttacattcttatgatatggcattaaattatttccatatattatataataggtccttccactttttggagagtagcaaatctagcttttttgtacagacttagaaattatctaaagatttcatctttttacctcatatttcttaggaatttaatggttatatgttgtctttttttcctatgtcttttggctcaagcaacatgtatatcagtgttgactttttctttcttagatctagtttaaaaaaaaaaaaaaccacataacaattctttgaagaaaggaagggattaaataatttttttccctaacactttcttgaaggtcaggggctttatctatgaaaaagtagtaaatagttctttgtaacctgtgtgaagcagcagccagccttaaagtagtccattcttgctaatggttagaacagtgaatactagtggaattgtttgggctgcttttagtttctcttaatcaaaattactagatgatagaattcaagaacttgttacatgtattacttggtgtatcgataatcatttaaaagtaaagactctgtcatgca

SEQ ID NO: 302421 - DNA, 1136 bp, Homo sapiens
  misc_feature (25)..(25): n is a, c, g, or t
  misc_feature (33)..(33): n is a, c, g, or t
  misc_feature (40)..(41): n is a, c, g, or t
  misc_feature (53)..(54): n is a, c, g, or t
aagcaacaccgatgcaatatatggntacactantgaaccnngtgggggttaannaaagcagctgtacgcccggatttcggatgcagctgacccaaggggccttcgaggtgccttaggccgcttgccttgctctcagaatcgctgccgccatggctagtcagtctcaggggattcagcagctgctgcaggccgagaagcgggcagccgagaaggtgtccgaggcccgcaaaagaaagaaccggaggctgaagcaggccaaagaagaagctcaggctgaaattgaacagtaccgcctgcagagggagaaagaattcaaggccaaggaagctgcggcattgggatcccgtggcagttgcagcactgaagtggagaaggagacccaggagaagatgaccatcctccagacatacttccggcagaacagggatgaagtcttggacaacctcttggcttttgtctgtgacattcggccagaaatccatgaaaactaccgcataaatggatagaagagagaagcacctgtgctgtggagtggcattttagatgccctcacgaatatgaagcttagcacagctctagttacattcttatgatatggcattaaattatttccatatattatataataggtccttccactttttggagagtagcaaatctagcttttttgtacagacttagaaattatctaaagatttcatctttttacctcatatttcttaggaatttaatggttatatgttgtctttttttcctatgtcttttggctcaagcaacatgtatatcagtgttgactttttctttcttagatctagtttaaaaaaaaaaaaaaccacataacaattctttgaagaaaggaagggattaaataatttttttccctaacactttcttgaaggtcaggggctttatctatgaaaaagtagtaaatagttctttgtaacctgtgtgaagcagcagccagccttaaagtagtccattcttgctaatggttagaacagtgaatactagtggaattgtttgggctgcttttagtttctcttaatcaaaattactagatgatagaattcaagaacttgttacatgtattacttggtgtatcgataatcatttaaaagtaaagactctgtcatgca

SEQ ID NO: 302422 - DNA, 1348 bp, Homo sapiens
cgtgacaacgggggcgaagcgcaggcgcaaggagcaagcgcagattgtgggcggctgtgtcagctgacccaaggggccttcgaggtgccttaggccgcttgccttgctctcagaatcgctgccgccatggctagtcagtctcaggggattcagcagctgctgcaggccgagaagcgggcagccgagaaggtgtccgaggcccgcaaaagaaagaaccggaggctgaagcaggccaaagaagaagctcaggctgaaattgaacagtaccgcctgcagagggagaaagaattcaaggccaaggaagctgcggcattgggatcccgtggcagttgcagcactgaagtggagaaggagacccaggagaagatgaccatcctccagacatacttccggcagaacagggatgaagtcttggacaacctcttggcttttgtctgtgacattcggccagaaatccatgaaaactaccgcataaatggatagaagagagaagcacctgtgctgtggagtggcattttagatgccctcacgaatatgaagcttagcacagctctagttacattcttatgatatggcattaaattatttccatatattatataataggtccttccactttttggagagtagcaaatctagcttttttgtacagacttagaaattatctaaagatttcatctttttacctcatatttcttaggaatttaatggttatatgttgtctttttttcctatgtcttttggctcaagcaacatgtatatcagtgttgactttttctttcttagatctagtttaaaaaaaaaaaaaaccacataacaattctttgaagaaaggaagggattaaataatttttttccctaacactttcttgaaggtcaggggctttatctatgaaaaagtagtaaatagttctttgtaacctgtgtgaagcagcagccagccttaaagtagtccattcttgctaatggttagaacagtgaatactagtggaattgtttgggctgcttttagtttctcttaatcaaaattactagatgatagaattcaagaacttgttacatgtattacttggtgtatcgataatcatttaaaagtaaagactctgtcatgcaaaaaaaaaaaaacaaacagacagagcaaaaacaaaaaggggcggcgagaccagagtgggcgaatacggggagaaaaggaggcccacgagggtggtccacagagccgcggagaaaaaggaataagaagagaaacagacacagacaaagtatcggcaataccacgagagaaaggcgccacaaaacagcacaaggacagggaaaaacacaggggaaagagcaggaggagataaaaggc

SEQ ID NO: 302423 - DNA, 1612 bp, Homo sapiens
cgtgacaacgggggcgaagcgcaggcgcaaggagcaagcgcagattgtgggcggctgtgtcagctgacccaaggggccttcgaggtgccttaggccgcttgccttgctctcagaatcgctgccgccatggctagtcagtctcaggggattcagcagctgctgcaggccgagaagcgggcagccgagaaggtgtccgaggcccgcaaaagaaagaaccggaggctgaagcaggccaaagaagaagctcaggctgaaattgaacagtaccgcctgcagagggagaaagaattcaaggccaaggaagctgcggcattgggatcccgtggcagttgcagcactgaagtggagaaggagacccaggagaagatgaccatcctccagacatacttccggcagaacagggatgaagtcttggacaacctcttggcttttgtctgtgacattcggccagaaatccatgaaaactaccgcataaatggatagaagagagaagcacctgtgctgtggagtggcattttagatgccctcacgaatatgaagcttagcacagctctagttacattcttatgatatggcattaaattatttccatatattatataataggtccttccactttttggagagtagcaaatctagcttttttgtacagacttagaaattatctaaagatttcatctttttacctcatatttcttaggaatttaatggttatatgttgtctttttttcctatgtcttttggctcaagcaacatgtatatcagtgttgactttttctttcttagatctagtttaaaaaaaaaaaaaaccacataacaattctttgaagaaaggaagggattaaataatttttttccctaacactttcttgaaggtcaggggctttatctatgaaaaagtagtaaatagttctttgtaacctgtgtgaagcagcagccagccttaaagtagtccattcttgctaatggttagaacagtgaatactagtggaattgtttgggctgcttttagtttctcttaatcaaaattactagatgatagaattcaagaacttgttacatgtattacttggtgtatcgataatcatttaaaagtaaagactctgtcatgcatttccccattcttttttttttccctgtctccgtgacaaccagtggttcttcatttttgatcatgcgaaatgcattttgacccagatggtctgcagaacttcacttaggacattagcacacaaatagcacacatatcacatacccatttatatacataattagaaaatgttcctgatacatgtgtcatgtgatttcttccaacaaatgttttggaaaacagcaagcaactagtctgtaggttgtcttttctctagagatccttgtcctgggacagcctggggcaagttattaagcatatttccttcctggtgggctagatgatgtgcattatacctgtagtaccttcatactagcccttacaagttaaatgtcctgtggccatcttagccgaaagtctttggttgcaaaatcttataggtaaaaacagttgaaagaacattatgggatttccttgcttgttctgatacaatacaactagatgaccttaaaaaccctcata

SEQ ID NO: 302424 - DNA, 1184 bp, Homo sapiens
cgtgacaacgggggcgaagcgcaggcgcaaggagcaagcgcagattgtgggcggctgtgtcagctgacccaaggggccttcgaggtgccttaggccgcttgccttgctctcagaatcgctgccgccatggctagtcagtctcaggggattcagcagctgctgcaggccgagaagcgggcagccgagaaggtgtccgaggcccgcaaaagaaagaaccggaggctgaagcaggccaaagaagaagctcaggctgaaattgaacagtaccgcctgcagagggagaaagaattcaaggccaaggaagctgcggcattgggatcccgtggcagttgcagcactgaagtggagaaggagacccaggagaagatgaccatcctccagacatacttccggcagaacagggatgaagtcttggacaacctcttggcttttgtctgtgacattcggccagaaatccatgaaaactaccgcataaatggatagaagagagaagcacctgtgctgtggagtggcattttagatgccctcacgaatatgaagcttagcacagctctagttacattcttatgatatggcattaaattatttccatatattatataataggtccttccactttttggagagtagcaaatctagcttttttgtacagacttagaaattatctaaagatttcatctttttacctcatatttcttaggaatttaatggttatatgttgtctttttttcctatgtcttttggctcaagcaacatgtatatcagtgttgactttttctttcttagatctagtttaaaaaaaaaaaaaaccacataacaattctttgaagaaaggaagggattaaataatttttttccctaacactttcttgaaggtcaggggctttatctatgaaaaagtagtaaatagttctttgtaacctgtgtgaagcagcagccagccttaaagtagtccattcttgctaatggttagaacagtgaatactagtggaattgtttgggctgcttttagtttctcttaatcaaaattactagatgatagaattcaagaacttgttacatgtattacttggtgtatcgataatcatttaaaagtaaagactctgtcatgcaaaaacacaacacccctccgaacgcccgtcgaaaaaacaactcgacgcggcccgcaatttagtcctagtatc

SEQ ID NO: 302425 - DNA, 919 bp, Homo sapiens
  misc_feature (815)..(815): n is a, c, g, or t
  misc_feature (819)..(819): n is a, c, g, or t
cgtgacaacgggggcgaagcgcaggcgcaaggagcaagcgcagattgtgggcggctgtgtcagctgacccaaggggccttcgaggtgccttaggccgcttgccttgctctcagaatcgctgccgccatggctagtcagtctcaggggattcagcagctgctgcaggccgagaagcgggcagccgagaaggtgtccgaggcccgcaaaagaaagaaccggaggctgaagcaggccaaagaagaagctcaggctgaaattgaacagtaccgcctgcagagggagaaagaattcaaggccaaggaagctgcggcattgggatcccgtggcagttgcagcactgaagtggagaaggagacccaggagaagatgaccatcctccagacatacttccggcagaacagggatgaagtcttggacaacctcttggcttttgtctgtgacattcggccagaaatccatgaaaactaccgcataaatggatagaagagagaagcacctgtgctgtggagtggcattttagatgccctcacgaatatgaagcttagcacagctctagttacattcttatgatatggcattaaattatttccatatattatataataggtccttccactttttggagagtagcaaatctagcttttttgtacagacttagaaattatctaaagatttcatctttttacctcatatttcttaggaatttaatggttatatgttgtctttttttcctatgtcttttggctcaagcaacatgtatatcagtgttgactttttctttcttagatctagtttaaaaacccttaaattttggnaggngggtcaaattttcccccaacctggagggggggtctctaaaaaaggaaactgtccgtggagccgcgtaacttgggggaaacaggagggggtccacaaaaag

SEQ ID NO: 302426 - DNA, 1287 bp, Homo sapiens
  misc_feature (1117)..(1117): n is a, c, g, or t
cgtgacaacgggggcgaagcgcaggcgcaaggagcaagcgcagattgtgggcggctgtgtcagctgacccaaggggccttcgaggtgccttaggccgcttgccttgctctcagaatcgctgccgccatggctagtcagtctcaggggattcagcagctgctgcaggccgagaagcgggcagccgagaaggtgtccgaggcccgcaaaagaaagaaccggaggctgaagcaggccaaagaagaagctcaggctgaaattgaacagtaccgcctgcagagggagaaagaattcaaggccaaggaagctgcggcattgggatcccgtggcagttgcagcactgaagtggagaaggagacccaggagaagatgaccatcctccagacatacttccggcagaacagggatgaagtcttggacaacctcttggcttttgtctgtgacattcggccagaaatccatgaaaactaccgcataaatggatagaagagagaagcacctgtgctgtggagtggcattttagatgccctcacgaatatgaagcttagcacagctctagttacattcttatgatatggcattaaattatttccatatattatataataggtccttccactttttggagagtagcaaatctagcttttttgtacagacttagaaattatctaaagatttcatctttttacctcatatttcttaggaatttaatggttatatgttgtctttttttcctatgtcttttggctcaagcaacatgtatatcagtgttgactttttctttcttagatctagtttaaaaactcttgcaggcaagggctttatttcgaaaagggaaaaggtttttgtaccctgtggaagcacccccgcctctaagggccctttttgttaaggtctaacaggcctctcgggaatggtggccgtttcagctctttatcaaattccggtggggatccagactgtacagtttactgtgggcgcgatctcttaaagaaaaccttgtccgcttctaatctccctagtctgcgtcatctgcctctccgctcattctctctcgcctcgctcgccctctctccctcatctcctcgtctctccattccaacaataaccgctgcgctcnccatcgtcactcgctatatcactctctcgactctcgctgtctcgtctcactagtgggcgaacactcgcgcgtctctatactctgttcaccactgcgtctccacatcacttggatctactctcgcgcgctgctataacctcgatctctggcgtctcatatgtgcgtggcgc

SEQ ID NO: 302427 - DNA, 961 bp, Homo sapiens
cgtgacaacgggggcgaagcgcaggcgcaaggagcaagcgcagattgtgggcggctgtgtcagctgacccaaggggccttcgaggtgccttaggccgcttgccttgctctcagaatcgctgccgccatggctagtcagtctcaggggattcagcagctgctgcaggccgagaagcgggcagccgagaaggtgtccgaggcccgcaaaagaaagaaccggaggctgaagcaggccaaagaagaagctcaggctgaaattgaacagtaccgcctgcagagggagaaagaattcaaggccaaggaagctgcggcattgggatcccgtggcagttgcagcactgaagtggagaaggagacccaggagaagatgaccatcctccagacatacttccggcagaacagggatgaagtcttggacaacctcttggcttttgtctgtgacattcggccagaaatccatgaaaactaccgcataaatggatagaagagagaagcacctgtgctgtggagtggcattttagatgccctcacgaatatgaagcttagcacagctctagttacattcttatgatatggcattaaattatttccatatattatataataggtccttccactttttggagagtagcaaatctagcttttttgtacagacttagaaattatctaaagatttcatctttttacctcatatttcttaggaatttaatggttatatgttgtctttttttcctatgtcttttggctcaagcaacatgtatatcagtgttgactttttctttcttagatctagtttaaaaacgcaaatgacaacctgggggggggcccgggaccaattggccaatatgagtgctattcatcacgtgcgcgtttttaaactttgtgggcgtggttcacattaagctgtaggatatcccttgaagcagagattccgccatggtctccacgtgcgcagagagcag

SEQ ID NO: 302428 - DNA, 1311 bp, Homo sapiens
cgtgacaacgggggcgaagcgcaggcgcaaggagcaagcgcagattgtgggcggctgtgtcagctgacccaaggggccttcgaggtgccttaggccgcttgccttgctctcagaatcgctgccgccatggctagtcagtctcaggggattcagcagctgctgcaggccgagaagcgggcagccgagaaggtgtccgaggcccgcaaaagtgagtttcagggtggggctgcccggcgtggcgcgagtcgaagaaagaccgctgggcctcaggtggtgggtagattaggcccgaaaaactgcggggtgcgggcgtgcgtatagtcgcggaaggttgtgtgtttcgaagctttgaggagctgaggctctggaaggcttgcggatcgcctggaagccacgatgtgagatggaaagaaccggaggctgaagcaggccaaagaagaagctcaggctgaaattgaacagtaccgcctgcagagggagaaagaattcaaggccaaggaagctgcggcattgggatcccgtggcagttgcagcactgaagtggagaaggagacccaggagaagatgaccatcctccagacatacttccggcagaacagggatgaagtcttggacaacctcttggcttttgtctgtgacattcggccagaaatccatgaaaactaccgcataaatggatagaagagagaagcacctgtgctgtggagtggcattttagatgccctcacgaatatgaagcttagcacagctctagttacattcttatgatatggcattaaattatttccatatattatataataggtccttccactttttggagagtagcaaatctagcttttttgtacagacttagaaattatctaaagatttcatctttttacctcatatttcttaggaatttaatggttatatgttgtctttttttcctatgtcttttggctcaagcaacatgtatatcagtgttgactttttctttcttagatctagtttaaaaaaaaaaaaaaccacataacaattctttgaagaaaggaagggattaaataatttttttccctaacactttcttgaaggtcaggggctttatctatgaaaaagtagtaaatagttctttgtaacctgtgtgaagcagcagccagccttaaagtagtccattcttgctaatggttagaacagtgaatactagtggaattgtttgggctgcttttagtttctcttaatcaaaattactagatgatagaattcaagaacttgttacatgtattacttggtgtatcgataatcatttaaaagtaaagactctgtcatgca

SEQ ID NO: 302429 - DNA, 1035 bp, Homo sapiens
  misc_feature (25)..(25): n is a, c, g, or t
  misc_feature (33)..(33): n is a, c, g, or t
  misc_feature (40)..(41): n is a, c, g, or t
  misc_feature (53)..(54): n is a, c, g, or t
aagcaacaccgatgcaatatatggntacactantgaaccnngtgggggttaannaaagcagctgtacgcccggatttcggatgcagctgacccaaggggccttcgaggtgccttaggccgcttgccttgctctcagaatcgctgccgccatggctagtcagtctcaggggattcagcagctgctgcaggccgagaagcgggcagccgagaaggtgtccgaggcccgcaaaagcattgggatcccgtggcagttgcagcactgaagtggagaaggagacccaggagaagatgaccatcctccagacatacttccggcagaacagggatgaagtcttggacaacctcttggcttttgtctgtgacattcggccagaaatccatgaaaactaccgcataaatggatagaagagagaagcacctgtgctgtggagtggcattttagatgccctcacgaatatgaagcttagcacagctctagttacattcttatgatatggcattaaattatttccatatattatataataggtccttccactttttggagagtagcaaatctagcttttttgtacagacttagaaattatctaaagatttcatctttttacctcatatttcttaggaatttaatggttatatgttgtctttttttcctatgtcttttggctcaagcaacatgtatatcagtgttgactttttctttcttagatctagtttaaaaaaaaaaaaaaccacataacaattctttgaagaaaggaagggattaaataatttttttccctaacactttcttgaaggtcaggggctttatctatgaaaaagtagtaaatagttctttgtaacctgtgtgaagcagcagccagccttaaagtagtccattcttgctaatggttagaacagtgaatactagtggaattgtttgggctgcttttagtttctcttaatcaaaattactagatgatagaattcaagaacttgttacatgtattacttggtgtatcgataatcatttaaaagtaaagactctgtcatgca

SEQ ID NO: 302430 - DNA, 1060 bp, Homo sapiens
cgtgacaacgggggcgaagcgcaggcgcaaggagcaagcgcagattgtgggcggctgtgtcagctgacccaaggggccttcgaggtgccttaggccgcttgccttgctctcagaatcgctgccgccatggctagtcagtctcaggggattcagcagctgctgcaggccgagaagcgggcagccgagaaggtgtccgaggcccgcaaaagaaagaaccggaggctgaagcaggccaaagaagaagctcaggctgaaattgaacagtaccgcctgcagagggagaaagaattcaaggccaaggaagctgcggcattgggatcccgtggcagttgcagcactgaagtggagaaggagacccaggagaagatgaccatcctccagacatacttccggcagaacagggatgaagtcttggacaacctcttggcttttgtctgtgacattcggccagaaatccatgaaaactaccgcataaatggatagaagagagaagcacctgtgctgtggagtggcattttagatgccctcacgaatatgaagcttagcacagctctagttacattcttatgatatggcattaatctagcttttttgtacagacttagaaattatctaaagatttcatctttttacctcatatttcttaggaatttaatggttatatgttgtctttttttcctatgtcttttggctcaagcaacatgtatatcagtgttgactttttctttcttagatctagtttaaaaaaaaaaaaaaccacataacaattctttgaagaaaggaagggattaaataatttttttccctaacactttcttgaaggtcaggggctttatctatgaaaaagtagtaaatagttctttgtaacctgtgtgaagcagcagccagccttaaagtagtccattcttgctaatggttagaacagtgaatactagtggaattgtttgggctgcttttagtttctcttaatcaaaattactagatgatagaattcaagaacttgttacatgtattacttggtgtatcgataatcatttaaaagtaaagactctgtcatgca

SEQ ID NO: 302431 - DNA, 1066 bp, Homo sapiens
cgtgacaacgggggcgaagcgcaggcgcaaggagcaagcgcagattgtgggcggctgtgtcagctgacccaaggggccttcgaggtgccttaggccgcttgccttgctctcagaatcgctgccgccatggctagtcagtctcaggggattcagcagctgctgcaggccgagaagcgggcagccgagaaggtgtccgaggcccgcaaaagaaagaaccggaggctgaagcaggccaaagaagaagctcaggctgaaattgaacagtaccgcctgcagagggagaaagaattcaaggccaaggaagctgcggcattgggatcccgtggcagttgcagcactgaagtggagaaggagacccaggagaagatgaccatcctccagacatacttccggcagaacagggatgaagtcttggacaacctcttggcttttgtctgtgacattcggccagaaatccatgagtggcattttagatgccctcacgaatatgaagcttagcacagctctagttacattcttatgatatggcattaaattatttccatatattatataataggtccttccactttttggagagtagcaaatctagcttttttgtacagacttagaaattatctaaagatttcatctttttacctcatatttcttaggaatttaatggttatatgttgtctttttttcctatgtcttttggctcaagcaacatgtatatcagtgttgactttttctttcttagatctagtttaaaaaaaaaaaaaaccacataacaattctttgaagaaaggaagggattaaataatttttttccctaacactttcttgaaggtcaggggctttatctatgaaaaagtagtaaatagttctttgtaacctgtgtgaagcagcagccagccttaaagtagtccattcttgctaatggttagaacagtgaatactagtggaattgtttgggctgcttttagtttctcttaatcaaaattactagatgatagaattcaagaacttgttacatgtattacttggtgtatcgataatcatttaaaagtaaagactctgtcatgca

SEQ ID NO: 302432 - DNA, 761 bp, Homo sapiens
cgtgacaacgggggcgaagcgcaggcgcaaggagcaagcgcagattgtgggcggctgtgtcagctgacccaaggggccttcgaggtgccttaggccgcttgccttgctctcagaatcgctgccgccatggctagtcagtctcaggggattcagcagctgctgcaggccgagaagcgggcagccgagaaggtgtccgaggcccgcaaaagaaagaaccggaggctgaagcaggccaaagaagaagctcaggctgaaattgaacagtaccgcctgcagagggagaaagaattcaaggccaaggaagctgcggcattgggatcccgtggcagttgcagcactgaagtggagaaggagacccaggagaagatgaccatcctccagacatacttccggcagaacagggatgaagtcttggacaacctcttggcttttgtctgtgacattcggccagaaatccatgaaaactaccgcataaatggatagaagagagaagcacctgtgctgtggagtggcattttagatgccctcacgaatatgaagcttagcacagctctagttacattcttatgatatggcattaattaatttcctttcctctttagactcgagcaagcttttgctgcgggcgaattcgagcttattgggccatcgccctttgggggcggattacaatcaatgcgggggtttacaacgggggactgggaaacccggcggtcccaattaattgcttgagggaaatcccttttccagtggggggaaaa

SEQ ID NO: 302433 - DNA, 562 bp, Homo sapiens
cgtgacaacgggggcgaagcgcaggcgcaaggagcaagcgcagattgtgggcggctgtgtcagctgacccaaggggccttcgaggtgccttaggccgcttgccttgctctcagaatcgctgccgccatggctagtcagtctcaggggattcagcagctgctgcaggccgagaagcgggcagccgagaaggtgtccgaggcccgcaaaagaaagaaccggaggctgaagcaggccaaagaagaagctcaggctgaaattgaacagtaccgcctgcagagggagaaagaattcaaggccaaggaagctgcggcattgggatcccgtggcagttgcagcactgaagtggagaaggagacccaggagaagatgaccatcctccagacatacttccggcacaggctgcggccgttaaggaggccccagggcctggagggcatctgtctgccaacaccctcccccgtgggcctaggcctctgtcctctccgaggcaggcaagcagggctggggagagggcctctgggcctgctgctccatggccaacaaggggtccgcacagctctgg

SEQ ID NO: 302434 - DNA, 718 bp, Homo sapiens
tctagaggatcctgcgtaatatgtaacctgtgtgaagcagcagccagccttaaagtagtccattcttgctaatggttagaacagtgaatactagtggaattgtttgggctgcttttagtttctcttaatcaaaattactagatgatagaattcaagaacttgttacatgtattacttggtgtatcgataatcatttaaaagtaaagactctgtcatgcatttccccattcttttttttttccctgtctccgtgacaaccagtggttcttcatttttgatcatgcgaaatgcattttgacccagatggtctgcagaacttcacttaggacattagcacacaaatagcacacatatcacatacccatttatatacataattagaaaatgttcctgatacatgtgtcatgtgatttcttccaacaaatgttttggaaaacagcaagcaactagtctgtaggttgtcttttctctagagatccttgtcctgggacagcctggggcaagttattaagcatatttccttcctggtgggctagatgatgtgcattatacctgtagtaccttcatactagcccttacaagttaaatgtcctgtggccatcttagccgaaagtctttggttgcaaaatcttataggtaaaaacagttgaaagaacattatgggatttccttgcttgttctgatacaatacaactagatgaccttaaaaaccctcata

SEQ ID NO: 302435 - DNA, 420 bp, Homo sapiens
cgtgacaacgggggcgaagcgcaggcgcaaggagcaagcgcagattgtgggcggctgtgtcagctgacccaaggggccttcgaggtgccttaggccgcttgccttgctctcagaatcgctgccgccatggctagtcagtctcaggggattcagcagctgctgcaggccgagaagcgggcagccgagaaggtgtccgaggcccgcaaaagaaagaaccggaggctgaagcaggccaaagaagaagctcaggctgaaattgaacagtaccgcctgcagagggagaaagaattcaaggccaaggaagctgcgcattgggatcccgtggcagtcgcgagcaacatgaaagtgagcagatagagttgacgcacatgtgaggacgactgatacactcggaccagatatatttttcgggaggaggaa

SEQ ID NO: 302436 - DNA, 534 bp, Homo sapiens
cgtgacaacgggggcgaagcgcaggcgcaaggagcaagcgcagattgtgggcggctgtgtcagctgacccaaggggccttcgaggtgccttaggccgcttgccttgctctcagaatcgctgccgccatggctagtcagtctcaggggattcagcagctgctgcaggccgagaagcgggcagccgagaaggtgtccgaggcccgcaaaagtgagtttcagggtggggctgcccggcgtggcgcgagtcgaagaaagaccgctgggcctcaggtggtgggtagattaggcccgaaaaactgcggggtgcgggcgtgcgtatagtcgcggaaggttgtgtgtttcgaagctttgaggagctgaggctctggaaggcttgcggatcgcctggaagccacgatgtgagatggaaagaaccggaggctgaagcaggccaaagaagaagctcaggctgaaattgaacagtaccgcctgcagagggagaaagaattcaaggccaaggaagctgcggtggggcaccatttgtttttgttactg

SEQ ID NO: 302437 - DNA, 787 bp, Homo sapiens
ctgtctcataggcaattttattttcagaaaatggtagaatgagagaacagccagaaagacggaagaactgagggtaagaggtcctaaaagtgaagtgtgaagaaggttcacaaagtcataaagactgtattagggatcaaagttggtccctagatactggagatttgatgtcctagctaattgctccaccaacaggactgtctctcttatgagcactgtttcgtatgtatctttcagattctctgagactgaggagagatgtcttaccagcagcagcagtgcaagcagccctgccagccacctcctgtgtgccccacgccaaagtgcccagagccatgtccacccccgaagtgccctgagccttacctgcctcctccttgtccacctgagcattgcccacctccaccatgccaggataaatgccctcctgtgcaaccatacccaccctgccagcagaagtatccacccaagagcaagtaacatcactagaattcatcaggaccatgaaacaacaagatccagtggctcttcttattcccaggactccatcatcttcccttcagctgtagtgggaggctgcatcttccctaacctctgtctggcttgagcgttgacagagaaaaggcttagttctgaaaaccgatatgttgttggaagatgagcagccagatcattgcctaatctcgctttgctgtctgtgatgtagatggtggttcctatcctgagagcaagtgtgtttattcttttgcttctccccaataaagcacatgtttcatggtcaagccca

SEQ ID NO: 302438 - DNA, 1260 bp, Homo sapiens
agtaaaagaagtgagtttaaattagcaaaattcttgcccacattcaggaaaaaaaaataaatttgcagttagtttggcttggctcatgtgactctctaggcaaggaaaaccaggaaaatgatttgtctgctgaactgacagtcttgggtttgatacctattttatattctagtaattagttaaaatacagggttttatatccttgtaagtgtcaccatatgtaggagattaggactaaaggagacttgttcagagaattaaatttgaaaaactatacttcctttactaaaggttttgaaagcaaaacttgttttttcttcccaagtgttcagtgttcaggaatctggtgaatacttgctcagaaatttaacatcttcaattttaatttccctacctagcctttcttttttatttgttgttattgttttgccttctgtgatcagctcagggatgtgggcagtgggaacaaccttagaagccttaattcaggcctgatttccatgggagcatattgtccaggtgtacgcagaagaaggtgagcagacattcacactaaagctctgctaacattaattacttactaaattatgttttggattttagatcaatacaactgctgatgagaaggaccctacaaatcctttccgtttcccaaatattggtgtggagaagtttctggaattgaattctgagcagaatcatgatgactactgtttggcctatgtcttcacagaccgagattttgatgatggcgtacttggtctggcttgggttggagcaccttcaggtagtttatcatattaaatatgtcttaacttactacttgaaacaaaggggagttttcagagaatgttgaattttcaaagtataggagaaagtgatgcctgtataatatcctaatttatgctacttgagttaggcaagactcataagcataatgtaaaagccacaatagatgaaggagctttttattttgaaacgcatacagggaaatatcctgattcctgacatttgaatggaccaaatgaaataaataattttatgagaaaaagtggtaattctgaaacccaaagggaaatttaatttttccacaaaagttaataaatgttatatatttattaacttttttcccctccaaaatagggtacttagaatcaaaagaggaaaactgtgtcttgctctctcttctgtagtgagataaagaggagagaaatcctcatcaagagtggcaggtaaaaggaaaagaaagcctgcctttat

SEQ ID NO: 302439 - DNA, 3410 bp, Homo sapiens
gaattcgaggatccgggtaccatgggcggcggcaggcctagcagcacgggaaccgtcccccgcgcgcatgcgcgcgcccctgaagcgcctgggggacgggtatgggcgggaggtaggggcgcggctccgcgtgccagttgggtgcccgcgcgtcacgtggtgaggaaggaggcggaggtctgagtttcgagggagggggggagagaagagggaacgagcaagggaaggaaagcggggaaaggaggaaggaaacgaacgagggggagggaggtccctgttttggaggagctaggagcgttgccggcccctgaagtggagcgagagggaggtgcttcgccgtttctcctgccaggggaggtcccggcttcccgtggaggctccggaccaagccccttcagcttctccctccggatcgatgtgctgctgttaacccgtgaggaggcggcggcggcggcagcggcagcggaagatggtgttgctgagagtgttaattctgctcctctcctgggcggcggggatgggaggtcagtatgggaatcctttaaataaatatatcagacattatgaaggattatcttacaatgtggattcattacaccaaaaacaccagcgtgccaaaagagcagtctcacatgaagaccaatttttacgtctagatttccatgcccatggaagacatttcaacctacgaatgaagagggacacttcccttttcagtgatgaatttaaagtagaaacatcaaataaagtacttgattatgatacctctcatatttacactggacatatttatggtgaagaaggaagttttagccatgggtctgttattgatggaagatttgaaggattcatccagactcgtggtggcacattttatgttgagccagcagagagatatattaaagaccgaactctgccatttcactctgtcatttatcatgaagatgatattaactatccccataaatacggtcctcaggggggctgtgcagatcattcagtatttgaaagaatgaggaaataccagatgactggtgtagaggaagtaacacagatacctcaagaagaacatgctgctaatggtccagaacttctgaggaaaaaacgtacaacttcagctgaaaaaaatacttgtcagctttatattcagactgatcatttgttctttaaatattacggaacacgagaagctgtgattgcccagatatccagtcatgttaaagcgattgatacaatttaccagaccacagacttctccggaatccgtaacatcagtttcatggtgaaacgcataagaatcaatacaactgctgatgagaaggaccctacaaatcctttccgtttcccaaatattggtgtggagaagtttctggaattgaattctgagcagaatcatgatgactactgtttggcctatgtcttcacagaccgagattttgatgatggcgtacttggtctggcttgggttggagcaccttcaggaagctctggaggaatatgtgaaaaaagtaaactctattcagatggtaagaagaagtccttaaacactggaattattactgttcagaactatgggtctcatgtacctcccaaagtctctcacattacttttgctcacgaagttggacataactttggatccccacatgattctggaacagagtgcacaccaggagaatctaagaatttgggtcaaaaagaaaatggcaattacatcatgtatgcaagagcaacatctggggacaaacttaacaacaataaattctcactctgtagtattagaaatataagccaagttcttgagaagaagagaaacaactgttttgttgaatctggccaacctatttgtggaaatggaatggtagaacaaggtgaagaatgtgattgtggctatagtgaccagtgtaaagatgaatgctgcttcgatgcaaatcaaccagagggaagaaaatgcaaactgaaacctgggaaacagtgcagtccaagtcaaggtccttgttgtacagcacagtgtgcattcaagtcaaagtctgagaagtgtcgggatgattcagactgtgcaagggaaggaatatgtaatggcttcacagctctctgcccagcatctgaccctaaaccaaacttcacagactgtaataggcatacacaagtgtgcattaatgggcaatgtgcaggttctatctgtgagaaatatggcttagaggagtgtacgtgtgccagttctgatggcaaagatgataaagaattatgccatgtatgctgtatgaagaaaatggacccatcaacttgtgccagtacagggtctgtgcagtggagtaggcacttcagtggtcgaaccatcaccctgcaacctggatccccttgcaacgattttagaggttactgtgatgttttcatgcggtgcagattagtagatgctgatggtcctctagctaggcttaaaaaagcaatttttagtccagagctctatgaaaacattgctgaatggattgtggctcattggtgggcagtattacttatgggaattgctctgatcatgctaatggctggatttattaagatatgcagtgttcatactccaagtagtaatccaaagttgcctcctcctaaaccacttccaggcactttaaagaggaggagacctccacagcccattcagcaaccccagcgtcagcggccccgagagagttatcaaatgggacacatgagacgctaactgcagcttttgccttggttcttcctagtgcctacaatgggaaaacttcactccaaagagaaacctattaagtcatcatctccaaactaaaccctcacaagtaacagttgaagaaaaaatggcaagagatcatatcctcagaccaggtggaattacttaaattttaaagcctgaaaattccaatttgggggtgggaggtggaaaaggaacccaattttcttatgaacagatatttttaacttaatggcacaaagtcttagaatattattatgtgccccgtgttccctgttcttcgttgctgcattttcttcacttgcaggcaaacttggctctcaataaacttttaccacaaattgaaataaatatatttttttcaactgccaatcaaggctaggaggctcgaccacctcaacattggagacatcacttgccaatgtacataccttgttatatgcagacatgtatttcttacgtacactgtacttctgtgtgcaattgtaaacagaaattgcaatatggatgtttctttgtattataaaatttttccgctcttaattaaaaattactgtttaattgacatactcaggataacagagaatggtggtattcagtggtccaggattctgtaatgctttacacaggcagttttgaaatgaaaatcaatttaccccatggtacccggatcctcgaattc

SEQ ID NO: 302440 - DNA, 2040 bp, Homo sapiens
  misc_feature (1291)..(1291): n is a, c, g, or t
  misc_feature (2040)..(2040): n is a, c, g, or t
gcaattagcattatttgagcatttggcagcacaacccacatttatttcctcatggaagagacaagttagaagttttccttgttgaaaatgaaatgcactccccgagggccagactcagagttggagatgctttgtttactcagggtttcagccaaggcttcaggtccacagaggaaaactcctattctggtacttttgggaaagaaaaaaaaagacaatttcaagctttgggatgagatgtctacaaagcaggtaggtgaatttcccgttaatttgaggccccagggcagagtcccctctgctcctttttcttttccacaaatagcaaagggatcatattgcccagagggaagaaaatgcaaactgaaacctgggaaacagtgcagtccaagtcaaggtccttgttgtacagcacagtgtgcattcaagtcaaagtctgagaagtgtcgggatgattcagactgtgcaagggaaggaatatgtaatggcttcacagctctctgcccagcatctgaccctaaaccaaacttcacagactgtaataggcatacacaagtgtgcattaatgggcaatgtgcaggttctatctgtgagaaatatggcttagaggagtgtacgtgtgccagttctgatggcaaagatgataaagaattatgccatgtatgctgtatgaagaaaatggacccatcaacttgtgccagtacagggtctgtgcagtggagtaggcacttcagtggtcgaaccatcaccctgcaacctggatccccttgcaacgattttagaggttactgtgatgttttcatgcggtgcagattagtagatgctgatggtcctctagctaggcttaaaaaagcaatttttagtccagagctctatgaaaacattgctgaatggattgtggtaagtatgttttttatttacaaagaaaacttaaagtggtttgatcttaattttacttggccagaagtcatcaaagttacgagaaaacaacttaactatttatattagaattactttatatgaagatttttaaagttctaatatttctggttattatttccttctgaagtgatcagaatcatgtgtatcattcatagattgcttagtaggtgatgggagtcattctgttttaccgtgctccttagttcatctcctggatgggttacttcttttggtgcatattattagggcattttcatgggacttaaaaaacatttttttttgttgtttttcaagacaacttatttgcccaaatcgtggactaattggtgatttttcctgatctttcagnataatctctgggtctttatcttgtttgtaataggaaatgttgaacagaataagatcagatacacagccttttgtagatctactaatgattatggatgttcatccagcagtaatccactgaacgcttatttttaagcccacatatctccaagttgtacaaacacagaattacctgatgttttcttaaaagattgtcaagattgactatctcaacttaagtgttcatgctttaaaagtgataacattaaaatatctataggaagcttgcaaatgatatatttgagaatgtgctataattgaactgaatgtagtttgctttggaaattgacttataactcacattcccctttctcaaattagtgtgtatgtgtgtgtgtgtgtatgtatgtatgtgtgtgttcagaactatggatgccttaaagcacaaaagatgttgtttgtgtgggatgtcagccttttttgtactcttctaataacattctagagtaaaaattttatagttaaccccagcatttaaaatgatgtttaccgttcctaggacacattaggatatgtggtttttagatatgtaatgatcatggagtagaaggattgttgaaattggatttaggagatctacctaggtttcaaaccaaatacttgagcagttgacttaacttaggtttccttaaaacatgttactctttttttaaattcctgtgcttgttgcgtggtaagttctagtaaatacctgtcaaactgaagttgtcn

SEQ ID NO: 302441 - DNA, 5810 bp, Homo sapiens
  misc_feature (1012)..(1012): n is a, c, g, or t
gaattcgaggatccgggtaccatgggcggcggcaggcctagcagcacgggaaccgtcccccgcgcgcatgcgcgcgcccctgaagcgcctgggggacgggtatgggcgggaggtaggggcgcggctccgcgtgccagttgggtgcccgcgcgtcacgtggtgaggaaggaggcggaggtctgagtttcgagggagggggggagagaagagggaacgagcaagggaaggaaagcggggaaaggaggaaggaaacgaacgagggggagggaggtccctgttttggaggagctaggagcgttgccggcccctgaagtggagcgagagggaggtgcttcgccgtttctcctgccaggggaggtcccggcttcccgtggaggctccggaccaagccccttcagcttctccctccggatcgatgtgctgctgttaacccgtgaggaggcggcggcggcggcagcggcagcggaagatggtgttgctgagagtgttaattctgctcctctcctgggcggcggggatgggaggtcagtatgggaatcctttaaataaatatatcagacattatgaaggattatcttacaatgtggattcattacaccaaaaacaccagcgtgccaaaagagcagtctcacatgaagaccaatttttacgtctagatttccatgcccatggaagacatttcaacctacgaatgaagagggacacttcccttttcagtgatgaatttaaagtagaaacatcaaataaagtacttgattatgatacctctcatatttacactggacatatttatggtgaagaaggaagttttagccatgggtctgttattgatggaagatttgaaggattcatccagactcgtggtggcacattttatgttgagccagcagagagatatattaaagaccgaactctgccatttcactctgtcatttatcatgaagatgatattagtgaaggcttaaactgaggcttagaaaacttatgtcacttgattgtggacctcctgttntttaccctgtgctcttctgcttcactcatggaagaaagctgtaaattctcactgcctttacttcaaggatttctggggcttttctgaaatctactatccccataaatacggtcctcaggggggctgtgcagatcattcagtatttgaaagaatgaggaaataccagatgactggtgtagaggaagtaacacagatacctcaagaagaacatgctgctaatggtccagaacttctgaggaaaaaacgtacaacttcagctgaaaaaaatacttgtcagctttatattcagactgatcatttgttctttaaatattacggaacacgagaagctgtgattgcccagatatccagtcatgttaaagcgattgatacaatttaccagaccacagacttctccggaatccgtaacatcagtttcatggtgaaacgcataagaatcaatacaactgctgatgagaaggaccctacaaatcctttccgtttcccaaatattggtgtggagaagtttctggaattgaattctgagcagaatcatgatgactactgtttggcctatgtcttcacagaccgagattttgatgatggcgtacttggtctggcttgggttggagcaccttcaggaagctctggaggaatatgtgaaaaaagtaaactctattcagatggtaagaagaagtccttaaacactggaattattactgttcagaactatgggtctcatgtacctcccaaagtctctcacattacttttgctcacgaagttggacataactttggatccccacatgattctggaacagagtgcacaccaggagaatctaagaatttgggtcaaaaagaaaatggcaattacatcatgtatgcaagagcaacatctggggacaaacttaacaacaataaattctcactctgtagtattagaaatataagccaagttcttgagaagaagagaaacaactgttttgttgaatctggccaacctatttgtggaaatggaatggtagaacaaggtgaagaatgtgattgtggctatagtgaccagtgtaaagatgaatgctgcttcgatgcaaatcaaccagagggaagaaaatgcaaactgaaacctgggaaacagtgcagtccaagtcaaggtccttgttgtacagcacagtgtgcattcaagtcaaagtctgagaagtgtcgggatgattcagactgtgcaagggaaggaatatgtaatggcttcacagctctctgcccagcatctgaccctaaaccaaacttcacagactgtaataggcatacacaagtgtgcattaatgggcaatgtgcaggttctatctgtgagaaatatggcttagaggagtgtacgtgtgccagttctgatggcaaagatgataaagaattatgccatgtatgctgtatgaagaaaatggacccatcaacttgtgccagtacagggtctgtgcagtggagtaggcacttcagtggtcgaaccatcaccctgcaacctggatccccttgcaacgattttagaggttactgtgatgttttcatgcggtgcagattagtagatgctgatggtcctctagctaggcttaaaaaagcaatttttagtccagagctctatgaaaacattgctgaatggattgtggctcattggtgggcagtattacttatgggaattgctctgatcatgctaatggctggatttattaagatatgcagtgttcatactccaagtagtaatccaaagttgcctcctcctaaaccacttccaggcactttaaagaggaggagacctccacagcccattcagcaaccccagcgtcagcggccccgagagagttatcaaatgggacacatgagacgctaactgcagcttttgccttggttcttcctagtgcctacaatgggaaaacttcactccaaagagaaacctattaagtcatcatctccaaactaaaccctcacaagtaacagttgaagaaaaaatggcaagagatcatatcctcagaccaggtggaattacttaaattttaaagcctgaaaattccaatttgggggtgggaggtggaaaaggaacccaattttcttatgaacagatatttttaacttaatggcacaaagtcttagaatattattatgtgccccgtgttccctgttcttcgttgctgcattttcttcacttgcaggcaaacttggctctcaataaacttttaccacaaattgaaataaatatatttttttcaactgccaatcaaggctaggaggctcgaccacctcaacattggagacatcacttgccaatgtacataccttgttatatgcagacatgtatttcttacgtacactgtacttctgtgtgcaattgtaaacagaaattgcaatatggatgtttctttgtattataaaatttttccgctcttaattaaaaattactgtttaattgacatactcaggataacagagaatggtggtattcagtggtccaggattctgtaatgctttacacaggcagttttgaaatgaaaatcaatttacctttctgttacgatggagttggttttgatactcattttttctttatcacatggctgctacgggcacaagtgactatactgaagaacacagttaagtgttgtgcaaactggacatagcagcacatactacttcagagttcatgatgtagatgtctggtttctgcttacgtcttttaaactttctaattcaattccatttttcaattaataggtgaaattttattcatgctttgatagaaattatgtcaatgaaatgattctttttatttgtagcctacttatttgtgtttttcatatatctgaaatatgctaattatgttttctgtctgatatggaaaagaaaagctgtgtctttatcaaaatatttaaacggttttttcagcatatcatcactgatcattggtaaccactaaagatgagtaatttgcttaagtagtagttaaaattgtagataggccttctgacattttttttcctaaaatttttaacagcattgaaggtgaaacagcacaatgtcccattccaaatttatttttgaaacagatgtaaataattggcattttaaagagaaagcaaaaacatttaatgtattaacaggcttattgctatgcaggaaatagaaggggcattacaaaaattgaagcttgtgacatatttattgcttctgttttccaactacatcacttcaactagaagtaaagctatgattttcctgacttcacataggaggcaaatttagagaaagttgtaaagatttctatgttttgggtttttttttttcctttttttttttaagagtataaggtttacacaatcattctcataatgtgacgcaagccagcaaggccaaaaatgctagagaaaataacgggatctcttccttgtaaacttgtacagtatgtggtgactttttcaaaatacagctttttgtacatgatttagagacaaattttgtacatgaaaccccagatagactataaataattctaaacaaacaagtaggtagatatgtatgtaattgcttttaaatcatttaaatgcctttgtttttggactgtgcaaaggttggaagtgggtttgcatttctaaaatggtgacttttattctgcaagagttcttagtaacttcttgagtgtggtagactttggaacatgtaaattttttgcttgtaatgttatcctgtggtaggattttggcaggtacacacactgccctattttattttgagtctaagttaaatgttttctgaaaagagatacatgcactgaactctttccactgcgaatcaagatgtggtaatataaaaggatcaagacaaatgagatctaatactactgtcagttttaatgtccactgtgttttatacagtatctttttttgttcactttggaaatttttactaaaaattgcaaaaaataaagtattgtgcaaagatgtaaggttttttgaaacttgaaatgcattaataaatagacgattaaatcaacttgaaggttctatactctttgaactctgagaactatcacaagaagcttcccacaaggcagtgttttcttacagttgtctcttcctacaaaagtatagattatctttattcttaatactttggaatccatgtagaaaatttccagttagatactctgcgtacacacaataaacctttttaaaacacccaactaatctcaactgcattacattgtttctaatcaatattcagtgcttgtcttggtggaagaggtgagtcattttgaaaacttatggtcttgtttttatgtgtttttcaaagttttgaatgctaagtacctcatttattttaaaaagcctagtttaatgataagtttgtttaaaattttgagccatcatttttctcttcatagcaaataaggagagaattgacatttcagtgttacctagaaaaggaattgtaagcccagaataattccctgcatgaggtaatctgcttcaaattctttttttagtcaaggttagctataagtaatacttgttaaatgagtaaatatgtaatactttgtgaattactttgttaatttaggagcatcaaatgtatattatgtttagttatttatgaaactctcaatattgattgatttgggtaattataaattagttatttttacttgtaattgaatgcttaaattctgtttacagtccgtcctctctccctccatccctccctccccagttttataaattcaggtaccaattcacaaacaaaatcagaaataaaataaatttattgactgcttctggattta

SEQ ID NO: 302442 - DNA, 5019 bp, Homo sapiens
  misc_feature (1012)..(1012): n is a, c, g, or t
gaattcgaggatccgggtaccatgggcggcggcaggcctagcagcacgggaaccgtcccccgcgcgcatgcgcgcgcccctgaagcgcctgggggacgggtatgggcgggaggtaggggcgcggctccgcgtgccagttgggtgcccgcgcgtcacgtggtgaggaaggaggcggaggtctgagtttcgagggagggggggagagaagagggaacgagcaagggaaggaaagcggggaaaggaggaaggaaacgaacgagggggagggaggtccctgttttggaggagctaggagcgttgccggcccctgaagtggagcgagagggaggtgcttcgccgtttctcctgccaggggaggtcccggcttcccgtggaggctccggaccaagccccttcagcttctccctccggatcgatgtgctgctgttaacccgtgaggaggcggcggcggcggcagcggcagcggaagatggtgttgctgagagtgttaattctgctcctctcctgggcggcggggatgggaggtcagtatgggaatcctttaaataaatatatcagacattatgaaggattatcttacaatgtggattcattacaccaaaaacaccagcgtgccaaaagagcagtctcacatgaagaccaatttttacgtctagatttccatgcccatggaagacatttcaacctacgaatgaagagggacacttcccttttcagtgatgaatttaaagtagaaacatcaaataaagtacttgattatgatacctctcatatttacactggacatatttatggtgaagaaggaagttttagccatgggtctgttattgatggaagatttgaaggattcatccagactcgtggtggcacattttatgttgagccagcagagagatatattaaagaccgaactctgccatttcactctgtcatttatcatgaagatgatattagtgaaggcttaaactgaggcttagaaaacttatgtcacttgattgtggacctcctgttntttaccctgtgctcttctgcttcactcatggaagaaagctgtaaattctcactgcctttacttcaaggatttctggggcttttctgaaatctactatccccataaatacggtcctcaggggggctgtgcagatcattcagtatttgaaagaatgaggaaataccagatgactggtgtagaggaagtaacacagatacctcaagaagaacatgctgctaatggtccagaacttctgaggaaaaaacgtacaacttcagctgaaaaaaatacttgtcagctttatattcagactgatcatttgttctttaaatattacggaacacgagaagctgtgattgcccagatatccagtcatgttaaagcgattgatacaatttaccagaccacagacttctccggaatccgtaacatcagtttcatggtgaaacgcataagaatcaatacaactgctgatgagaaggaccctacaaatcctttccgtttcccaaatattggtgtggagaagtttctggaattgaattctgagcagaatcatgatgactactgtttggcctatgtcttcacagaccgagattttgatgatggcgtacttggtctggcttgggttggagcaccttcaggaagctctggaggaatatgtgaaaaaagtaaactctattcagatggtaagaagaagtccttaaacactggaattattactgttcagaactatgggtctcatgtacctcccaaagtctctcacattacttttgctcacgaagttggacataactttggatccccacatgattctggaacagagtgcacaccaggagaatctaagaatttgggtcaaaaagaaaatggcaattacatcatgtatgcaagagcaacatctggggacaaacttaacaacaataaattctcactctgtagtattagaaatataagccaagttcttgagaagaagagaaacaactgttttgttgaatctggccaacctatttgtggaaatggaatggtagaacaaggtgaagaatgtgattgtggctatagtgaccagtgtaaagatgaatgctgcttcgatgcaaatcaaccagagggaagaaaatgcaaactgaaacctgggaaacagtgcagtccaagtcaaggtccttgttgtacagcacagtgtgcattcaagtcaaagtctgagaagtgtcgggatgattcagactgtgcaagggaaggaatatgtaatggcttcacagctctctgcccagcatctgaccctaaaccaaacttcacagactgtaataggcatacacaagtgtgcattaatgggcaatgtgcaggttctatctgtgagaaatatggcttagaggagtgtacgtgtgccagttctgatggcaaagatgataaagaattatgccatgtatgctgtatgaagaaaatggacccatcaacttgtgccagtacagggtctgtgcagtggagtaggcacttcagtggtcgaaccatcaccctgcaacctggatccccttgcaacgattttagaggttactgtgatgttttcatgcggtgcagattagtagatgctgatggtcctctagctaggcttaaaaaagcaatttttagtccagagctctatgaaaacattgctgaatggattgtggctcattggtgggcagtattacttatgggaattgctctgatcatgctaatggctggatttattaagatatgcagtgttcatactccaagtagtaatccaaagttgcctcctcctaaaccacttccaggcactttaaagaggaggagacctccacagcccattcagcaaccccagcgtcagcggccccgagagagttatcaaatgggacacatgagacgctaactgcagcttttgccttggttcttcctagtgcctacaatgggaaaacttcactccaaagagaaacctattaagtcatcatctccaaactaaaccctcacaagtaacagttgaagaaaaaatggcaagagatcatatcctcagaccaggtggaattacttaaattttaaagcctgaaaattccaatttgggggtgggaggtggaaaaggaacccaattttcttatgaacagatatttttaacttaatggcacaaagtcttagaatattattatgtgccccgtgttccctgttcttcgttgctgcattttcttcacttgcaggcaaacttggctctcaataaacttttaccacaaattgaaataaatatatttttttcaactgccaatcaaggctaggaggctcgaccacctcaacattggagacatcacttgccaatgtacataccttgttatatgcagacatgtatttcttacgtacactgtacttctgtgtgcaattgtaaacagaaattgcaatatggatgtttctttgtattataaaatttttccgctcttaattaaaaattactgtttaattgacatactcaggataacagagaatggtggtattcagtggtccaggattctgtaatgctttacacaggcagttttgaaatgaaaatcaatttacctttctgttacgatggagttggttttgatactcattttttctttatcacatggctgctacgggcacaagtgactatactgaagaacacagttaagtgttgtgcaaactggacatagcagcacatactacttcagagttcatgatgtagatgtctggtttctgcttacgtcttttaaactttctaattcaattccatttttcaattaataggtgaaattttattcatgctttgatagaaattatgtcaatgaaatgattctttttatttgtagcctacttatttgtgtttttcatatatctgaaatatgctaattatgttttctgtctgatatggaaaagaaaagctgtgtctttatcaaaatatttaaacggttttttcagcatatcatcactgatcattggtaaccactaaagatgagtaatttgcttaagtagtagttaaaattgtagataggccttctgacattttttttcctaaaatttttaacagcattgaaggtgaaacagcacaatgtcccattccaaatttatttttgaaacagatgtaaataattggcattttaaagagaaagcaaaaacatttaatgtattaacaggcttattgctatgcaggaaatagaaggggcattacaaaaattgaagcttgtgacatatttattgcttctgttttccaactacatcacttcaactagaagtaaagctatgattttcctgacttcacataggaggcaaatttagagaaagttgtaaagatttctatgttttgggtttttttttttcctttttttttttaagagtataaggtttacacaatcattctcataatgtgacgcaagccagcaaggccaaaaatgctagagaaaataacgggatctcttccttgtaaacttgtacagtatgtggtgactttttcaaaatacagctttttgtacatgatttagagacaaattttgtacatgaaaccccagatagactataaataattctaaacaaacaagtaggtagatatgtatgtaattgcttttaaatcatttaaatgcctttgtttttggactgtgcaaaggttggaagtgggtttgcatttctaaaatggtgacttttattctgcaagagttcttagtaacttcttgagtgtggtagactttggaacatgtaaattttttgcttgtaatgttatcctgtggtaggattttggcaggtacacacactgccctattttattttgagtctaagttaaatgttttctgaaaagagatacatgcactgaactctttccactgcgaatcaagatgtggtaatataaaaggatcaagacaaatgagatctaatactactgtcagttttaatgtccactgtgttttatacagtatctttttttgttcactttggaaatttttactaaaaattgcaaaaaataaagtattgtgcaaagatgtaaggttttttgaaacttgaaatgcattaataaatagacgattaaatca

SEQ ID NO: 302443 - DNA, 6840 bp, Homo sapiens
  misc_feature (3402)..(3402): n is a, c, g, or t
gaattcgaggatccgggtaccatgggcggcggcaggcctagcagcacgggaaccgtcccccgcgcgcatgcgcgcgcccctgaagcgcctgggggacgggtatgggcgggaggtaggggcgcggctccgcgtgccagttgggtgcccgcgcgtcacgtggtgaggaaggaggcggaggtctgagtttcgagggagggggggagagaagagggaacgagcaagggaaggaaagcggggaaaggaggaaggaaacgaacgagggggagggaggtccctgttttggaggagctaggagcgttgccggcccctgaagtggagcgagagggaggtgcttcgccgtttctcctgccaggggaggtcccggcttcccgtggaggctccggaccaagccccttcagcttctccctccggatcgatgtgctgctgttaacccgtgaggaggcggcggcggcggcagcggcagcggaagatggtgttgctgagagtgttaattctgctcctctcctgggcggcggggatgggaggtcagtatgggaatcctttaaataaatatatcagacattatgaaggattatcttacaatgtggattcattacaccaaaaacaccagcgtgccaaaagagcagtctcacatgaagaccaatttttacgtctagatttccatgcccatggaagacatttcaacctacgaatgaagagggacacttcccttttcagtgatgaatttaaagtagaaacatcaaataaagtacttgattatgatacctctcatatttacactggacatatttatggtgaagaaggaagttttagccatgggtctgttattgatggaagatttgaaggattcatccagactcgtggtggcacattttatgttgagccagcagagagatatattaaagaccgaactctgccatttcactctgtcatttatcatgaagatgatattaactatccccataaatacggtcctcaggggggctgtgcagatcattcagtatttgaaagaatgaggaaataccagatgactggtgtagaggaagtaacacagatacctcaagaagaacatgctgctaatggtccagaacttctgaggaaaaaacgtacaacttcagctgaaaaaaatacttgtcagctttatattcagactgatcatttgttctttaaatattacggaacacgagaagctgtgattgcccagatatccagtcatgttaaagcgattgatacaatttaccagaccacagacttctccggaatccgtaacatcagtttcatggtgaaacgcataagaatcaatacaactgctgatgagaaggaccctacaaatcctttccgtttcccaaatattggtgtggagaagtttctggaattgaattctgagcagaatcatgatgactactgtttggcctatgtcttcacagaccgagattttgatgatggcgtacttggtctggcttgggttggagcaccttcaggaagctctggaggaatatgtgaaaaaagtaaactctattcagatggtaagaagaagtccttaaacactggaattattactgttcagaactatgggtctcatgtacctcccaaagtctctcacattacttttgctcacgaagttggacataactttggatccccacatgattctggaacagagtgcacaccaggagaatctaagaatttgggtcaaaaagaaaatggcaattacatcatgtatgcaagagcaacatctggggacaaacttaacaacaataaattctcactctgtagtattagaaatataagccaagttcttgagaagaagagaaacaactgttttgttgaatctggccaacctatttgtggaaatggaatggtagaacaaggtgaagaatgtgattgtggctatagtgaccagtgtaaagatgaatgctgcttcgatgcaaatcaaccagagggaagaaaatgcaaactgaaacctgggaaacagtgcagtccaagtcaaggtccttgttgtacagcacagtgtgcattcaagtcaaagtctgagaagtgtcgggatgattcagactgtgcaagggaaggaatatgtaatggcttcacagctctctgcccagcatctgaccctaaaccaaacttcacagactgtaataggcatacacaagtgtgcattaatggggtaagcatttaactatatgttttaaaatttaattttagaaaacttgtttttcagaagaattattgatgcttaaagctacatagttaaagtaattaatcttggtctctgtttaagtaatattccctcacaaaaccatgaatatattatgtggcattcaattagctactaatttgtctttcatctttccatgtacatgtggttgatattctctagagaaacatagttgtacaactcggcatgtgatttgtctataatatttaagttttataaaataatatttcagtagcctaaataaaagaactctttggtcatcttctctgaatatcaaaccttcaaagcttttgtggctgaatatcactttgctctacaggaaaaaaatttaatttttctttctttatagaagagccgtaataaccaacataaaatcgatcctcatctaatctcttgctctgcttttatttcatttttttaagttgccattgctttaaaagatttactatctttcttggatttactgtttttcaaattttttcaaatgtatttatgtaattcagttttgatactcatctctgtttgtttttcactttcatttccatttaaatattttgacattggaagctcatacttgcctgtctgttactataaaaaataggtttgactgtatagggattaaacaatttgtcttttatttttcttctagcaatgtgcaggttctatctgtgagaaatatggcttagaggagtgtacgtgtgccagttctgatggcaaagatgataaagaattatgccatgtatgctgtatgaagaaaagtaaggcttttaaaaacacaagagtataaaatttgcctcaaactattattttctcctaaattttaagtgtaaaactttgacctacagtttggccagataatttccagctaaatctgtcctcttgaggagattataaatgtaacgtagcattgtgtctctattattatggtctctacaatgttttaaaaatgataaactagacaaaacgttgccagctttacagcagtaatttacataaacactgttagactttaagtcatcgtggacactgagtcaagacttgctggttgcttgtttacattgtaacatttaatatgaattactgatggcgttacccagcctaactagagaaggtctgtataacatgttatggtaatgatttcagttttttttccctctttgtatttgcacaactggaaatctgatctncaacttatatttgaatctgaccttcagcttatatttggcatttcttttccagtggacccatcaacttgtgccagtacagggtctgtgcagtggagtaggcacttcagtggtcgaaccatcaccctgcaacctggatccccttgcaacgattttagaggttactgtgatgttttcatgcggtgcagattagtagatgctgatggtcctctagctaggcttaaaaaagcaatttttagtccagagctctatgaaaacattgctgaatggattgtggctcattggtgggcagtattacttatgggaattgctctgatcatgctaatggctggatttattaagatatgcagtgttcatactccaagtagtaatccaaagttgcctcctcctaaaccacttccaggcactttaaagaggaggagacctccacagcccattcagcaaccccagcgtcagcggccccgagagagttatcaaatgggacacatgagacgctaactgcagcttttgccttggttcttcctagtgcctacaatgggaaaacttcactccaaagagaaacctattaagtcatcatctccaaactaaaccctcacaagtaacagttgaagaaaaaatggcaagagatcatatcctcagaccaggtggaattacttaaattttaaagcctgaaaattccaatttgggggtgggaggtggaaaaggaacccaattttcttatgaacagatatttttaacttaatggcacaaagtcttagaatattattatgtgccccgtgttccctgttcttcgttgctgcattttcttcacttgcaggcaaacttggctctcaataaacttttaccacaaattgaaataaatatatttttttcaactgccaatcaaggctaggaggctcgaccacctcaacattggagacatcacttgccaatgtacataccttgttatatgcagacatgtatttcttacgtacactgtacttctgtgtgcaattgtaaacagaaattgcaatatggatgtttctttgtattataaaatttttccgctcttaattaaaaattactgtttaattgacatactcaggataacagagaatggtggtattcagtggtccaggattctgtaatgctttacacaggcagttttgaaatgaaaatcaatttacctttctgttacgatggagttggttttgatactcattttttctttatcacatggctgctacgggcacaagtgactatactgaagaacacagttaagtgttgtgcaaactggacatagcagcacatactacttcagagttcatgatgtagatgtctggtttctgcttacgtcttttaaactttctaattcaattccatttttcaattaataggtgaaattttattcatgctttgatagaaattatgtcaatgaaatgattctttttatttgtagcctacttatttgtgtttttcatatatctgaaatatgctaattatgttttctgtctgatatggaaaagaaaagctgtgtctttatcaaaatatttaaacggttttttcagcatatcatcactgatcattggtaaccactaaagatgagtaatttgcttaagtagtagttaaaattgtagataggccttctgacattttttttcctaaaatttttaacagcattgaaggtgaaacagcacaatgtcccattccaaatttatttttgaaacagatgtaaataattggcattttaaagagaaagcaaaaacatttaatgtattaacaggcttattgctatgcaggaaatagaaggggcattacaaaaattgaagcttgtgacatatttattgcttctgttttccaactacatcacttcaactagaagtaaagctatgattttcctgacttcacataggaggcaaatttagagaaagttgtaaagatttctatgttttgggtttttttttttcctttttttttttaagagtataaggtttacacaatcattctcataatgtgacgcaagccagcaaggccaaaaatgctagagaaaataacgggatctcttccttgtaaacttgtacagtatgtggtgactttttcaaaatacagctttttgtacatgatttagagacaaattttgtacatgaaaccccagatagactataaataattctaaacaaacaagtaggtagatatgtatgtaattgcttttaaatcatttaaatgcctttgtttttggactgtgcaaaggttggaagtgggtttgcatttctaaaatggtgacttttattctgcaagagttcttagtaacttcttgagtgtggtagactttggaacatgtaaattttttgcttgtaatgttatcctgtggtaggattttggcaggtacacacactgccctattttattttgagtctaagttaaatgttttctgaaaagagatacatgcactgaactctttccactgcgaatcaagatgtggtaatataaaaggatcaagacaaatgagatctaatactactgtcagttttaatgtccactgtgttttatacagtatctttttttgttcactttggaaatttttactaaaaattgcaaaaaataaagtattgtgcaaagatgtaaggttttttgaaacttgaaatgcattaataaatagacgattaaatcaacttgaaggttctatactctttgaactctgagaactatcacaagaagcttcccacaaggcagtgttttcttacagttgtctcttcctacaaaagtatagattatctttattcttaatactttggaatccatgtagaaaatttccagttagatactctgcgtacacacaataaacctttttaaaacacccaactaatctcaactgcattacattgtttctaatcaatattcagtgcttgtcttggtggaagaggtgagtcattttgaaaacttatggtcttgtttttatgtgtttttcaaagttttgaatgctaagtacctcatttattttaaaaagcctagtttaatgataagtttgtttaaaattttgagccatcatttttctcttcatagcaaataaggagagaattgacatttcagtgttacctagaaaaggaattgtaagcccagaataattccctgcatgaggtaatctgcttcaaattctttttttagtcaaggttagctataagtaatacttgttaaatgagtaaatatgtaatactttgtgaattactttgttaatttaggagcatcaaatgtatattatgtttagttatttatgaaactctcaatattgattgatttgggtaattataaattagttatttttacttgtaattgaatgcttaaattctgtttacagtccgtcctctctccctccatccctccctccccagttttataaattcaggtaccaattcacaaacaaaatcagaaataaaataaatttattgactgcttctggattta

SEQ ID NO: 302444 - DNA, 5794 bp, Homo sapiens
  misc_feature (1012)..(1012): n is a, c, g, or t
gaattcgaggatccgggtaccatgggcggcggcaggcctagcagcacgggaaccgtcccccgcgcgcatgcgcgcgcccctgaagcgcctgggggacgggtatgggcgggaggtaggggcgcggctccgcgtgccagttgggtgcccgcgcgtcacgtggtgaggaaggaggcggaggtctgagtttcgagggagggggggagagaagagggaacgagcaagggaaggaaagcggggaaaggaggaaggaaacgaacgagggggagggaggtccctgttttggaggagctaggagcgttgccggcccctgaagtggagcgagagggaggtgcttcgccgtttctcctgccaggggaggtcccggcttcccgtggaggctccggaccaagccccttcagcttctccctccggatcgatgtgctgctgttaacccgtgaggaggcggcggcggcggcagcggcagcggaagatggtgttgctgagagtgttaattctgctcctctcctgggcggcggggatgggaggtcagtatgggaatcctttaaataaatatatcagacattatgaaggattatcttacaatgtggattcattacaccaaaaacaccagcgtgccaaaagagcagtctcacatgaagaccaatttttacgtctagatttccatgcccatggaagacatttcaacctacgaatgaagagggacacttcccttttcagtgatgaatttaaagtagaaacatcaaataaagtacttgattatgatacctctcatatttacactggacatatttatggtgaagaaggaagttttagccatgggtctgttattgatggaagatttgaaggattcatccagactcgtggtggcacattttatgttgagccagcagagagatatattaaagaccgaactctgccatttcactctgtcatttatcatgaagatgatattagtgaaggcttaaactgaggcttagaaaacttatgtcacttgattgtggacctcctgttntttaccctgtgctcttctgcttcactcatggaagaaagctgtaaattctcactgcctttacttcaaggatttctggggcttttctgaaatctactatccccataaatacggtcctcaggggggctgtgcagatcattcagtatttgaaagaatgaggaaataccagatgactggtgtagaggaagtaacacagatacctcaagaagaacatgctgctaatggtccagaacttctgaggaaaaaacgtacaacttcagctgaaaaaaatacttgtcagctttatattcagactgatcatttgttctttaaatattacggaacacgagaagctgtgattgcccagatatccagtcatgttaaagcgattgatacaatttaccagaccacagacttctccggaatccgtaacatcagtttcatggtgaaacgcataagaatcaatacaactgctgatgagaaggaccctacaaatcctttccgtttcccaaatattggtgtggagaagtttctggaattgaattctgagcagaatcatgatgactactgtttggcctatgtcttcacagaccgagattttgatgatggcgtacttggtctggcttgggttggagcaccttcaggaagctctggaggaatatgtgaaaaaagtaaactctattcagatggtaagaagaagtccttaaacactggaattattactgttcagaactatgggtctcatgtacctcccaaagtctctcacattacttttgctcacgaagttggacataactttggatccccacatgattctggaacagagtgcacaccaggagaatctaagaatttgggtcaaaaagaaaatggcaattacatcatgtatgcaagagcaacatctggggacaaacttaacaacaataaattctcactctgtagtattagaaatataagccaagttcttgagaagaagagaaacaactgttttgttgaatctggccaacctatttgtggaaatggaatggtagaacaaggtgaagaatgtgattgtggctatagtgaccagtgtaaagatgaatgctgcttcgatgcaaatcaaccagagggaagaaaatgcaaactgaaacctgggaaacagtgcagtccaagtcaaggtccttgttgtacagcacagtgtgcattcaagtcaaagtctgagaagtgtcgggatgattcagactgtgcaagggaaggaatatgtaatggcttcacagctctctgcccagcatctgaccctaaaccaaacttcacagactgtaataggcatacacaagtgtgcattaatgggcaatgtgcaggttctatctgtgagaaatatggcttagaggagtgtacgtgtgccagttctgatggcaaagatgataaagaattatgccatgtatgctgtatgaagaaaatggacccatcaacttgtgccagtacagggtctgtgcagtggagtaggcacttcagtggtcgaaccatcaccctgcaacctggatccccttgcaacgattttagaggttactgtgatgttttcatgcggtgcagattagtagatgctgatggtcctctagctaggcttaaaaaagcaatttttagtccagagctctatgaaaacattgctgaatggattgtggctcattggtgggcagtattacttatgggaattgctctgatcatgctaatggctggatttattaagatatgcagtgttcatactccaagtagtaatccaaagttgcctcctcctaaaccacttccaggcactttaaagaggaggagacctccacagcccattcagcaaccccagcgtcagcggccccgagagagttatcaaatgggacacatgagacgctaactgcagcttttgccttggttcttcctagtgcctacaatgggaaaacttcactccaaagagaaacctattaagtcatcatctccaaactaaaccctcacaagtaacagttgaagaaaaaatggcaagagatcatatcctcagaccaggtggaattacttaaattttaaagcctgaaaattccaatttgggggtgggaggtggaaaaggaacccaattttcttatgaacagatatttttaacttaatggcacaaagtcttagaatattattatgtgccccgtgttccctgttcttcgttgctgcattttcttcacttgcaggcaaacttggctctcaataaacttttaccacaaattgaaataaatatatttttttcaactgccaatcaaggctaggaggctcgaccacctcaacattggagacatcacttgccaatgtacataccttgttatatgcagacatgtatttcttacgtacactgtacttctgtgtgcaattgtaaacagaaattgcaatatggatgtttctttgtattataaaatttttccgctcttaattaaaaattactgtttaattgacatactcaggataacagagaatggtggtattcagtggtccaggattctgtaatgctttacacaggcagttttgaaatgaaaatcaatttacctttctgttacgatggagttggttttgatactcattttttctttatcacatggctgctacgggcacaagtgactatactgaagaacacagttaagtgttgtgcaaactggacatagcagcacatactacttcagagttcatgatgtagatgtctggtttctgcttacgtcttttaaactttctaattcaattccatttttcaattaataggtgaaattttattcatgctttgatagaaattatgtcaatgaaatgattctttttatttgtagcctacttatttgtgtttttcatatatctgaaatatgctaattatgttttctgtctgatatggaaaagaaaagctgtgtctttatcaaaatatttaaacggttttttcagcatatcatcactgatcattggtaaccactaaagatgagtaatttgcttaagtagtagttaaaattgtagataggccttctgacattttttttcctaaaatttttaacagcattgaaggtgaaacagcacaatgtcccattccaaatttatttttgaaacagatgtaaataattggcattttaaagagaaagcaaaaacatttaatgtattaacaggcttattgctatgcaggaaatagaaggggcattacaaaaattgaagcttgtgacatatttattgcttctgttttccaactacatcacttcaactagaagtaaagctatgattttcctgacttcacataggaggcaaatttagagaaagttgtaaagatttctatgttttgggtttttttttttcctttttttttttaagagtataaggtttacacaatcattctcataatgtgacgcaagccagcaaggccaaaaatgctagagaaaataacgggatctcttccttgtaaacttgtacagtatgtggtgactttttcaaaatacagctttttgtacatgatttagagacaaattttgtacatgaaaccccagatagactataaataattctaaacaaacaagtaggtagatatgtatgtaattgcttttaaatcatttaaatgcctttgtttttggactgtgcaaaggttggaagtgggtttgcatttctaaaatggtgacttttattctgcaagagttcttagtaacttcttgagtgtggtagactttggaacatgtaaattttttgcttgtaatgttatcctgtggtaggattttgccctattttattttgagtctaagttaaatgttttctgaaaagagatacatgcactgaactctttccactgcgaatcaagatgtggtaatataaaaggatcaagacaaatgagatctaatactactgtcagttttaatgtccactgtgttttatacagtatctttttttgttcactttggaaatttttactaaaaattgcaaaaaataaagtattgtgcaaagatgtaaggttttttgaaacttgaaatgcattaataaatagacgattaaatcaacttgaaggttctatactctttgaactctgagaactatcacaagaagcttcccacaaggcagtgttttcttacagttgtctcttcctacaaaagtatagattatctttattcttaatactttggaatccatgtagaaaatttccagttagatactctgcgtacacacaataaacctttttaaaacacccaactaatctcaactgcattacattgtttctaatcaatattcagtgcttgtcttggtggaagaggtgagtcattttgaaaacttatggtcttgtttttatgtgtttttcaaagttttgaatgctaagtacctcatttattttaaaaagcctagtttaatgataagtttgtttaaaattttgagccatcatttttctcttcatagcaaataaggagagaattgacatttcagtgttacctagaaaaggaattgtaagcccagaataattccctgcatgaggtaatctgcttcaaattctttttttagtcaaggttagctataagtaatacttgttaaatgagtaaatatgtaatactttgtgaattactttgttaatttaggagcatcaaatgtatattatgtttagttatttatgaaactctcaatattgattgatttgggtaattataaattagttatttttacttgtaattgaatgcttaaattctgtttacagtccgtcctctctccctccatccctccctccccagttttataaattcaggtaccaattcacaaacaaaatcagaaataaaataaatttattgactgcttctggattta

SEQ ID NO: 302445 - DNA, 6146 bp, Homo sapiens
  misc_feature (2708)..(2708): n is a, c, g, or t
agtaaaagaagtgagtttaaattagcaaaattcttgcccacattcaggaaaaaaaaataaatttgcagttagtttggcttggctcatgtgactctctaggcaaggaaaaccaggaaaatgatttgtctgctgaactgacagtcttgggtttgatacctattttatattctagtaattagttaaaatacagggttttatatccttgtaagtgtcaccatatgtaggagattaggactaaaggagacttgttcagagaattaaatttgaaaaactatacttcctttactaaaggttttgaaagcaaaacttgttttttcttcccaagtgttcagtgttcaggaatctggtgaatacttgctcagaaatttaacatcttcaattttaatttccctacctagcctttcttttttatttgttgttattgttttgccttctgtgatcagctcagggatgtgggcagtgggaacaaccttagaagccttaattcaggcctgatttccatgggagcatattgtccaggtgtacgcagaagaaggtgagcagacattcacactaaagctctgctaacattaattacttactaaattatgttttggattttagatcaatacaactgctgatgagaaggaccctacaaatcctttccgtttcccaaatattggtgtggagaagtttctggaattgaattctgagcagaatcatgatgactactgtttggcctatgtcttcacagaccgagattttgatgatggcgtacttggtctggcttgggttggagcaccttcaggaagctctggaggaatatgtgaaaaaagtaaactctattcagatggtaagaagaagtccttaaacactggaattattactgttcagaactatgggtctcatgtacctcccaaagtctctcacattacttttgctcacgaagttggacataactttggatccccacatgattctggaacagagtgcacaccaggagaatctaagaatttgggtcaaaaagaaaatggcaattacatcatgtatgcaagagcaacatctggggacaaacttaacaacaataaattctcactctgtagtattagaaatataagccaagttcttgagaagaagagaaacaactgttttgttgaatctggccaacctatttgtggaaatggaatggtagaacaaggtgaagaatgtgattgtggctatagtgaccagtgtaaagatgaatgctgcttcgatgcaaatcaaccagagggaagaaaatgcaaactgaaacctgggaaacagtgcagtccaagtcaaggtccttgttgtacagcacagtgtgcattcaagtcaaagtctgagaagtgtcgggatgattcagactgtgcaagggaaggaatatgtaatggcttcacagctctctgcccagcatctgaccctaaaccaaacttcacagactgtaataggcatacacaagtgtgcattaatggggtaagcatttaactatatgttttaaaatttaattttagaaaacttgtttttcagaagaattattgatgcttaaagctacatagttaaagtaattaatcttggtctctgtttaagtaatattccctcacaaaaccatgaatatattatgtggcattcaattagctactaatttgtctttcatctttccatgtacatgtggttgatattctctagagaaacatagttgtacaactcggcatgtgatttgtctataatatttaagttttataaaataatatttcagtagcctaaataaaagaactctttggtcatcttctctgaatatcaaaccttcaaagcttttgtggctgaatatcactttgctctacaggaaaaaaatttaatttttctttctttatagaagagccgtaataaccaacataaaatcgatcctcatctaatctcttgctctgcttttatttcatttttttaagttgccattgctttaaaagatttactatctttcttggatttactgtttttcaaattttttcaaatgtatttatgtaattcagttttgatactcatctctgtttgtttttcactttcatttccatttaaatattttgacattggaagctcatacttgcctgtctgttactataaaaaataggtttgactgtatagggattaaacaatttgtcttttatttttcttctagcaatgtgcaggttctatctgtgagaaatatggcttagaggagtgtacgtgtgccagttctgatggcaaagatgataaagaattatgccatgtatgctgtatgaagaaaagtaaggcttttaaaaacacaagagtataaaatttgcctcaaactattattttctcctaaattttaagtgtaaaactttgacctacagtttggccagataatttccagctaaatctgtcctcttgaggagattataaatgtaacgtagcattgtgtctctattattatggtctctacaatgttttaaaaatgataaactagacaaaacgttgccagctttacagcagtaatttacataaacactgttagactttaagtcatcgtggacactgagtcaagacttgctggttgcttgtttacattgtaacatttaatatgaattactgatggcgttacccagcctaactagagaaggtctgtataacatgttatggtaatgatttcagttttttttccctctttgtatttgcacaactggaaatctgatctncaacttatatttgaatctgaccttcagcttatatttggcatttcttttccagtggacccatcaacttgtgccagtacagggtctgtgcagtggagtaggcacttcagtggtcgaaccatcaccctgcaacctggatccccttgcaacgattttagaggttactgtgatgttttcatgcggtgcagattagtagatgctgatggtcctctagctaggcttaaaaaagcaatttttagtccagagctctatgaaaacattgctgaatggattgtggctcattggtgggcagtattacttatgggaattgctctgatcatgctaatggctggatttattaagatatgcagtgttcatactccaagtagtaatccaaagttgcctcctcctaaaccacttccaggcactttaaagaggaggagacctccacagcccattcagcaaccccagcgtcagcggccccgagagagttatcaaatgggacacatgagacgctaactgcagcttttgccttggttcttcctagtgcctacaatgggaaaacttcactccaaagagaaacctattaagtcatcatctccaaactaaaccctcacaagtaacagttgaagaaaaaatggcaagagatcatatcctcagaccaggtggaattacttaaattttaaagcctgaaaattccaatttgggggtgggaggtggaaaaggaacccaattttcttatgaacagatatttttaacttaatggcacaaagtcttagaatattattatgtgccccgtgttccctgttcttcgttgctgcattttcttcacttgcaggcaaacttggctctcaataaacttttaccacaaattgaaataaatatatttttttcaactgccaatcaaggctaggaggctcgaccacctcaacattggagacatcacttgccaatgtacataccttgttatatgcagacatgtatttcttacgtacactgtacttctgtgtgcaattgtaaacagaaattgcaatatggatgtttctttgtattataaaatttttccgctcttaattaaaaattactgtttaattgacatactcaggataacagagaatggtggtattcagtggtccaggattctgtaatgctttacacaggcagttttgaaatgaaaatcaatttacctttctgttacgatggagttggttttgatactcattttttctttatcacatggctgctacgggcacaagtgactatactgaagaacacagttaagtgttgtgcaaactggacatagcagcacatactacttcagagttcatgatgtagatgtctggtttctgcttacgtcttttaaactttctaattcaattccatttttcaattaataggtgaaattttattcatgctttgatagaaattatgtcaatgaaatgattctttttatttgtagcctacttatttgtgtttttcatatatctgaaatatgctaattatgttttctgtctgatatggaaaagaaaagctgtgtctttatcaaaatatttaaacggttttttcagcatatcatcactgatcattggtaaccactaaagatgagtaatttgcttaagtagtagttaaaattgtagataggccttctgacattttttttcctaaaatttttaacagcattgaaggtgaaacagcacaatgtcccattccaaatttatttttgaaacagatgtaaataattggcattttaaagagaaagcaaaaacatttaatgtattaacaggcttattgctatgcaggaaatagaaggggcattacaaaaattgaagcttgtgacatatttattgcttctgttttccaactacatcacttcaactagaagtaaagctatgattttcctgacttcacataggaggcaaatttagagaaagttgtaaagatttctatgttttgggtttttttttttcctttttttttttaagagtataaggtttacacaatcattctcataatgtgacgcaagccagcaaggccaaaaatgctagagaaaataacgggatctcttccttgtaaacttgtacagtatgtggtgactttttcaaaatacagctttttgtacatgatttagagacaaattttgtacatgaaaccccagatagactataaataattctaaacaaacaagtaggtagatatgtatgtaattgcttttaaatcatttaaatgcctttgtttttggactgtgcaaaggttggaagtgggtttgcatttctaaaatggtgacttttattctgcaagagttcttagtaacttcttgagtgtggtagactttggaacatgtaaattttttgcttgtaatgttatcctgtggtaggattttggcaggtacacacactgccctattttattttgagtctaagttaaatgttttctgaaaagagatacatgcactgaactctttccactgcgaatcaagatgtggtaatataaaaggatcaagacaaatgagatctaatactactgtcagttttaatgtccactgtgttttatacagtatctttttttgttcactttggaaatttttactaaaaattgcaaaaaataaagtattgtgcaaagatgtaaggttttttgaaacttgaaatgcattaataaatagacgattaaatcaacttgaaggttctatactctttgaactctgagaactatcacaagaagcttcccacaaggcagtgttttcttacagttgtctcttcctacaaaagtatagattatctttattcttaatactttggaatccatgtagaaaatttccagttagatactctgcgtacacacaataaacctttttaaaacacccaactaatctcaactgcattacattgtttctaatcaatattcagtgcttgtcttggtggaagaggtgagtcattttgaaaacttatggtcttgtttttatgtgtttttcaaagttttgaatgctaagtacctcatttattttaaaaagcctagtttaatgataagtttgtttaaaattttgagccatcatttttctcttcatagcaaataaggagagaattgacatttcagtgttacctagaaaaggaattgtaagcccagaataattccctgcatgaggtaatctgcttcaaattctttttttagtcaaggttagctataagtaatacttgttaaatgagtaaatatgtaatactttgtgaattactttgttaatttaggagcatcaaatgtatattatgtttagttatttatgaaactctcaatattgattgatttgggtaattataaattagttatttttacttgtaattgaatgcttaaattctgtttacagtccgtcctctctccctccatccctccctccccagttttataaattcaggtaccaattcacaaacaaaatcagaaataaaataaatttattgactgcttctggattta

SEQ ID NO: 302446 - DNA, 3203 bp, Homo sapiens
ttttttttttttcagtggaaaaatctgtttatttctaggctcattggtgggcagtattacttatgggaattgctctgatcatgctaatggctggatttattaagatatgcagtgttcatactccaagtagtaatccaaagttgcctcctcctaaaccacttccaggcactttaaagaggaggagacctccacagcccattcagcaaccccagcgtcagcggccccgagagagttatcaaatgggacacatgagacgctaactgcagcttttgccttggttcttcctagtgcctacaatgggaaaacttcactccaaagagaaacctattaagtcatcatctccaaactaaaccctcacaagtaacagttgaagaaaaaatggcaagagatcatatcctcagaccaggtggaattacttaaattttaaagcctgaaaattccaatttgggggtgggaggtggaaaaggaacccaattttcttatgaacagatatttttaacttaatggcacaaagtcttagaatattattatgtgccccgtgttccctgttcttcgttgctgcattttcttcacttgcaggcaaacttggctctcaataaacttttaccacaaattgaaataaatatatttttttcaactgccaatcaaggctaggaggctcgaccacctcaacattggagacatcacttgccaatgtacataccttgttatatgcagacatgtatttcttacgtacactgtacttctgtgtgcaattgtaaacagaaattgcaatatggatgtttctttgtattataaaatttttccgctcttaattaaaaattactgtttaattgacatactcaggataacagagaatggtggtattcagtggtccaggattctgtaatgctttacacaggcagttttgaaatgaaaatcaatttacctttctgttacgatggagttggttttgatactcattttttctttatcacatggctgctacgggcacaagtgactatactgaagaacacagttaagtgttgtgcaaactggacatagcagcacatactacttcagagttcatgatgtagatgtctggtttctgcttacgtcttttaaactttctaattcaattccatttttcaattaataggtgaaattttattcatgctttgatagaaattatgtcaatgaaatgattctttttatttgtagcctacttatttgtgtttttcatatatctgaaatatgctaattatgttttctgtctgatatggaaaagaaaagctgtgtctttatcaaaatatttaaacggttttttcagcatatcatcactgatcattggtaaccactaaagatgagtaatttgcttaagtagtagttaaaattgtagataggccttctgacattttttttcctaaaatttttaacagcattgaaggtgaaacagcacaatgtcccattccaaatttatttttgaaacagatgtaaataattggcattttaaagagaaagcaaaaacatttaatgtattaacaggcttattgctatgcaggaaatagaaggggcattacaaaaattgaagcttgtgacatatttattgcttctgttttccaactacatcacttcaactagaagtaaagctatgattttcctgacttcacataggaggcaaatttagagaaagttgtaaagatttctatgttttgggtttttttttttcctttttttttttaagagtataaggtttacacaatcattctcataatgtgacgcaagccagcaaggccaaaaatgctagagaaaataacgggatctcttccttgtaaacttgtacagtatgtggtgactttttcaaaatacagctttttgtacatgatttagagacaaattttgtacatgaaaccccagatagactataaataattctaaacaaacaagtaggtagatatgtatgtaattgcttttaaatcatttaaatgcctttgtttttggactgtgcaaaggttggaagtgggtttgcatttctaaaatggtgacttttattctgcaagagttcttagtaacttcttgagtgtggtagactttggaacatgtaaattttttgcttgtaatgttatcctgtggtaggattttggcaggtacacacactgccctattttattttgagtctaagttaaatgttttctgaaaagagatacatgcactgaactctttccactgcgaatcaagatgtggtaatataaaaggatcaagacaaatgagatctaatactactgtcagttttaatgtccactgtgttttatacagtatctttttttgttcactttggaaatttttactaaaaattgcaaaaaataaagtattgtgcaaagatgtaaggttttttgaaacttgaaatgcattaataaatagacgattaaatcaacttgaaggttctatactctttgaactctgagaactatcacaagaagcttcccacaaggcagtgttttcttacagttgtctcttcctacaaaagtatagattatctttattcttaatactttggaatccatgtagaaaatttccagttagatactctgcgtacacacaataaacctttttaaaacacccaactaatctcaactgcattacattgtttctaatcaatattcagtgcttgtcttggtggaagaggtgagtcattttgaaaacttatggtcttgtttttatgtgtttttcaaagttttgaatgctaagtacctcatttattttaaaaagcctagtttaatgataagtttgtttaaaattttgagccatcatttttctcttcatagcaaataaggagagaattgacatttcagtgttacctagaaaaggaattgtaagcccagaataattccctgcatgaggtaatctgcttcaaattctttttttagtcaaggttagctataagtaatacttgttaaatgagtaaatatgtaatactttgtgaattactttgttaatttaggagcatcaaatgtatattatgtttagttatttatgaaactctcaatattgattgatttgggtaattataaattagttatttttacttgtaattgaatgcttaaattctgtttacagtccgtcctctctccctccatccctccctccccagttttataaattcaggtaccaattcacaaacaaaatcagaaataaaataaatttattgactgcttctggattta

SEQ ID NO: 302447 - DNA, 5532 bp, Homo sapiens
gaattcgaggatccgggtaccatgggcggcggcaggcctagcagcacgggaaccgtcccccgcgcgcatgcgcgcgcccctgaagcgcctgggggacgggtatgggcgggaggtaggggcgcggctccgcgtgccagttgggtgcccgcgcgtcacgtggtgaggaaggaggcggaggtctgagtttcgagggagggggggagagaagagggaacgagcaagggaaggaaagcggggaaaggaggaaggaaacgaacgagggggagggaggtccctgttttggaggagctaggagcgttgccggcccctgaagtggagcgagagggaggtgcttcgccgtttctcctgccaggggaggtcccggcttcccgtggaggctccggaccaagccccttcagcttctccctccggatcgatgtgctgctgttaacccgtgaggaggcggcggcggcggcagcggcagcggaagatggtgttgctgagagtgttaattctgctcctctcctgggcggcggggatgggaggtcagtatgggaatcctttaaataaatatatcagacattatgaaggattatcttacaatgtggattcattacaccaaaaacaccagcgtgccaaaagagcagtctcacatgaagaccaatttttacgtctagatttccatgcccatggaagacatttcaacctacgaatgaagagggacacttcccttttcagtgatgaatttaaagtagaaacatcaaataaagtacttgattatgatacctctcatatttacactggacatatttatggtgaagaaggaagttttagccatgggtctgttattgatggaagatttgaaggattcatccagactcgtggtggcacattttatgttgagccagcagagagatatattaaagaccgaactctgccatttcactctgtcatttatcatgaagatgatattaactatccccataaatacggtcctcaggggggctgtgcagatcattcagtatttgaaagaatgaggaaataccagatgactggtgtagaggaagtaacacagatacctcaagaagaacatgctgctaatggtccagaacttctgaggaaaaaacgtacaacttcagctgaaaaaaatacttgtcagctttatattcagactgatcatttgttctttaaatattacggaacacgagaagctgtgattgcccagatatccagtcatgttaaagcgattgatacaatttaccagaccacagacttctccggaatccgtaacatcagtttcatggtgaaacgcataagaatcaatacaactgctgatgagaaggaccctacaaatcctttccgtttcccaaatattggtgtggagaagtttctggaattgaattctgagcagaatcatgatgactactgtttggcctatgtcttcacagaccgagattttgatgatggcgtacttggtctggcttgggttggagcaccttcaggaagctctggaggaatatgtgaaaaaagtaaactctattcagatggtaagaagaagtccttaaacactggaattattactgttcagaactatgggtctcatgtacctcccaaagtctctcacattacttttgctcacgaagttggacataactttggatccccacatgattctggaacagagtgcacaccaggagaatctaagaatttgggtcaaaaagaaaatggcaattacatcatgtatgcaagagcaacatctggggacaaacttaacaacaataaattctcactctgtagtattagaaatataagccaagttcttgagaagaagagaaacaactgttttgttgaatctggccaacctatttgtggaaatggaatggtagaacaaggtgaagaatgtgattgtggctatagtgaccagtgtaaagatgaatgctgcttcgatgcaaatcaaccagagggaagaaaatgcaaactgaaacctgggaaacagtgcagtccaagtcaaggtccttgttgtacagcacagtgtgcattcaagtcaaagtctgagaagtgtcgggatgattcagactgtgcaagggaaggaatatgtaatggcttcacagctctctgcccagcatctgaccctaaaccaaacttcacagactgtaataggcatacacaagtgtgcattaatgggcaatgtgcaggttctatctgtgagaaatatggcttagaggagtgtacgtgtgccagttctgatggcaaagatgataaagaattatgccatgtatgctgtatgaagaaaatggacccatcaacttgtgccagtacagggtctgtgcagtggagtaggcacttcagtggtcgaaccatcaccctgcaacctggatccccttgcaacgattttagaggttactgtgatgttttcatgcggtgcagattagtagatgctgatggtcctctagctaggcttaaaaaagcaatttttagtccagagctctatgaaaacattgctgaatggattgtggcactttaaagaggaggagacctccacagcccattcagcaaccccagcgtcagcggccccgagagagttatcaaatgggacacatgagacgctaactgcagcttttgccttggttcttcctagtgcctacaatgggaaaacttcactccaaagagaaacctattaagtcatcatctccaaactaaaccctcacaagtaacagttgaagaaaaaatggcaagagatcatatcctcagaccaggtggaattacttaaattttaaagcctgaaaattccaatttgggggtgggaggtggaaaaggaacccaattttcttatgaacagatatttttaacttaatggcacaaagtcttagaatattattatgtgccccgtgttccctgttcttcgttgctgcattttcttcacttgcaggcaaacttggctctcaataaacttttaccacaaattgaaataaatatatttttttcaactgccaatcaaggctaggaggctcgaccacctcaacattggagacatcacttgccaatgtacataccttgttatatgcagacatgtatttcttacgtacactgtacttctgtgtgcaattgtaaacagaaattgcaatatggatgtttctttgtattataaaatttttccgctcttaattaaaaattactgtttaattgacatactcaggataacagagaatggtggtattcagtggtccaggattctgtaatgctttacacaggcagttttgaaatgaaaatcaatttacctttctgttacgatggagttggttttgatactcattttttctttatcacatggctgctacgggcacaagtgactatactgaagaacacagttaagtgttgtgcaaactggacatagcagcacatactacttcagagttcatgatgtagatgtctggtttctgcttacgtcttttaaactttctaattcaattccatttttcaattaataggtgaaattttattcatgctttgatagaaattatgtcaatgaaatgattctttttatttgtagcctacttatttgtgtttttcatatatctgaaatatgctaattatgttttctgtctgatatggaaaagaaaagctgtgtctttatcaaaatatttaaacggttttttcagcatatcatcactgatcattggtaaccactaaagatgagtaatttgcttaagtagtagttaaaattgtagataggccttctgacattttttttcctaaaatttttaacagcattgaaggtgaaacagcacaatgtcccattccaaatttatttttgaaacagatgtaaataattggcattttaaagagaaagcaaaaacatttaatgtattaacaggcttattgctatgcaggaaatagaaggggcattacaaaaattgaagcttgtgacatatttattgcttctgttttccaactacatcacttcaactagaagtaaagctatgattttcctgacttcacataggaggcaaatttagagaaagttgtaaagatttctatgttttgggtttttttttttcctttttttttttaagagtataaggtttacacaatcattctcataatgtgacgcaagccagcaaggccaaaaatgctagagaaaataacgggatctcttccttgtaaacttgtacagtatgtggtgactttttcaaaatacagctttttgtacatgatttagagacaaattttgtacatgaaaccccagatagactataaataattctaaacaaacaagtaggtagatatgtatgtaattgcttttaaatcatttaaatgcctttgtttttggactgtgcaaaggttggaagtgggtttgcatttctaaaatggtgacttttattctgcaagagttcttagtaacttcttgagtgtggtagactttggaacatgtaaattttttgcttgtaatgttatcctgtggtaggattttggcaggtacacacactgccctattttattttgagtctaagttaaatgttttctgaaaagagatacatgcactgaactctttccactgcgaatcaagatgtggtaatataaaaggatcaagacaaatgagatctaatactactgtcagttttaatgtccactgtgttttatacagtatctttttttgttcactttggaaatttttactaaaaattgcaaaaaataaagtattgtgcaaagatgtaaggttttttgaaacttgaaatgcattaataaatagacgattaaatcaacttgaaggttctatactctttgaactctgagaactatcacaagaagcttcccacaaggcagtgttttcttacagttgtctcttcctacaaaagtatagattatctttattcttaatactttggaatccatgtagaaaatttccagttagatactctgcgtacacacaataaacctttttaaaacacccaactaatctcaactgcattacattgtttctaatcaatattcagtgcttgtcttggtggaagaggtgagtcattttgaaaacttatggtcttgtttttatgtgtttttcaaagttttgaatgctaagtacctcatttattttaaaaagcctagtttaatgataagtttgtttaaaattttgagccatcatttttctcttcatagcaaataaggagagaattgacatttcagtgttacctagaaaaggaattgtaagcccagaataattccctgcatgaggtaatctgcttcaaattctttttttagtcaaggttagctataagtaatacttgttaaatgagtaaatatgtaatactttgtgaattactttgttaatttaggagcatcaaatgtatattatgtttagttatttatgaaactctcaatattgattgatttgggtaattataaattagttatttttacttgtaattgaatgcttaaattctgtttacagtccgtcctctctccctccatccctccctccccagttttataaattcaggtaccaattcacaaacaaaatcagaaataaaataaatttattgactgcttctggattta

SEQ ID NO: 302448 - DNA, 3538 bp, Homo sapiens
gaattcgaggatccgggtaccatgggcggcggcaggcctagcagcacgggaaccgtcccccgcgcgcatgcgcgcgcccctgaagcgcctgggggacgggtatgggcgggaggtaggggcgcggctccgcgtgccagttgggtgcccgcgcgtcacgtggtgaggaaggaggcggaggtctgagtttcgagggagggggggagagaagagggaacgagcaagggaaggaaagcggggaaaggaggaaggaaacgaacgagggggagggaggtccctgttttggaggagctaggagcgttgccggcccctgaagtggagcgagagggaggtgcttcgccgtttctcctgccaggggaggtcccggcttcccgtggaggctccggaccaagccccttcagcttctccctccggatcgatgtgctgctgttaacccgtgaggaggcggcggcggcggcagcggcagcggaagatggtgttgctgagagtgttaattctgctcctctcctgggcggcggggatgggagaccgagattttgatgatggcgtacttggtctggcttgggttggagcaccttcaggaagctctggaggaatatgtgaaaaaagtaaactctattcagatgtgcctacaatgggaaaacttcactccaaagagaaacctattaagtcatcatctccaaactaaaccctcacaagtaacagttgaagaaaaaatggcaagagatcatatcctcagaccaggtggaattacttaaattttaaagcctgaaaattccaatttgggggtgggaggtggaaaaggaacccaattttcttatgaacagatatttttaacttaatggcacaaagtcttagaatattattatgtgccccgtgttccctgttcttcgttgctgcattttcttcacttgcaggcaaacttggctctcaataaacttttaccacaaattgaaataaatatatttttttcaactgccaatcaaggctaggaggctcgaccacctcaacattggagacatcacttgccaatgtacataccttgttatatgcagacatgtatttcttacgtacactgtacttctgtgtgcaattgtaaacagaaattgcaatatggatgtttctttgtattataaaatttttccgctcttaattaaaaattactgtttaattgacatactcaggataacagagaatggtggtattcagtggtccaggattctgtaatgctttacacaggcagttttgaaatgaaaatcaatttacctttctgttacgatggagttggttttgatactcattttttctttatcacatggctgctacgggcacaagtgactatactgaagaacacagttaagtgttgtgcaaactggacatagcagcacatactacttcagagttcatgatgtagatgtctggtttctgcttacgtcttttaaactttctaattcaattccatttttcaattaataggtgaaattttattcatgctttgatagaaattatgtcaatgaaatgattctttttatttgtagcctacttatttgtgtttttcatatatctgaaatatgctaattatgttttctgtctgatatggaaaagaaaagctgtgtctttatcaaaatatttaaacggttttttcagcatatcatcactgatcattggtaaccactaaagatgagtaatttgcttaagtagtagttaaaattgtagataggccttctgacattttttttcctaaaatttttaacagcattgaaggtgaaacagcacaatgtcccattccaaatttatttttgaaacagatgtaaataattggcattttaaagagaaagcaaaaacatttaatgtattaacaggcttattgctatgcaggaaatagaaggggcattacaaaaattgaagcttgtgacatatttattgcttctgttttccaactacatcacttcaactagaagtaaagctatgattttcctgacttcacataggaggcaaatttagagaaagttgtaaagatttctatgttttgggtttttttttttcctttttttttttaagagtataaggtttacacaatcattctcataatgtgacgcaagccagcaaggccaaaaatgctagagaaaataacgggatctcttccttgtaaacttgtacagtatgtggtgactttttcaaaatacagctttttgtacatgatttagagacaaattttgtacatgaaaccccagatagactataaataattctaaacaaacaagtaggtagatatgtatgtaattgcttttaaatcatttaaatgcctttgtttttggactgtgcaaaggttggaagtgggtttgcatttctaaaatggtgacttttattctgcaagagttcttagtaacttcttgagtgtggtagactttggaacatgtaaattttttgcttgtaatgttatcctgtggtaggattttggcaggtacacacactgccctattttattttgagtctaagttaaatgttttctgaaaagagatacatgcactgaactctttccactgcgaatcaagatgtggtaatataaaaggatcaagacaaatgagatctaatactactgtcagttttaatgtccactgtgttttatacagtatctttttttgttcactttggaaatttttactaaaaattgcaaaaaataaagtattgtgcaaagatgtaaggttttttgaaacttgaaatgcattaataaatagacgattaaatcaacttgaaggttctatactctttgaactctgagaactatcacaagaagcttcccacaaggcagtgttttcttacagttgtctcttcctacaaaagtatagattatctttattcttaatactttggaatccatgtagaaaatttccagttagatactctgcgtacacacaataaacctttttaaaacacccaactaatctcaactgcattacattgtttctaatcaatattcagtgcttgtcttggtggaagaggtgagtcattttgaaaacttatggtcttgtttttatgtgtttttcaaagttttgaatgctaagtacctcatttattttaaaaagcctagtttaatgataagtttgtttaaaattttgagccatcatttttctcttcatagcaaataaggagagaattgacatttcagtgttacctagaaaaggaattgtaagcccagaataattccctgcatgaggtaatctgcttcaaattctttttttagtcaaggttagctataagtaatacttgttaaatgagtaaatatgtaatactttgtgaattactttgttaatttaggagcatcaaatgtatattatgtttagttatttatgaaactctcaatattgattgatttgggtaattataaattagttatttttacttgtaattgaatgcttaaattctgtttacagtccgtcctctctccctccatccctccctccccagttttataaattcaggtaccaattcacaaacaaaatcagaaataaaataaatttattgactgcttctggattta

SEQ ID NO: 302449 - DNA, 1567 bp, Homo sapiens
tcacggcactccagactgggcgaaagagtaagactctgtctcaaaaataaataaaggaaattacaaaaattagccgggcatggtagcacatgcctgtaatcccagatgcctgtttcgctgcagcggaaccagcaaggccaaaaatgctagagaaaataacgggatctcttccttgtaaacttgtacagtatgtggtgactttttcaaaatacagctttttgtacatgatttagagacaaattttgtacatgaaaccccagatagactataaataattctaaacaaacaagtaggtagatatgtatgtaattgcttttaaatcatttaaatgcctttgtttttggactgtgcaaaggttggaagtgggtttgcatttctaaaatggtgacttttattctgcaagagttcttagtaacttcttgagtgtggtagactttggaacatgtaaattttttgcttgtaatgttatcctgtggtaggattttggcaggtacacacactgccctattttattttgagtctaagttaaatgttttctgaaaagagatacatgcactgaactctttccactgcgaatcaagatgtggtaatataaaaggatcaagacaaatgagatctaatactactgtcagttttaatgtccactgtgttttatacagtatctttttttgttcactttggaaatttttactaaaaattgcaaaaaataaagtattgtgcaaagatgtaaggttttttgaaacttgaaatgcattaataaatagacgattaaatcaacttgaaggttctatactctttgaactctgagaactatcacaagaagcttcccacaaggcagtgttttcttacagttgtctcttcctacaaaagtatagattatctttattcttaatactttggaatccatgtagaaaatttccagttagatactctgcgtacacacaataaacctttttaaaacacccaactaatctcaactgcattacattgtttctaatcaatattcagtgcttgtcttggtggaagaggtgagtcattttgaaaacttatggtcttgtttttatgtgtttttcaaagttttgaatgctaagtacctcatttattttaaaaagcctagtttaatgataagtttgtttaaaattttgagccatcatttttctcttcatagcaaataaggagagaattgacatttcagtgttacctagaaaaggaattgtaagcccagaataattccctgcatgaggtaatctgcttcaaattctttttttagtcaaggttagctataagtaatacttgttaaatgagtaaatatgtaatactttgtgaattactttgttaatttaggagcatcaaatgtatattatgtttagttatttatgaaactctcaatattgattgatttgggtaattataaattagttatttttacttgtaattgaatgcttaaattctgtttacagtccgtcctctctccctccatccctccctccccagttttataaattcaggtaccaattcacaaacaaaatcagaaataaaataaatttattgactgcttctggattta

SEQ ID NO: 302450 - DNA, 1222 bp, Homo sapiens
gaattcgaggatccgggtaccatgggcggcggcaggcctagcagcacgggaaccgtcccccgcgcgcatgcgcgcgcccctgaagcgcctgggggacgggtatgggcgggaggtaggggcgcggctccgcgtgccagttgggtgcccgcgcgtcacgtggtgaggaaggaggcggaggtctgagtttcgagggagggggggagagaagagggaacgagcaagggaaggaaagcggggaaaggaggaaggaaacgaacgagggggagggaggtccctgttttggaggagctaggagcgttgccggcccctgaagtggagcgagagggaggtgcttcgccgtttctcctgccaggggaggtcccggcttcccgtggaggctccggaccaagccccttcagcttctccctccggatcgatgtgctgctgttaacccgtgaggaggcggcggcggcggcagcggcagcggaagatggtgttgctgagagtgttaattctgctcctctcctgggcggcggggatgggaggtcagtatgggaatcctttaaataaatatatcagacattatgaaggattatcttacaatgtggattcattacaccaaaaacaccagcgtgccaaaagagcagtctcacatgaagaccaatttttacgtctagatttccatgcccatggaagacatttcaacctacgaatgaagagggacacttcccttttcagtgatgaatttaaagtagaaacatcaaataaagtacttgattatgatacctctcatatttacactggacatatttatggtgaagaaggaagttttagccatgggtctgttattgatggaagatttgaaggattcatccagactcgtggtggcacattttatgttgagccagcagagagatatattaaagaccgaactctgccatttcactctgtcatttatcatgaagatgatattaactatccccataaatacggtcctcaggggggctgtgcagatcattcagtatttgaaagaatgaggaaataccagatgactggtgtagaggaagtaacacagacactcttgcttgctcctgcttccagcatgtcatgtgcctgctcccccttcaccttctgcccatgcttataagcttcctgagacctctctagaagccaagcggatgccagcaccatgcttcctgtaaagcctgcagaacgatgagccaattaaaactcttttcttgat

SEQ ID NO: 302451 - DNA, 1954 bp, Homo sapiens
gaattcgaggatccgggtaccatgggcggcggcaggcctagcagcacgggaaccgtcccccgcgcgcatgcgcgcgcccctgaagcgcctgggggacgggtatgggcgggaggtaggggcgcggctccgcgtgccagttgggtgcccgcgcgtcacgtggtgaggaaggaggcggaggtctgagtttcgagggagggggggagagaagagggaacgagcaagggaaggaaagcggggaaaggaggaaggaaacgaacgagggggagggaggtccctgttttggaggagctaggagcgttgccggcccctgaagtggagcgagagggaggtgcttcgccgtttctcctgccaggggaggtcccggcttcccgtggaggctccggaccaagccccttcagcttctccctccggatcgatgtgctgctgttaacccgtgaggaggcggcggcggcggcagcggcagcggaagatggtgttgctgagagtgttaattctgctcctctcctgggcggcggggatgggaggtcagtatgggaatcctttaaataaatatatcagacattatgaaggattatcttacaatgtggattcattacaccaaaaacaccagcgtgccaaaagagcagtctcacatgaagaccaatttttacgtctagatttccatgcccatggaagacatttcaacctacgaatgaagagggacacttcccttttcagtgatgaatttaaagtagaaacatcaaataaagtacttgattatgatacctctcatatttacactggacatatttatggtgaagaaggaagttttagccatgggtctgttattgatggaagatttgaaggattcatccagactcgtggtggcacattttatgttgagccagcagagagatatattaaagaccgaactctgccatttcactctgtcatttatcatgaagatgatattaactatccccataaatacggtcctcaggggggctgtgcagatcattcagtatttgaaagaatgaggaaataccagatgactggtgtagaggaagtaacacagatacctcaagaagaacatgctgctaatggtccagaacttctgaggaaaaaacgtacaacttcagctgaaaaaaatacttgtcagctttatattcagactgatcatttgttctttaaatattacggaacacgagaagctgtgattgcccagatatccagtcatgttaaagcgattgatacaatttaccagaccacagacttctccggaatccgtaacatcagtttcatggtgaaacgcataagaatcaatacaactgctgatgagaaggaccctacaaatcctttccgtttcccaaatattggtgtggagaagtttctggaattgaattctgagcagaatcatgatgactactgtttggcctatgtcttcacagaccgagattttgatgatggcgtacttggtctggcttgggttggagcaccttcaggtagtttatcatattaaatatgtcttaacttactacttgaaacaaaggggagttttcagagaatgttgaattttcaaagtataggagaaagtgatgcctgtataatatcctaatttatgctacttgagttaggcaagactcataagcataatgtaaaagccacaatagatgaaggagctttttattttgaaacgcatacagggaaatatcctgattcctgacatttgaatggaccaaatgaaataaataattttatgagaaaaagtggtaattctgaaacccaaagggaaatttaatttttccacaaaagttaataaatgttatatatttattaacttttttcccctccaaaatagggtacttagaatcaaaagaggaaaactgtgtcttgctctctcttctgtagtgagataaagaggagagaaatcctcatcaagagtggcaggtaaaaggaaaagaaagcctgcctttat

SEQ ID NO: 302452 - DNA, 1614 bp, Homo sapiens
gaattcgaggatccgggtaccatgggcggcggcaggcctagcagcacgggaaccgtcccccgcgcgcatgcgcgcgcccctgaagcgcctgggggacgggtatgggcgggaggtaggggcgcggctccgcgtgccagttgggtgcccgcgcgtcacgtggtgaggaaggaggcggaggtctgagtttcgagggagggggggagagaagagggaacgagcaagggaaggaaagcggggaaaggaggaaggaaacgaacgagggggagggaggtccctgttttggaggagctaggagcgttgccggcccctgaagtggagcgagagggaggtgcttcgccgtttctcctgccaggggaggtcccggcttcccgtggaggctccggaccaagccccttcagcttctccctccggatcgatgtgctgctgttaacccgtgaggaggcggcggcggcggcagcggcagcggaagatggtgttgctgagagtgttaattctgctcctctcctgggcggcggggatgggagcccctgcccggtggcggattccgaagtcctctccgccgccgagacccgccgcgcagactcgtgggaagttgtgttgtttgcagctgggctcgtgtattgttctttacccggcgcgccggtcctgaccgaccccattctgcagaggggccgcccgtggagtggcagcagtcatcacccgcttatctgagactagtggcctcggttcttcctgtgtcctgtgtttggagagagatcacaggagggtgtgttggtgttcttgaaaacattctgtcgcccaggggaaagggtttggtcgggagaagggtaaaccatttggggatgttctttgatttgtaggctggattgggtctcttagagtagaagttcggtccctgggtgacccaacttgaagagtttcgttaaactttcaggtggagtagatgtacagtgtagttagtggattgtcaaaacagtgccccctcccccctgcacatgaaagtcaaatttgctaaaagcatgtcatttcttgtttcgggttttgaagacaacgatttttatttccggtgtgttctaggaccagctgcatcattttattcttgcttaaagtgctttattttaggtaagctttttgacttgccccagagtaaacttaaaaacctcaaggtgtgcctaaaagcaacgattgaaaaaatttgaggaatgctttggatgagtgtctgtagcctttgataatttagaaaatatctatttcatgtaatgtattgtttctgtttttttctttgccactttgacttatgactgcaggaccaagtgtatttctgtcctgtattctaccgagtccgagggtggtactgcgtaggcagacttctgttatagtttgtagtgttcatttttttgttacacgttttatttaatttttttcaatccaattcatcaagcaagacacacattatagattaagagctgataatagatgtttagttttaaaaaggattatgtgcgggagactctctgttagaggagcctttttcatctgacatttgttatttctgttctaaacgtggctttcaacaaatcgttttcctatcttttttcactttttgtgattaaa

SEQ ID NO: 302453 - DNA, 2493 bp, Homo sapiens
tgtaagtacccctgataagcaaattagtaattgtcaatacccctgttaagcaattcctttttgcagtatatttctgaaatgacagaatgctgttttaaaaacaaagaaataaaatcctgctcctgactcggtcaaaatatttttaaagtctattgtttgttgtgcttgctggtactaagaggctatttaaaagtataaaactgctttgtatccatgagggtttcattgtgtgttagcagcagtgagcttctattaaatgtatatgtcatttattttgtttaagtggctttcagcaaacctcagtcatattcttatgcagggtattgcgaaacaacttgtgttctattaatcgtgtcttcaattaaaagaccacagacttctggaaaaaaaaaaaaaaaaaggggctgcaggagcaagtgaccaggagcaggactggggacaggcctgatcgcccctgcacgaaccagacccttcgccgccctcacgatgactacctctccgatcctgcagctgctgctgcggctctcactgtgcgggctgctgctccagagggcggagacaggctctaaggggcagacggcgggggagctgtaccagcgctgggaacggtaccgcagggagtgccaggagaccttggcagccgcggaaccgccttcaggcctcgcctgtaacgggtccttcgatatgtacgtctgctgggactatgctgcacccaatgccactgcccgtgcgtcctgcccctggtacctgccctggcaccaccatgtggctgcaggtttcgtcctccgccagtgtggcagtgatggccaatggggactttggagagaccatacacaatgtgagaacccagagaagaatgaggcctttctggaccaaaggctcatcttggagcggttgcaggtcatgtacactgtcggctactccctgtctctcgccacactgctgctagccctgctcatcttgagtttgttcaggcggctacattgcactagaaactatatccacatcaacctgttcacgtctttcatgctgcgagctgcggccattctcagccgagaccgtctgctacctcgacctggcccctaccttggggaccaggcccttgcgctgtggaaccaggccctcgctgcctgccgcacggcccagatcgtgacccagtactgcgtgggtgccaactacacgtggctgctggtggagggcgtctacctgcacagtctcctggtgctcgtgggaggctccgaggagggccacttccgctactacctgctcctcggctggggggcccccgcgcttttcgtcattccctgggtgatcgtcaggtacctgtacgagaacacgcagtgctgggagcgcaacgaagtcaaggccatttggtggattatacggacccccatcctcatgaccatcttgattaatttcctcatttttatccgcattcttggcattctcctgtccaagctgaggacacggcaaatgcgctgccgggattaccggctgaggctggctcgctccacgctgacgctggtgcccctgctgggtgtccacgaggtggtgtttgctcccgtgacagaggaacaggcccggggcgccctgcgcttcgccaagctcggctttgagatcttcctcagctccttccagggcttcctggtcagcgtcctctactgcttcatcaacaaggaggtaggcagagacccggccgccgcccccgccctctggcgcaggcggggtacggcgccgcctctgagcgccatcgtctcacaggtgcagtcggagatccgccgtggctggcaccactgccgcctgcgccgcagcctgggcgaggagcaacgccagctcccggagcgcgccttccgggccctgccctccggctccggcccgggcgaggtccccaccagccgcggcttgtcctcggggaccctcccagggcctgggaatgaggccagccgggagttggaaagttactgctagggggcgggatccccgtgtctgttcagttagcatggatttattgagtgccaactgcgtgccaggcccagtacggaggacgctggggaaatggtgaaggaaacagaaaaaaggtccctgcccttctggagatgacaactgagtggggaaaacagaccgtgaacacaaaacatcaagttccacacacgctatggaatggttatgaagggaagcgagaagggggcctagggtggtctgggaggcgtctccaaggaggtgacacttaagccatccccgaaagaggtgaaagagatcactttggggagagctggagaacaggattctaggcggaagcgatagcataggcaaaggcccttgggcaggaaggcgctcagccttggctggagtagaattaagtcagagccaacaggttggggagagacagagaagtgggcaggggcacccaagttgggatttcatttcaggtgcattggagattcttaggagtgtctcttgggggtaatattttattttttaaaaaatgaggat

SEQ ID NO: 302454 - DNA, 2412 bp, Homo sapiens
tgtaagtacccctgataagcaaattagtaattgtcaatacccctgttaagcaattcctttttgcagtatatttctgaaatgacagaatgctgttttaaaaacaaagaaataaaatcctgctcctgactcggtcaaaatatttttaaagtctattgtttgttgtgcttgctggtactaagaggctatttaaaagtataaaactgctttgtatccatgagggtttcattgtgtgttagcagcagtgagcttctattaaatgtatatgtcatttattttgtttaagtggctttcagcaaacctcagtcatattcttatgcagggtattgcgaaacaacttgtgttctattaatcgtgtcttcaattaaaagaccacagacttctggaaaaaaaaaaaaaaaaaggggctgcaggagcaagtgaccaggagcaggactggggacaggcctgatcgcccctgcacgaaccagacccttcgccgccctcacgatgactacctctccgatcctgcagctgctgctgcggctctcactgtgcgggctgctgctccagagggcggagacaggctctaaggggcagacggcgggggagctgtaccagcgctgggaacggtaccgcagggagtgccaggagaccttggcagccgcggaaccgccttcaggcctcgcctgtaacgggtccttcgatatgtacgtctgctgggactatgctgcacccaatgccactgcccgtgcgtcctgcccctggtacctgccctggcaccaccatgtggctgcaggtttcgtcctccgccagtgtggcagtgatggccaatggggactttggagagaccatacacaatgtgagaacccagagaagaatgaggcctttctggaccaaaggctcatcttggagcggttgcaggtcatgtacactgtcggctactccctgtctctcgccacactgctgctagccctgctcatcttgagtttgttcaggcggctacattgcactagaaactatatccacatcaacctgttcacgtctttcatgctgcgagctgcggccattctcagccgagaccgtctgctacctcgacctggcccctaccttggggaccaggcccttgcgctgtggaaccaggccctcgctgcctgccgcacggcccagatcgtgacccagtactgcgtgggtgccaactacacgtggctgctggtggagggcgtctacctgcacagtctcctggtgctcgtgggaggctccgaggagggccacttccgctactacctgctcctcggctggggggcccccgcgcttttcgtcattccctgggtgatcgtcaggtacctgtacgagaacacgcagtgctgggagcgcaacgaagtcaaggccatttggtggattatacggacccccatcctcatgaccatcttgattaatttcctcatttttatccgcattcttggcattctcctgtccaagctgaggacacggcaaatgcgctgccgggattaccggctgaggctggctcgctccacgctgacgctggtgcccctgctgggtgtccacgaggtggtgtttgctcccgtgacagaggaacaggcccggggcgccctgcgcttcgccaagctcggctttgagatcttcctcagctccttccagggcttcctggtcagcgtcctctactgcttcatcaacaaggaggtgcagtcggagatccgccgtggctggcaccactgccgcctgcgccgcagcctgggcgaggagcaacgccagctcccggagcgcgccttccgggccctgccctccggctccggcccgggcgaggtccccaccagccgcggcttgtcctcggggaccctcccagggcctgggaatgaggccagccgggagttggaaagttactgctagggggcgggatccccgtgtctgttcagttagcatggatttattgagtgccaactgcgtgccaggcccagtacggaggacgctggggaaatggtgaaggaaacagaaaaaaggtccctgcccttctggagatgacaactgagtggggaaaacagaccgtgaacacaaaacatcaagttccacacacgctatggaatggttatgaagggaagcgagaagggggcctagggtggtctgggaggcgtctccaaggaggtgacacttaagccatccccgaaagaggtgaaagagatcactttggggagagctggagaacaggattctaggcggaagcgatagcataggcaaaggcccttgggcaggaaggcgctcagccttggctggagtagaattaagtcagagccaacaggttggggagagacagagaagtgggcaggggcacccaagttgggatttcatttcaggtgcattggagattcttaggagtgtctcttgggggtaatattttattttttaaaaaatgaggat

SEQ ID NO: 302455 - DNA, 700 bp, Homo sapiens
gagtgtcatggaaaaagaccatgcggcaaaaagtggcagaggtaagatggagccagggtttgctgtcatccacagtgaatgccgtcctccacggcatggtctctgtctcacagagagggattgtctggggagactgctaacacttcagtccctttttatgagcattgattttatacattttgatatgaactttcattaagtttgcatgtttttccataggtgcacatattcagtttctgaatttttctaccgaagctaatcatgacttccttgaaattcaaaatggaccttaccacaccagccccatgattggacaatttagcggcacggatctccccgcggccctgctgagcacaacgcatgaaaccctcatccacttttatagtgaccattcgcaaaaccggcaaggatttaaacttgcttaccaaggtatggaacaacaacgagaaccgaaacccaaatctaaatacacttcttacatgtaaaatgtatttaagtataaatctccctaactggttccaagcttgtacgagtggaataattttttggtggaatgttggtttctggttagtagtggaacacttgttgtttttgaaaacagaggtaaggacacagacggaaccaccagtgggttcgccttttctgctgcccagacagagccgatttatcaagacgggaattgcaatggagaaagagtaat

SEQ ID NO: 302456 - DNA, 1048 bp, Homo sapiens
attaggcgttagagacctactcgatgtttcagggatagatagattaggcgtttagttcgacacacttcatgtttaaaaagcctcttctaggccgggtgcggtggctcatgcctgtaaagccagcactttgggaggctgaggcgggcggatcacgaggcaccacagtaccggcactgctgaacagtacttccaaccaactctacctgcatttccagtctgacattagtgtggcagctgctggtttccacctggaatacaaaactgtaggtcttgctgcatgccaagaaccagccctccccagcaacagcatcaaaatcggagatcggtacatggtgaacgacgtgctctccttccagtgcgagcccgggtacaccctgcagggccgttcccacatttcctgtatgccagggaccgttcgccgttggaactatccgtctcccctgtgcattgcaacctgtggagggacgctgagcaccttgggtggtgtgatcctgagccccggcttcccaggttcttaccccaacaacttagactgcacctggaggatctcattacccatcggctatggtgcacatattcagtttctgaatttttctaccgaagctaatcatgacttccttgaaattcaaaatggaccttaccacaccagccccatgattggacaatttagcggcacggatctccccgcggccctgctgagcacaacgcatgaaaccctcatccacttttatagtgaccattcgcaaaaccggcaaggatttaaacttgcttaccaaggtatggaacaacaacgagaaccgaaacccaaatctaaatacacttcttacatgtaaaatgtatttaagtataaatctccctaactggttccaagcttgtacgagtggaataattttttggtggaatgttggtttctggttagtagtggaacacttgttgtttttgaaaacagaggtaaggacacagacggaaccaccagtgggttcgccttttctgctgcccagacagagccgatttatcaagacgggaattgcaatggagaaagagtaat

SEQ ID NO: 302457 - DNA, 11543 bp, Homo sapiens
ccttcctgcccggctcggccggcgctcgtccccggccccggccccgccagcccgggtctccgcgctcggagcagctcagccctgcagtggctcgggacccgatgctatgagagggaagcgagccgggcgcccagaccttcaggaggcgtcggatgcgcggcgggtcttgggaccgggctctctctccggctcgccttgccctcgggtgattatttggctccgctcatagccctgccttcctcggaggagccatcggtgtcgcgtgcgtgtggagtatctgcagacatgactgcgtggaggagattccagtcgctgctcctgcttctcgggctgctggtgctgtgcgcgaggctcctcactgcagcgaagggtcagaactgtggaggcttagtccagggtcccaatggcactattgagagcccagggtttcctcacgggtatccgaactatgccaactgcacctggatcatcatcacgggcgagcgcaataggatacagttgtccttccatacctttgctcttgaagaaaattttgatattttatcagtttacgatggacagcctcaacaagggaatttaaaagtgagattatcgggatttcagctgccctcctctatagtgagtacaggatctatcctcactctgtggttcacgacagacttcgctgtgagtgcccaaggtttcaaagcattatatgaagttttacctagccacacttgtggaaatcctggagaaatcctgaaaggagttctgcatggaacgagattcaacataggagacaaaatccggtacagctgcctccctggctacatcttggaaggccacgccatcctgacctgcatcgtcagcccaggaaatggtgcatcgtgggacttcccagctcccttttgcagagctgagggagcctgcggaggaaccttacgcgggaccagcagctccatctccagcccgcacttcccttcagagtacgagaacaacgcggactgcacctggaccattctggctgagcccggggacaccattgcgctggtcttcactgactttcagctagaagaaggatatgatttcttagagatcagtggcacggaagctccatccatatggctaactggcatgaacctcccctctccagttatcagtagcaagaattggctacgactccatttcacctctgacagcaaccaccgacgcaaaggatttaacgctcagttccaagtgaaaaaggcgattgagttgaagtcaagaggagtcaagatgctgcccagcaaggatggaagccataaaaactctgtcttgagccaaggaggtgttgcattggtctctcacatgtgtctagatcctgggattccagaaaatggtagaagagcaggttccgacttcagtagggttggtgcaaatgtacagttttcatgtgaggacaattacgtgctccagggatctaaaagcatcacctgtcagagagttacagagacgctcgctgcttggagtgaccacaggcccatctgccgagcgagaacatgtggatccaatctgcgtgggcccagcggcgtcattacctcccctaattatccggttcagtatgaagataatgcacactgtgtgtgggtcatcaccaccaccgacccggacaaggtcatcaagcttgcctttgaagagtttgagctggagcgaggctatgacaccctgacggttggtgatgctgggaaggtgggagacaccagatcggtcttgtacgtgctcacgggatccagtgttcctgacctcattgtgagcatgagcaaccagatgtggctacatctgcagtcggatgatagcattggctcacctgggtttaaagctgtttaccaagaaattgaaaagggagggtgtggggatcctggaatccccgcctatgggaagcggacgggcagcagtttcctccatggagatacactcacctttgaatgcccggcggcctttgagctggtgggggagagagttatcacctgtcagcagaacaatcagtggtctggcaacaagcccagctgtgtattttcatgtttcttcaactttacggcatcatctgggattattctgtcaccaaattatccagaggaatatgggaacaacatgaactgtgtctggttgattatctcggagccaggaagtcgaattcacctaatctttaatgattttgatgttgagcctcaatttgactttctcgcggtcaaggataatggcatttctgacataactgtcctgggtactttttctggcaatgaagtgccttcccagctggccagcagtgggcatatagttcgcttggaatttcagtctgaccattccactactggcagagggttcaacatcacttacaccacatttggtcagaatgagtgccatgatcctggcattcctataaacggacgacgttttggtgacaggtttctactcgggagctcggtttctttccactgtgatgatggctttgtcaagacccagggatccgagtccattacctgcatactgcaagacgggaacgtggtctggagctccaccgtgccccgctgtgaagctccatgtggtggacatctgacagcgtccagcggagtcattttgcctcctggatggccaggatattataaggattctttacattgtgaatggataattgaagcaaaaccaggccactctatcaaaatgacttttgacagatttcagacagaggtcaattatgacaccttggaggtcagagatgggccagccagttcgtccccactgatcggcgagtaccacggcacccaggcaccccagttcctcatcagcaccgggaacttcatgtacctgctgttcaccactgacaacagccgctccagcatcggcttcctcatccactatgagagtgtgacgcttgagtcggattcctgcctggacccgggcatccctgtgaacggccatcgccacggtggagactttggcatcaggtccacagtgactttcagctgtgacccggggtacacactaagtgacgacgagcccctcgtctgtgagaggaaccaccagtggaaccacgccttgcccagctgcgacgctctatgtggaggctacatccaagggaagagtggaacagtcctttctcctgggtttccagatttttatccaaactctctaaactgcacgtggaccattgaagtgtctcatgggaaaggagttcaaatgatctttcacacctttcatcttgagagttcccacgactatttactgatcacagaggatggaagtttttccgagcccgttgccaggctcaccgggtcggtgttgcctcatacgatcaaggcaggcctgtttggaaacttcactgcccagcttcggtttatatcagacttctcaatttcgtacgagggcttcaatatcacattttcagaatatgacctggagccatgtgatgatcctggagtccctgccttcagccgaagaattggttttcactttggtgtgggagactctctgacgttttcctgcttcctgggatatcgtttagaaggtgccaccaagcttacctgcctgggtgggggccgccgtgtgtggagtgcacctctgccaaggtgtgtggccgaatgtggagcaagtgtcaaaggaaatgaaggaacattactgtctccaaattttccatccaattatgataatacccatgagtgtatctataaaatagaaacagaagccggcaagggcatccaccttagaacacgaagcttccagctgtttgaaggagatactctaaaggtatatgatggaaaagacagttcctcacgtccactgggcacgttcactaaaaatgaacttctggggctgatcctaaacagcacatccaatcacctatggctagagttcaacaccaatggatctgacaccgaccaaggttttcaactcacctataccagttttgatctggtaaaatgtgaggatccgggcatccctaactacggctataggatccgtgatgaaggccactttaccgacactgtagttctgtacagttgcaacccggggtacgccatgcatggcagcaacaccctgacctgtttgagtggagacaggagagtgtgggacaaaccactaccttcgtgcatagcggaatgtggtggtcagatccatgcagccacatcaggacgaatattgtcccctggctatccagctccgtatgacaacaacctccactgcacctggattatagaggcagacccaggaaagaccattagcctccatttcattgttttcgacacggagatggctcacgacatcctcaaggtctgggacgggccggtggacagtgacatcctgctgaaggagtggagtggctccgcccttccggaggacatccacagcaccttcaactcactcaccctgcagttcgacagcgacttcttcatcagcaagtctggcttctccatccagttctccacctcaattgcagccacctgtaacgatccaggtatgccccaaaatggcacccgctatggagacagcagagaggctggagacaccgtcacattccagtgtgaccctggctatcagctccaaggacaagccaaaatcacctgtgtgcagctgaataaccggttcttttggcaaccagaccctcctacatgcatagctgcttgtggagggaatctgacgggcccagcaggtgttattttgtcacccaactacccacagccgtatcctcctgggaaggaatgtgactggagagtaaaagtgaacccggactttgtcatcgccttgatattcaaaagtttcaacatggagcccagctatgacttcctacacatctatgaaggggaagattccaacagccccctcattgggagttaccagggctctcaggccccagaaagaatagagagtagcggaaacagcctgtttctggcatttcggagtgatgcctccgtgggcctttcagggttcgccattgaatttaaagagaaaccacgggaagcttgttttgacccaggaaatataatgaatgggacaagagttggaacagacttcaagcttggctccaccatcacctaccagtgtgactctggctataagattcttgacccctcatccatcacctgtgtgattggggctgatgggaaaccctcctgggaccaagtgctgccctcctgcaatgctccctgtggaggccagtacacgggatcagaaggggtagttttatcaccaaactacccccataattacacagctggtcaaatatgcctctattccatcacggtaccaaaggaattcgtggtctttggacagtttgcctatttccagacagccctgaatgatttggcagaattatttgatggaacccatgcacaggccagacttctcagctcactctcggggtctcactcaggggaaacattgcccttggctacgtcaaatcaaattctgctccgattcagtgcaaagagcggtgcctctgcccgcggcttccacttcgtgtatcaagctgttcctcgtaccagtgacacccaatgcagctctgtccccgagcccagatacggaaggagaattggttctgagttttctgccggctccatcgtccgattcgagtgcaacccgggatacctgcttcagggttccacggcgctccactgccagtccgtgcccaacgccttggcacagtggaacgacacgatccccagctgtgtggtaccctgcagtggcaatttcactcaacgaagaggtacaatcctgtcccccggctaccctgagccatacggaaacaacttgaactgtatatggaagatcatagttacggagggctcgggaattcaagatccaagtgatcagttttgccacggagcagaactgggacttccctttgagatccacgatggtggggatgtgaccgcacccagactgggaagcttctcaggcaccacagtaccggcactgctgaacagtacttccaaccaactctacctgcatttccagtctgacattagtgtggcagctgctggtttccacctggaatacaaaactgtaggtcttgctgcatgccaagaaccagccctccccagcaacagcatcaaaatcggagatcggtacatggtgaacgacgtgctctccttccagtgcgagcccgggtacaccctgcagggccgttcccacatttcctgtatgccagggaccgttcgccgttggaactatccgtctcccctgtgcattgcaacctgtggagggacgctgagcaccttgggtggtgtgatcctgagccccggcttcccaggttcttaccccaacaacttagactgcacctggaggatctcattacccatcggctatggtgcacatattcagtttctgaatttttctaccgaagctaatcatgacttccttgaaattcaaaatggaccttaccacaccagccccatgattggacaatttagcggcacggatctccccgcggccctgctgagcacaacgcatgaaaccctcatccacttttatagtgaccattcgcaaaaccggcaaggatttaaacttgcttaccaagcctatgaattacagaactgtccagatccacccccatttcagaatgggtacatgatcaactcggattacagcgtggggcaatcagtatctttcgagtgttatcctgggtacattctaataggccatcctgtcctcacttgtcagcatgggatcaacagaaactggaactacccttttccaagatgtgatgccccttgtgggtacaacgtaacttctcagaacggcaccatctactcccctggctttcctgatgagtatccgatcctgaaggactgcatttggctcatcacggtgcctccagggcacggagtttacatcaacttcaccctgttacagacggaagctgtcaacgattacattgctgtttgggacggtcccgatcagaactcaccccagctgggagttttcagtggcaacacagccctcgaaacggcgtatagctccaccaaccaagtcctgctcaagttccacagcgacttttcaaatggaggcttctttgtcctcaatttccacgcatttcagctcaagaaatgtcaacctcccccagcggttccacaggcagaaatgcttactgaggatgatgatttcgaaataggagattttgtgaagtaccagtgccaccccgggtacaccttggtggggaccgacattctgacttgcaagctcagttcccagttgcagtttgagggttctctcccaacatgtgaagcacaatgcccagcaaatgaagtccggactggatcatcgggagtcattctcagtccagggtatccgggtaattattttaactcccagacttgctcttggagtattaaagtggaaccaaactacaacattaccatctttgtggacacatttcaaagtgaaaagcagtttgatgcactggaagtgtttgatggttcttctgggcaaagtcctctgctagtagtcttaagtgggaatcatactgaacaatcaaattttacaagcaggagtaatcagttatatctccgctggtccactgaccatgccaccagtaagaaaggattcaagattcgctatgcagcaccttactgcagtttgacccaccccctgaagaatgggggtattctaaacaggactgcaggagcggttggaagcaaagtgcattatttttgcaagcctggataccgaatggtcggccacagcaatgcaacctgtagacgaaacccacttggcatgtaccagtgggactccctcacgccactctgccaggctgtgtcctgtggaatcccagaatccccaggaaacggttcatttaccgggaacgagttcactttggacagtaaagtggtctatgaatgtcatgaaggcttcaagcttgaatccagccagcaagcaacagccgtgtgtcaagaagatgggctgtggagtaacaaggggaagccgcccatgtgtaagccggtcgcttgccccagcattgaagctcagctctcagaacatgtcatctggaggctggtttcaggatccttgaatgagtacggtgctcaagtattgctgagctgcagtcctggttactacttagaaggctggaggctcctgcggtgccaggccaatgggacgtggaacataggagatgagaggccaagctgtcgagctggccactgcggttccccagacccgattgtgaacggtcacattagtggagatggcttcagttacagagacacggtggtttaccagtgcaatcctggtttccggcttgtgggaacttccgtgaggatatgcctgcaagaccacaagtggtctggacaaacgcctgtctgtgtccccatcacatgtggtcaccctggaaaccctgcccacggattcactaatggcagtgagttcaacctgaatgatgtcgtgaatttcacctgcaacacgggctatttgctgcagggcgtgtctcgagcccagtgtcggagcaacggccagtggagtagccctctgcccacgtgtcgagtggtgaactgttctgatccaggctttgtggaaaatgccattcgtcacgggcaacagaacttccctgagagttttgagtatggaatgagtatcctgtaccattgcaagaagggatttcacttgctgggatcttcagccttgacctgtatggcaaatggcttatgggaccgatccctgcccaagtgtttggctatatcctgtggacacccaggggtccctgccaacgccgtcctcactggagagctgtttacctatggcgccgtcgtgcactactcctgcagagggagcgagagcctcataggcaacgacacgagagtgtgccaggaagacagtcactggagcggggcactgccccactgcacaggaaataatcctggattctgtggtgatccggggaccccagcacatgggtctcggcttggtgatgactttaagacaaagagtcttctccgcttctcctgtgaaatggggcaccagctgaggggctcccctgaacgcacgtgtttgctcaatgggtcatggtcaggactgcagccggtgtgtgaggccgtgtcctgtggcaaccctggcacacccaccaacggaatgattgtcagtagtgatggcattctgttctccagctcggtcatctatgcctgctgggaaggctacaagacctcagggctcatgacacggcattgcacagccaatgggacctggacaggcactgctcccgactgcacaattataagttgtggggatccaggcacactagcaaatggcatccagtttgggaccgacttcaccttcaacaagactgtgagctatcagtgtaacccaggctatgtcatggaagcagtcacatccgccactattcgctgtaccaaagacggcaggtggaatccgagcaaacctgtctgcaaagccgtgctgtgtcctcagccgccgccggtgcagaatggaacagtggagggaagtgatttccgctggggctccagcataagttacagctgcatggacggttaccagctctctcactccgccatcctctcctgtgaaggtcgcggggtgtggaaaggagagatcccccagtgtctccctgtgttctgcggagaccctggcatccccgcagaagggcgacttagtgggaaaagtttcacctataagtccgaagtcttcttccagtgcaaatctccatttatactcgtgggatcctccagaagagtctgccaagctgacggcacgtggagcggcatacaacccacctgcattgatcctgctcataacacctgcccagaccctggtacgccacactttggaatacagaatagctccagaggctatgaggttggaagcacggtttttttcaggtgcagaaaaggctaccatattcaaggttccacgactcgcacctgccttgccaatttaacatggagtgggatacagaccgaatgtatacctcatgcctgcagacagccagaaaccccggcacacgcggatgtgagagccatcgatcttcctactttcggctacaccttagtgtacacctgccatccaggctttttcctcgcagggggatctgagcacagaacatgtaaagcagacatgaaatggacaggaaagtcgcctgtgtgtaaaagtaaaggagtgagagaagttaatgaaacagttactaaaactccagttccttcagatgtctttttcgtcaattcactgtggaaggggtattatgaatatttagggaaaagacaacccgccactctaactgttgactggttcaatgcaacaagcagtaaggtgaatgccaccttcagcgaagcctcgccagtggagctgaagttgacaggcatttacaagaaggaggaggcccacttactcctgaaagcttttcaaattaaaggccaggcagatatttttgtaagcaagttcgaaaatgacaactggggactagatggttatgtgtcatctggacttgaaagaggaggatttacttttcaaggtgacattcatggaaaagactttggaaaatttaagctagaaaggcaagatcctttaaacccagatcaagactcttccagtcattaccacggcaccagcagtggctctgtggcggctgccattctggttcctttctttgctctaattttatcagggtttgcattttacctctacaaacacagaacgagaccaaaagttcaatacaatggctatgctgggcatgaaaacagcaatggacaagcatcgtttgaaaaccccatgtatgatacaaacttaaaacccacagaagccaaggctgtgaggtttgacacaactctgaacacagtctgtacagtggtatagccctcagtgccccaacaggactgattcatagccatacctctgatggacaagcagtgattcctttggtgccatataccactctcccttccactctggctttactgcagcgatcttcaaccttgtctactggcataagtgcagcggggatctctactcaaatgtgtcagggtcttctacggatcaaactacacatgcgttttcattccaaaagtgggttctaaatgcctggctgcatctgtatgaaatcaaggcacactccaggaagactgccgcgtcgcgccaacacgtcatactcaatgcctcagactttcatatttctgtgttgctgagatgcctttcaatgcaatcgtctgggctcgtggatatgtccctcaggtgcggtgacagaatggtggcaccacgatatgtgttctcttgtgttgtttttcctttttaaacccccatgaacacgaatactctgaaaaaaataaaaagctttctggaagaagacacctttctgatagaggctcacacctacaaatgcttcactctgtccttccgagacctgacaagctttgaggacctcacagctcccctgtgtgttcatctctagggatgtttgcaatttcccagtcagctgttctgtcgcagaatgtttaatgcacaattttttgcactagtgtgttatgaatgactaagattctgataaaaaaataaattatttacacagggtttatacacactatccattg

SEQ ID NO: 302458 - DNA, 11186 bp, Homo sapiens
ccttcctgcccggctcggccggcgctcgtccccggccccggccccgccagcccgggtctccgcgctcggagcagctcagccctgcagtggctcgggacccgatgctatgagagggaagcgagccgggcgcccagaccttcaggaggcgtcggatgcgcggcgggtcttgggaccgggctctctctccggctcgccttgccctcgggtgattatttggctccgctcatagccctgccttcctcggaggagccatcggtgtcgcgtgcgtgtggagtatctgcagacatgactgcgtggaggagattccagtcgctgctcctgcttctcgggctgctggtgctgtgcgcgaggctcctcactgcagcgaagggtcagaactgtggaggcttagtccagggtcccaatggcactattgagagcccagggtttcctcacgggtatccgaactatgccaactgcacctggatcatcatcacgggcgagcgcaataggatacagttgtccttccatacctttgctcttgaagaaaattttgatattttatcagtttacgatggacagcctcaacaagggaatttaaaagtgagattatcgggatttcagctgccctcctctatagtgagtacaggatctatcctcactctgtggttcacgacagacttcgctgtgagtgcccaaggtttcaaagcattatatgaagttttacctagccacacttgtggaaatcctggagaaatcctgaaaggagttctgcatggaacgagattcaacataggagacaaaatccggtacagctgcctccctggctacatcttggaaggccacgccatcctgacctgcatcgtcagcccaggaaatggtgcatcgtgggacttcccagctcccttttgcagagctgagggagcctgcggaggaaccttacgcgggaccagcagctccatctccagcccgcacttcccttcagagtacgagaacaacgcggactgcacctggaccattctggctgagcccggggacaccattgcgctggtcttcactgactttcagctagaagaaggatatgatttcttagagatcagtggcacggaagctccatccatatggctaactggcatgaacctcccctctccagttatcagtagcaagaattggctacgactccatttcacctctgacagcaaccaccgacgcaaaggatttaacgctcagttccaagtgaaaaaggcgattgagttgaagtcaagaggagtcaagatgctgcccagcaaggatggaagccataaaaactctgtcttgagccaaggaggtgttgcattggtctctcacatgtgtctagatcctgggattccagaaaatggtagaagagcaggttccgacttcagtagggttggtgcaaatgtacagttttcatgtgaggacaattacgtgctccagggatctaaaagcatcacctgtcagagagttacagagacgctcgctgcttggagtgaccacaggcccatctgccgagcgagaacatgtggatccaatctgcgtgggcccagcggcgtcattacctcccctaattatccggttcagtatgaagataatgcacactgtgtgtgggtcatcaccaccaccgacccggacaaggtcatcaagcttgcctttgaagagtttgagctggagcgaggctatgacaccctgacggttggtgatgctgggaaggtgggagacaccagatcggtcttgtacgtgctcacgggatccagtgttcctgacctcattgtgagcatgagcaaccagatgtggctacatctgcagtcggatgatagcattggctcacctgggtttaaagctgtttaccaagaaattgaaaagggagggtgtggggatcctggaatccccgcctatgggaagcggacgggcagcagtttcctccatggagatacactcacctttgaatgcccggcggcctttgagctggtgggggagagagttatcacctgtcagcagaacaatcagtggtctggcaacaagcccagctgtgtattttcatgtttcttcaactttacggcatcatctgggattattctgtcaccaaattatccagaggaatatgggaacaacatgaactgtgtctggttgattatctcggagccaggaagtcgaattcacctaatctttaatgattttgatgttgagcctcaatttgactttctcgcggtcaaggataatggcatttctgacataactgtcctgggtactttttctggcaatgaagtgccttcccagctggccagcagtgggcatatagttcgcttggaatttcagtctgaccattccactactggcagagggttcaacatcacttacaccacatttggtcagaatgagtgccatgatcctggcattcctataaacggacgacgttttggtgacaggtttctactcgggagctcggtttctttccactgtgatgatggctttgtcaagacccagggatccgagtccattacctgcatactgcaagacgggaacgtggtctggagctccaccgtgccccgctgtgaagctccatgtggtggacatctgacagcgtccagcggagtcattttgcctcctggatggccaggatattataaggattctttacattgtgaatggataattgaagcaaaaccaggccactctatcaaaatgacttttgacagatttcagacagaggtcaattatgacaccttggaggtcagagatgggccagccagttcgtccccactgatcggcgagtaccacggcacccaggcaccccagttcctcatcagcaccgggaacttcatgtacctgctgttcaccactgacaacagccgctccagcatcggcttcctcatccactatgagagtgtgacgcttgagtcggattcctgcctggacccgggcatccctgtgaacggccatcgccacggtggagactttggcatcaggtccacagtgactttcagctgtgacccggggtacacactaagtgacgacgagcccctcgtctgtgagaggaaccaccagtggaaccacgccttgcccagctgcgacgctctatgtggaggctacatccaagggaagagtggaacagtcctttctcctgggtttccagatttttatccaaactctctaaactgcacgtggaccattgaagtgtctcatgggaaaggagttcaaatgatctttcacacctttcatcttgagagttcccacgactatttactgatcacagaggatggaagtttttccgagcccgttgccaggctcaccgggtcggtgttgcctcatacgatcaaggcaggcctgtttggaaacttcactgcccagcttcggtttatatcagacttctcaatttcgtacgagggcttcaatatcacattttcagaatatgacctggagccatgtgatgatcctggagtccctgccttcagccgaagaattggttttcactttggtgtgggagactctctgacgttttcctgcttcctgggatatcgtttagaaggtgccaccaagcttacctgcctgggtgggggccgccgtgtgtggagtgcacctctgccaaggtgtgtggccgaatgtggagcaagtgtcaaaggaaatgaaggaacattactgtctccaaattttccatccaattatgataatacccatgagtgtatctataaaatagaaacagaagccggcaagggcatccaccttagaacacgaagcttccagctgtttgaaggagatactctaaaggtatatgatggaaaagacagttcctcacgtccactgggcacgttcactaaaaatgaacttctggggctgatcctaaacagcacatccaatcacctatggctagagttcaacaccaatggatctgacaccgaccaaggttttcaactcacctataccagttttgatctggtaaaatgtgaggatccgggcatccctaactacggctataggatccgtgatgaaggccactttaccgacactgtagttctgtacagttgcaacccggggtacgccatgcatggcagcaacaccctgacctgtttgagtggagacaggagagtgtgggacaaaccactaccttcgtgcatagcggaatgtggtggtcagatccatgcagccacatcaggacgaatattgtcccctggctatccagctccgtatgacaacaacctccactgcacctggattatagaggcagacccaggaaagaccattagcctccatttcattgttttcgacacggagatggctcacgacatcctcaaggtctgggacgggccggtggacagtgacatcctgctgaaggagtggagtggctccgcccttccggaggacatccacagcaccttcaactcactcaccctgcagttcgacagcgacttcttcatcagcaagtctggcttctccatccagttctccacctcaattgcagccacctgtaacgatccaggtatgccccaaaatggcacccgctatggagacagcagagaggctggagacaccgtcacattccagtgtgaccctggctatcagctccaaggacaagccaaaatcacctgtgtgcagctgaataaccggttcttttggcaaccagaccctcctacatgcatagctgcttgtggagggaatctgacgggcccagcaggtgttattttgtcacccaactacccacagccgtatcctcctgggaaggaatgtgactggagagtaaaagtgaacccggactttgtcatcgccttgatattcaaaagtttcaacatggagcccagctatgacttcctacacatctatgaaggggaagattccaacagccccctcattgggagttaccagggctctcaggccccagaaagaatagagagtagcggaaacagcctgtttctggcatttcggagtgatgcctccgtgggcctttcagggttcgccattgaatttaaagagaaaccacgggaagcttgttttgacccaggaaatataatgaatgggacaagagttggaacagacttcaagcttggctccaccatcacctaccagtgtgactctggctataagattcttgacccctcatccatcacctgtgtgattggggctgatgggaaaccctcctgggaccaagtgctgccctcctgcaatgctccctgtggaggccagtacacgggatcagaaggggtagttttatcaccaaactacccccataattacacagctggtcaaatatgcctctattccatcacggtaccaaaggaattcgtggtctttggacagtttgcctatttccagacagccctgaatgatttggcagaattatttgatggaacccatgcacaggccagacttctcagctcactctcggggtctcactcaggggaaacattgcccttggctacgtcaaatcaaattctgctccgattcagtgcaaagagcggtgcctctgcccgcggcttccacttcgtgtatcaagctgttcctcgtaccagtgacacccaatgcagctctgtccccgagcccagatacggaaggagaattggttctgagttttctgccggctccatcgtccgattcgagtgcaacccgggatacctgcttcagggttccacggcgctccactgccagtccgtgcccaacgccttggcacagtggaacgacacgatccccagctgtgtggtaccctgcagtggcaatttcactcaacgaagaggtacaatcctgtcccccggctaccctgagccatacggaaacaacttgaactgtatatggaagatcatagttacggagggctcgggaattcaagatccaagtgatcagttttgccacggagcagaactgggacttccctttgagatccacgatggtggggatgtgaccgcacccagactgggaagcttctcaggcaccacagtaccggcactgctgaacagtacttccaaccaactctacctgcatttccagtctgacattagtgtggcagctgctggtttccacctggaatacaaaactgtaggtcttgctgcatgccaagaaccagccctccccagcaacagcatcaaaatcggagatcggtacatggtgaacgacgtgctctccttccagtgcgagcccgggtacaccctgcagggccgttcccacatttcctgtatgccagggaccgttcgccgttggaactatccgtctcccctgtgcattgcaacctgtggagggacgctgagcaccttgggtggtgtgatcctgagccccggcttcccaggttcttaccccaacaacttagactgcacctggaggatctcattacccatcggctatggtgcacatattcagtttctgaatttttctaccgaagctaatcatgacttccttgaaattcaaaatggaccttaccacaccagccccatgattggacaatttagcggcacggatctccccgcggccctgctgagcacaacgcatgaaaccctcatccacttttatagtgaccattcgcaaaaccggcaaggatttaaacttgcttaccaagcctatgaattacagaactgtccagatccacccccatttcagaatgggtacatgatcaactcggattacagcgtggggcaatcagtatctttcgagtgttatcctgggtacattctaataggccatcctgtcctcacttgtcagcatgggatcaacagaaactggaactacccttttccaagatgtgatgccccttgtgggtacaacgtaacttctcagaacggcaccatctactcccctggctttcctgatgagtatccgatcctgaaggactgcatttggctcatcacggtgcctccagggcacggagtttacatcaacttcaccctgttacagacggaagctgtcaacgattacattgctgtttgggacggtcccgatcagaactcaccccagctgggagttttcagtggcaacacagccctcgaaacggcgtatagctccaccaaccaagtcctgctcaagttccacagcgacttttcaaatggaggcttctttgtcctcaatttccacgcatttcagctcaagaaatgtcaacctcccccagcggttccacaggcagaaatgcttactgaggatgatgatttcgaaataggagattttgtgaagtaccagtgccaccccgggtacaccttggtggggaccgacattctgacttgcaagctcagttcccagttgcagtttgagggttctctcccaacatgtgaagcacaatgcccagcaaatgaagtccggactggatcatcgggagtcattctcagtccagggtatccgggtaattattttaactcccagacttgctcttggagtattaaagtggaaccaaactacaacattaccatctttgtggacacatttcaaagtgaaaagcagtttgatgcactggaagtgtttgatggttcttctgggcaaagtcctctgctagtagtcttaagtgggaatcatactgaacaatcaaattttacaagcaggagtaatcagttatatctccgctggtccactgaccatgccaccagtaagaaaggattcaagattcgctatgcagcaccttactgcagtttgacccaccccctgaagaatgggggtattctaaacaggactgcaggagcggttggaagcaaagtgcattatttttgcaagcctggataccgaatggtcggccacagcaatgcaacctgtagacgaaacccacttggcatgtaccagtgggactccctcacgccactctgccaggctgtgtcctgtggaatcccagaatccccaggaaacggttcatttaccgggaacgagttcactttggacagtaaagtggtctatgaatgtcatgaaggcttcaagcttgaatccagccagcaagcaacagccgtgtgtcaagaagatgggctgtggagtaacaaggggaagccgcccatgtgtaagccggtcgcttgccccagcattgaagctcagctctcagaacatgtcatctggaggctggtttcaggatccttgaatgagtacggtgctcaagtattgctgagctgcagtcctggttactacttagaaggctggaggctcctgcggtgccaggccaatgggacgtggaacataggagatgagaggccaagctgtcgagctggccactgcggttccccagacccgattgtgaacggtcacattagtggagatggcttcagttacagagacacggtggtttaccagtgcaatcctggtttccggcttgtgggaacttccgtgaggatatgcctgcaagaccacaagtggtctggacaaacgcctgtctgtgtccccatcacatgtggtcaccctggaaaccctgcccacggattcactaatggcagtgagttcaacctgaatgatgtcgtgaatttcacctgcaacacgggctatttgctgcagggcgtgtctcgagcccagtgtcggagcaacggccagtggagtagccctctgcccacgtgtcgagtggtgaactgttctgatccaggctttgtggaaaatgccattcgtcacgggcaacagaacttccctgagagttttgagtatggaatgagtatcctgtaccattgcaagaagggatttcacttgctgggatcttcagccttgacctgtatggcaaatggcttatgggaccgatccctgcccaagtgtttggctatatcctgtggacacccaggggtccctgccaacgccgtcctcactggagagctgtttacctatggcgccgtcgtgcactactcctgcagagggagcgagagcctcataggcaacgacacgagagtgtgccaggaagacagtcactggagcggggcactgccccactgcacaggaaataatcctggattctgtggtgatccggggaccccagcacatgggtctcggcttggtgatgactttaagacaaagagtcttctccgcttctcctgtgaaatggggcaccagctgaggggctcccctgaacgcacgtgtttgctcaatgggtcatggtcaggactgcagccggtgtgtgaggccgtgctgtgtcctcagccgccgccggtgcagaatggaacagtggagggaagtgatttccgctggggctccagcataagttacagctgcatggacggttaccagctctctcactccgccatcctctcctgtgaaggtcgcggggtgtggaaaggagagatcccccagtgtctccctgtgttctgcggagaccctggcatccccgcagaagggcgacttagtgggaaaagtttcacctataagtccgaagtcttcttccagtgcaaatctccatttatactcgtgggatcctccagaagagtctgccaagctgacggcacgtggagcggcatacaacccacctgcattgatcctgctcataacacctgcccagaccctggtacgccacactttggaatacagaatagctccagaggctatgaggttggaagcacggtttttttcaggtgcagaaaaggctaccatattcaaggttccacgactcgcacctgccttgccaatttaacatggagtgggatacagaccgaatgtatacctcatgcctgcagacagccagaaaccccggcacacgcggatgtgagagccatcgatcttcctactttcggctacaccttagtgtacacctgccatccaggctttttcctcgcagggggatctgagcacagaacatgtaaagcagacatgaaatggacaggaaagtcgcctgtgtgtaaaagtaaaggagtgagagaagttaatgaaacagttactaaaactccagttccttcagatgtctttttcgtcaattcactgtggaaggggtattatgaatatttagggaaaagacaacccgccactctaactgttgactggttcaatgcaacaagcagtaaggtgaatgccaccttcagcgaagcctcgccagtggagctgaagttgacaggcatttacaagaaggaggaggcccacttactcctgaaagcttttcaaattaaaggccaggcagatatttttgtaagcaagttcgaaaatgacaactggggactagatggttatgtgtcatctggacttgaaagaggaggatttacttttcaaggtgacattcatggaaaagactttggaaaatttaagctagaaaggcaagatcctttaaacccagatcaagactcttccagtcattaccacggcaccagcagtggctctgtggcggctgccattctggttcctttctttgctctaattttatcagggtttgcattttacctctacaaacacagaacgagaccaaaagttcaatacaatggctatgctgggcatgaaaacagcaatggacaagcatcgtttgaaaaccccatgtatgatacaaacttaaaacccacagaagccaaggctgtgaggtttgacacaactctgaacacagtctgtacagtggtatagccctcagtgccccaacaggactgattcatagccatacctctgatggacaagcagtgattcctttggtgccatataccactctcccttccactctggctttactgcagcgatcttcaaccttgtctactggcataagtgcagcggggatctctactcaaatgtgtcagggtcttctacggatcaaactacacatgcgttttcattccaaaagtgggttctaaatgcctggctgcatctgtatgaaatcaaggcacactccaggaagactgccgcgtcgcgccaacacgtcatactcaatgcctcagactttcatatttctgtgttgctgagatgcctttcaatgcaatcgtctgggctcgtggatatgtccctcaggtgcggtgacagaatggtggcaccacgatatgtgttctcttgtgttgtttttcctttttaaacccccatgaacacgaatactctgaaaaaaataaaaagctttctggaagaagacacctttctgatagaggctcacacctacaaatgcttcactctgtccttccgagacctgacaagctttgaggacctcacagctcccctgtgtgttcatctctagggatgtttgcaatttcccagtcagctgttctgtcgcagaatgtttaatgcacaattttttgcactagtgtgttatgaatgactaagattctgataaaaaaataaattatttacacagggtttatacacactatccattg

SEQ ID NO: 302459 - DNA, 620 bp, Homo sapiens
gagtgtcatggaaaaagaccatgcggcaaaaagtggcagaggtaagatggagccagggtttgctgtcatccacagtgaatgccgtcctccacggcatggtctctgtctcacagagagggattgtctggggagactgctaacacttcagtccctttttatgagcattgattttatacattttgatatgaactttcattaagtttgcatgtttttccataggtgcacatattcagtttctgaatttttctaccgaagctaatcatgacttccttgaaattcaaaatggaccttaccacaccagccccatgattggacaatttagcggcacggatctccccgcggccctgctgagcacaacgcatgaaaccctcatccacttttatagtgaccattcgcaaaaccggcaaggatttaaacttgcttaccaaggaggatctggaaacattggtcctgctttcccatgtcttgacaccccattccaagccagatgtcaaggagaagaaaggactttcaattaaaaaaaaaacaaaaactcgaaacaacatgttttttattgtacgccattaatttcctatcactgagatataaaaataaataatacaaataaatgagaacatgaa

SEQ ID NO: 302460 - DNA, 6472 bp, Homo sapiens
ccttcctgcccggctcggccggcgctcgtccccggccccggccccgccagcccgggtctccgcgctcggagcagctcagccctgcagtggctcgggacccgatgctatgagagggaagcgagccgggcgcccagaccttcaggaggcgtcggatgcgcggcgggtcttgggaccgggctctctctccggctcgccttgccctcgggtgattatttggctccgctcatagccctgccttcctcggaggagccatcggtgtcgcgtgcgtgtggagtatctgcagacatgactgcgtggaggagattccagtcgctgctcctgcttctcgggctgctggtgctgtgcgcgaggctcctcactgcagcgaagggtcagaactgtggaggcttagtccagggtcccaatggcactattgagagcccagggtttcctcacgggtatccgaactatgccaactgcacctggatcatcatcacgggcgagcgcaataggatacagttgtccttccatacctttgctcttgaagaaaattttgatattttatcagtttacgatggacagcctcaacaagggaatttaaaagtgagattatcgggatttcagctgccctcctctatagtgagtacaggatctatcctcactctgtggttcacgacagacttcgctgtgagtgcccaaggtttcaaagcattatatgaagttttacctagccacacttgtggaaatcctggagaaatcctgaaaggagttctgcatggaacgagattcaacataggagacaaaatccggtacagctgcctccctggctacatcttggaaggccacgccatcctgacctgcatcgtcagcccaggaaatggtgcatcgtgggacttcccagctcccttttgcagagctgagggagcctgcggaggaaccttacgcgggaccagcagctccatctccagcccgcacttcccttcagagtacgagaacaacgcggactgcacctggaccattctggctgagcccggggacaccattgcgctggtcttcactgactttcagctagaagaaggatatgatttcttagagatcagtggcacggaagctccatccatatggctaactggcatgaacctcccctctccagttatcagtagcaagaattggctacgactccatttcacctctgacagcaaccaccgacgcaaaggatttaacgctcagttccaagtgaaaaaggcgattgagttgaagtcaagaggagtcaagatgctgcccagcaaggatggaagccataaaaactctgtcttgagccaaggaggtgttgcattggtctctcacatgtgtctagatcctgggattccagaaaatggtagaagagcaggttccgacttcagtagggttggtgcaaatgtacagttttcatgtgaggacaattacgtgctccagggatctaaaagcatcacctgtcagagagttacagagacgctcgctgcttggagtgaccacaggcccatctgccgagcgagaacatgtggatccaatctgcgtgggcccagcggcgtcattacctcccctaattatccggttcagtatgaagataatgcacactgtgtgtgggtcatcaccaccaccgacccggacaaggtcatcaagcttgcctttgaagagtttgagctggagcgaggctatgacaccctgacggttggtgatgctgggaaggtgggagacaccagatcggtcttgtacgtgctcacgggatccagtgttcctgacctcattgtgagcatgagcaaccagatgtggctacatctgcagtcggatgatagcattggctcacctgggtttaaagctgtttaccaagaaattgaaaagggagggtgtggggatcctggaatccccgcctatgggaagcggacgggcagcagtttcctccatggagatacactcacctttgaatgcccggcggcctttgagctggtgggggagagagttatcacctgtcagcagaacaatcagtggtctggcaacaagcccagctgtgtattttcatgtttcttcaactttacggcatcatctgggattattctgtcaccaaattatccagaggaatatgggaacaacatgaactgtgtctggttgattatctcggagccaggaagtcgaattcacctaatctttaatgattttgatgttgagcctcaatttgactttctcgcggtcaaggataatggcatttctgacataactgtcctgggtactttttctggcaatgaagtgccttcccagctggccagcagtgggcatatagttcgcttggaatttcagtctgaccattccactactggcagagggttcaacatcacttacaccacatttggtcagaatgagtgccatgatcctggcattcctataaacggacgacgttttggtgacaggtttctactcgggagctcggtttctttccactgtgatgatggctttgtcaagacccagggatccgagtccattacctgcatactgcaagacgggaacgtggtctggagctccaccgtgccccgctgtgaagctccatgtggtggacatctgacagcgtccagcggagtcattttgcctcctggatggccaggatattataaggattctttacattgtgaatggataattgaagcaaaaccaggccactctatcaaaatgacttttgacagatttcagacagaggtcaattatgacaccttggaggtcagagatgggccagccagttcgtccccactgatcggcgagtaccacggcacccaggcaccccagttcctcatcagcaccgggaacttcatgtacctgctgttcaccactgacaacagccgctccagcatcggcttcctcatccactatgagagtgtgacgcttgagtcggattcctgcctggacccgggcatccctgtgaacggccatcgccacggtggagactttggcatcaggtccacagtgactttcagctgtgacccggggtacacactaagtgacgacgagcccctcgtctgtgagaggaaccaccagtggaaccacgccttgcccagctgcgacgctctatgtggaggctacatccaagggaagagtggaacagtcctttctcctgggtttccagatttttatccaaactctctaaactgcacgtggaccattgaagtgtctcatgggaaaggagttcaaatgatctttcacacctttcatcttgagagttcccacgactatttactgatcacagaggatggaagtttttccgagcccgttgccaggctcaccgggtcggtgttgcctcatacgatcaaggcaggcctgtttggaaacttcactgcccagcttcggtttatatcagacttctcaatttcgtacgagggcttcaatatcacattttcagaatatgacctggagccatgtgatgatcctggagtccctgccttcagccgaagaattggttttcactttggtgtgggagactctctgacgttttcctgcttcctgggatatcgtttagaaggtgccaccaagcttacctgcctgggtgggggccgccgtgtgtggagtgcacctctgccaaggtgtgtggccgaatgtggagcaagtgtcaaaggaaatgaaggaacattactgtctccaaattttccatccaattatgataatacccatgagtgtatctataaaatagaaacagaagccggcaagggcatccaccttagaacacgaagcttccagctgtttgaaggagatactctaaaggtatatgatggaaaagacagttcctcacgtccactgggcacgttcactaaaaatgaacttctggggctgatcctaaacagcacatccaatcacctatggctagagttcaacaccaatggatctgacaccgaccaaggttttcaactcacctataccagttttgatctggtaaaatgtgaggatccgggcatccctaactacggctataggatccgtgatgaaggccactttaccgacactgtagttctgtacagttgcaacccggggtacgccatgcatggcagcaacaccctgacctgtttgagtggagacaggagagtgtgggacaaaccactaccttcgtgcatagcggaatgtggtggtcagatccatgcagccacatcaggacgaatattgtcccctggctatccagctccgtatgacaacaacctccactgcacctggattatagaggcagacccaggaaagaccattagcctccatttcattgttttcgacacggagatggctcacgacatcctcaaggtctgggacgggccggtggacagtgacatcctgctgaaggagtggagtggctccgcccttccggaggacatccacagcaccttcaactcactcaccctgcagttcgacagcgacttcttcatcagcaagtctggcttctccatccagttctccacctcaattgcagccacctgtaacgatccaggtatgccccaaaatggcacccgctatggagacagcagagaggctggagacaccgtcacattccagtgtgaccctggctatcagctccaaggacaagccaaaatcacctgtgtgcagctgaataaccggttcttttggcaaccagaccctcctacatgcatagctgcttgtggagggaatctgacgggcccagcaggtgttattttgtcacccaactacccacagccgtatcctcctgggaaggaatgtgactggagagtaaaagtgaacccggactttgtcatcgccttgatattcaaaagtttcaacatggagcccagctatgacttcctacacatctatgaaggggaagattccaacagccccctcattgggagttaccagggctctcaggccccagaaagaatagagagtagcggaaacagcctgtttctggcatttcggagtgatgcctccgtgggcctttcagggttcgccattgaatttaaagagaaaccacgggaagcttgttttgacccaggaaatataatgaatgggacaagagttggaacagacttcaagcttggctccaccatcacctaccagtgtgactctggctataagattcttgacccctcatccatcacctgtgtgattggggctgatgggaaaccctcctgggaccaagtgctgccctcctgcaatgctccctgtggaggccagtacacgggatcagaaggggtagttttatcaccaaactacccccataattacacagctggtcaaatatgcctctattccatcacggtaccaaaggaattcgtggtctttggacagtttgcctatttccagacagccctgaatgatttggcagaattatttgatggaacccatgcacaggccagacttctcagctcactctcggggtctcactcaggggaaacattgcccttggctacgtcaaatcaaattctgctccgattcagtgcaaagagcggtgcctctgcccgcggcttccacttcgtgtatcaagctgttcctcgtaccagtgacacccaatgcagctctgtccccgagcccagatacggaaggagaattggttctgagttttctgccggctccatcgtccgattcgagtgcaacccgggatacctgcttcagggttccacggcgctccactgccagtccgtgcccaacgccttggcacagtggaacgacacgatccccagctgtgtggtaccctgcagtggcaatttcactcaacgaagaggtacaatcctgtcccccggctaccctgagccatacggaaacaacttgaactgtatatggaagatcatagttacggagggctcgggaattcaagatccaagtgatcagttttgccacggagcagaactgggacttccctttgagatccacgatggtggggatgtgaccgcacccagactgggaagcttctcaggcaccacagtaccggcactgctgaacagtacttccaaccaactctacctgcatttccagtctgacattagtgtggcagctgctggtttccacctggaatacaaaactgtaggtcttgctgcatgccaagaaccagccctccccagcaacagcatcaaaatcggagatcggtacatggtgaacgacgtgctctccttccagtgcgagcccgggtacaccctgcagggccgttcccacatttcctgtatgccagggaccgttcgccgttggaactatccgtctcccctgtgcattgcaacctgtggagggacgctgagcaccttgggtggtgtgatcctgagccccggcttcccaggttcttaccccaacaacttagactgcacctggaggatctcattacccatcggctatggtaagtgaaaatgttaccaattcctaaaagttcatttttttcatttccatcttggaaagaattaagcagaataaaatgccttattctgttggcataactgtatctgtaattgaaagtggcgtacagatttaaataaagctttggcagagt

SEQ ID NO: 302461 - DNA, 6803 bp, Homo sapiens
ccttcctgcccggctcggccggcgctcgtccccggccccggccccgccagcccgggtctccgcgctcggagcagctcagccctgcagtggctcgggacccgatgctatgagagggaagcgagccgggcgcccagaccttcaggaggcgtcggatgcgcggcgggtcttgggaccgggctctctctccggctcgccttgccctcgggtgattatttggctccgctcatagccctgccttcctcggaggagccatcggtgtcgcgtgcgtgtggagtatctgcagacatgactgcgtggaggagattccagtcgctgctcctgcttctcgggctgctggtgctgtgcgcgaggctcctcactgcagcgaagggtcagaactgtggaggcttagtccagggtcccaatggcactattgagagcccagggtttcctcacgggtatccgaactatgccaactgcacctggatcatcatcacgggcgagcgcaataggatacagttgtccttccatacctttgctcttgaagaaaattttgatattttatcagtttacgatggacagcctcaacaagggaatttaaaagtgagattatcgggatttcagctgccctcctctatagtgagtacaggatctatcctcactctgtggttcacgacagacttcgctgtgagtgcccaaggtttcaaagcattatatgaagttttacctagccacacttgtggaaatcctggagaaatcctgaaaggagttctgcatggaacgagattcaacataggagacaaaatccggtacagctgcctccctggctacatcttggaaggccacgccatcctgacctgcatcgtcagcccaggaaatggtgcatcgtgggacttcccagctcccttttgcagagctgagggagcctgcggaggaaccttacgcgggaccagcagctccatctccagcccgcacttcccttcagagtacgagaacaacgcggactgcacctggaccattctggctgagcccggggacaccattgcgctggtcttcactgactttcagctagaagaaggatatgatttcttagagatcagtggcacggaagctccatccatatggctaactggcatgaacctcccctctccagttatcagtagcaagaattggctacgactccatttcacctctgacagcaaccaccgacgcaaaggatttaacgctcagttccaagtgaaaaaggcgattgagttgaagtcaagaggagtcaagatgctgcccagcaaggatggaagccataaaaactctgtcttgagccaaggaggtgttgcattggtctctcacatgtgtctagatcctgggattccagaaaatggtagaagagcaggttccgacttcagtagggttggtgcaaatgtacagttttcatgtgaggacaattacgtgctccagggatctaaaagcatcacctgtcagagagttacagagacgctcgctgcttggagtgaccacaggcccatctgccgagcgagaacatgtggatccaatctgcgtgggcccagcggcgtcattacctcccctaattatccggttcagtatgaagataatgcacactgtgtgtgggtcatcaccaccaccgacccggacaaggtcatcaagcttgcctttgaagagtttgagctggagcgaggctatgacaccctgacggttggtgatgctgggaaggtgggagacaccagatcggtcttgtacgtgctcacgggatccagtgttcctgacctcattgtgagcatgagcaaccagatgtggctacatctgcagtcggatgatagcattggctcacctgggtttaaagctgtttaccaagaaattgaaaagggagggtgtggggatcctggaatccccgcctatgggaagcggacgggcagcagtttcctccatggagatacactcacctttgaatgcccggcggcctttgagctggtgggggagagagttatcacctgtcagcagaacaatcagtggtctggcaacaagcccagctgtgtattttcatgtttcttcaactttacggcatcatctgggattattctgtcaccaaattatccagaggaatatgggaacaacatgaactgtgtctggttgattatctcggagccaggaagtcgaattcacctaatctttaatgattttgatgttgagcctcaatttgactttctcgcggtcaaggataatggcatttctgacataactgtcctgggtactttttctggcaatgaagtgccttcccagctggccagcagtgggcatatagttcgcttggaatttcagtctgaccattccactactggcagagggttcaacatcacttacaccacatttggtcagaatgagtgccatgatcctggcattcctataaacggacgacgttttggtgacaggtttctactcgggagctcggtttctttccactgtgatgatggctttgtcaagacccagggatccgagtccattacctgcatactgcaagacgggaacgtggtctggagctccaccgtgccccgctgtgaagctccatgtggtggacatctgacagcgtccagcggagtcattttgcctcctggatggccaggatattataaggattctttacattgtgaatggataattgaagcaaaaccaggccactctatcaaaatgacttttgacagatttcagacagaggtcaattatgacaccttggaggtcagagatgggccagccagttcgtccccactgatcggcgagtaccacggcacccaggcaccccagttcctcatcagcaccgggaacttcatgtacctgctgttcaccactgacaacagccgctccagcatcggcttcctcatccactatgagagtgtgacgcttgagtcggattcctgcctggacccgggcatccctgtgaacggccatcgccacggtggagactttggcatcaggtccacagtgactttcagctgtgacccggggtacacactaagtgacgacgagcccctcgtctgtgagaggaaccaccagtggaaccacgccttgcccagctgcgacgctctatgtggaggctacatccaagggaagagtggaacagtcctttctcctgggtttccagatttttatccaaactctctaaactgcacgtggaccattgaagtgtctcatgggaaaggagttcaaatgatctttcacacctttcatcttgagagttcccacgactatttactgatcacagaggatggaagtttttccgagcccgttgccaggctcaccgggtcggtgttgcctcatacgatcaaggcaggcctgtttggaaacttcactgcccagcttcggtttatatcagacttctcaatttcgtacgagggcttcaatatcacattttcagaatatgacctggagccatgtgatgatcctggagtccctgccttcagccgaagaattggttttcactttggtgtgggagactctctgacgttttcctgcttcctgggatatcgtttagaaggtgccaccaagcttacctgcctgggtgggggccgccgtgtgtggagtgcacctctgccaaggtgtgtggccgaatgtggagcaagtgtcaaaggaaatgaaggaacattactgtctccaaattttccatccaattatgataatacccatgagtgtatctataaaatagaaacagaagccggcaagggcatccaccttagaacacgaagcttccagctgtttgaaggagatactctaaaggtatatgatggaaaagacagttcctcacgtccactgggcacgttcactaaaaatgaacttctggggctgatcctaaacagcacatccaatcacctatggctagagttcaacaccaatggatctgacaccgaccaaggttttcaactcacctataccagttttgatctggtaaaatgtgaggatccgggcatccctaactacggctataggatccgtgatgaaggccactttaccgacactgtagttctgtacagttgcaacccggggtacgccatgcatggcagcaacaccctgacctgtttgagtggagacaggagagtgtgggacaaaccactaccttcgtgcatagcggaatgtggtggtcagatccatgcagccacatcaggacgaatattgtcccctggctatccagctccgtatgacaacaacctccactgcacctggattatagaggcagacccaggaaagaccattagcctccatttcattgttttcgacacggagatggctcacgacatcctcaaggtctgggacgggccggtggacagtgacatcctgctgaaggagtggagtggctccgcccttccggaggacatccacagcaccttcaactcactcaccctgcagttcgacagcgacttcttcatcagcaagtctggcttctccatccagttctccacctcaattgcagccacctgtaacgatccaggtatgccccaaaatggcacccgctatggagacagcagagaggctggagacaccgtcacattccagtgtgaccctggctatcagctccaaggacaagccaaaatcacctgtgtgcagctgaataaccggttcttttggcaaccagaccctcctacatgcatagctgcttgtggagggaatctgacgggcccagcaggtgttattttgtcacccaactacccacagccgtatcctcctgggaaggaatgtgactggagagtaaaagtgaacccggactttgtcatcgccttgatattcaaaagtttcaacatggagcccagctatgacttcctacacatctatgaaggggaagattccaacagccccctcattgggagttaccagggctctcaggccccagaaagaatagagagtagcggaaacagcctgtttctggcatttcggagtgatgcctccgtgggcctttcagggttcgccattgaatttaaagagaaaccacgggaagcttgttttgacccaggaaatataatgaatgggacaagagttggaacagacttcaagcttggctccaccatcacctaccagtgtgactctggctataagattcttgacccctcatccatcacctgtgtgattggggctgatgggaaaccctcctgggaccaagtgctgccctcctgcaatgctccctgtggaggccagtacacgggatcagaaggggtagttttatcaccaaactacccccataattacacagctggtcaaatatgcctctattccatcacggtaccaaaggaattcgtggtctttggacagtttgcctatttccagacagccctgaatgatttggcagaattatttgatggaacccatgcacaggccagacttctcagctcactctcggggtctcactcaggggaaacattgcccttggctacgtcaaatcaaattctgctccgattcagtgcaaagagcggtgcctctgcccgcggcttccacttcgtgtatcaagctgttcctcgtaccagtgacacccaatgcagctctgtccccgagcccagatacggaaggagaattggttctgagttttctgccggctccatcgtccgattcgagtgcaacccgggatacctgcttcagggttccacggcgctccactgccagtccgtgcccaacgccttggcacagtggaacgacacgatccccagctgtgtggtaccctgcagtggcaatttcactcaacgaagaggtacaatcctgtcccccggctaccctgagccatacggaaacaacttgaactgtatatggaagatcatagttacggagggctcgggaattcaagatccaagtgatcagttttgccacggagcagaactgggacttccctttgagatccacgatggtggggatgtgaccgcacccagactgggaagcttctcaggcaccacagtaccggcactgctgaacagtacttccaaccaactctacctgcatttccagtctgacattagtgtggcagctgctggtttccacctggaatacaaaactgtaggtcttgctgcatgccaagaaccagccctccccagcaacagcatcaaaatcggagatcggtacatggtgaacgacgtgctctccttccagtgcgagcccgggtacaccctgcagggccgttcccacatttcctgtatgccagggaccgttcgccgttggaactatccgtctcccctgtgcattgcaacctgtggagggacgctgagcaccttgggtggtgtgatcctgagccccggcttcccaggttcttaccccaacaacttagactgcacctggaggatctcattacccatcggctatggtgcacatattcagtttctgaatttttctaccgaagctaatcatgacttccttgaaattcaaaatggaccttaccacaccagccccatgattggacaatttagcggcacggatctccccgcggccctgctgagcacaacgcatgaaaccctcatccacttttatagtgaccattcgcaaaaccggcaaggatttaaacttgcttaccaaggtatggaacaacaacgagaaccgaaacccaaatctaaatacacttcttacatgtaaaatgtatttaagtataaatctccctaactggttccaagcttgtacgagtggaataattttttggtggaatgttggtttctggttagtagtggaacacttgttgtttttgaaaacagaggtaaggacacagacggaaccaccagtgggttcgccttttctgctgcccagacagagccgatttatcaagacgggaattgcaatggagaaagagtaat

SEQ ID NO: 302462 - DNA, 5440 bp, Homo sapiens
gagtgtcatggaaaaagaccatgcggcaaaaagtggcagaggtaagatggagccagggtttgctgtcatccacagtgaatgccgtcctccacggcatggtctctgtctcacagagagggattgtctggggagactgctaacacttcagtccctttttatgagcattgattttatacattttgatatgaactttcattaagtttgcatgtttttccataggtgcacatattcagtttctgaatttttctaccgaagctaatcatgacttccttgaaattcaaaatggaccttaccacaccagccccatgattggacaatttagcggcacggatctccccgcggccctgctgagcacaacgcatgaaaccctcatccacttttatagtgaccattcgcaaaaccggcaaggatttaaacttgcttaccaagcctatgaattacagaactgtccagatccacccccatttcagaatgggtacatgatcaactcggattacagcgtggggcaatcagtatctttcgagtgttatcctgggtacattctaataggccatcctgtcctcacttgtcagcatgggatcaacagaaactggaactacccttttccaagatgtgatgccccttgtgggtacaacgtaacttctcagaacggcaccatctactcccctggctttcctgatgagtatccgatcctgaaggactgcatttggctcatcacggtgcctccagggcacggagtttacatcaacttcaccctgttacagacggaagctgtcaacgattacattgctgtttgggacggtcccgatcagaactcaccccagctgggagttttcagtggcaacacagccctcgaaacggcgtatagctccaccaaccaagtcctgctcaagttccacagcgacttttcaaatggaggcttctttgtcctcaatttccacgcatttcagctcaagaaatgtcaacctcccccagcggttccacaggcagaaatgcttactgaggatgatgatttcgaaataggagattttgtgaagtaccagtgccaccccgggtacaccttggtggggaccgacattctgacttgcaagctcagttcccagttgcagtttgagggttctctcccaacatgtgaagcacaatgcccagcaaatgaagtccggactggatcatcgggagtcattctcagtccagggtatccgggtaattattttaactcccagacttgctcttggagtattaaagtggaaccaaactacaacattaccatctttgtggacacatttcaaagtgaaaagcagtttgatgcactggaagtgtttgatggttcttctgggcaaagtcctctgctagtagtcttaagtgggaatcatactgaacaatcaaattttacaagcaggagtaatcagttatatctccgctggtccactgaccatgccaccagtaagaaaggattcaagattcgctatgcagcaccttactgcagtttgacccaccccctgaagaatgggggtattctaaacaggactgcaggagcggttggaagcaaagtgcattatttttgcaagcctggataccgaatggtcggccacagcaatgcaacctgtagacgaaacccacttggcatgtaccagtgggactccctcacgccactctgccaggctgtgtcctgtggaatcccagaatccccaggaaacggttcatttaccgggaacgagttcactttggacagtaaagtggtctatgaatgtcatgaaggcttcaagcttgaatccagccagcaagcaacagccgtgtgtcaagaagatgggctgtggagtaacaaggggaagccgcccatgtgtaagccggtcgcttgccccagcattgaagctcagctctcagaacatgtcatctggaggctggtttcaggatccttgaatgagtacggtgctcaagtattgctgagctgcagtcctggttactacttagaaggctggaggctcctgcggtgccaggccaatgggacgtggaacataggagatgagaggccaagctgtcgagctggccactgcggttccccagacccgattgtgaacggtcacattagtggagatggcttcagttacagagacacggtggtttaccagtgcaatcctggtttccggcttgtgggaacttccgtgaggatatgcctgcaagaccacaagtggtctggacaaacgcctgtctgtgtccccatcacatgtggtcaccctggaaaccctgcccacggattcactaatggcagtgagttcaacctgaatgatgtcgtgaatttcacctgcaacacgggctatttgctgcagggcgtgtctcgagcccagtgtcggagcaacggccagtggagtagccctctgcccacgtgtcgagtggtgaactgttctgatccaggctttgtggaaaatgccattcgtcacgggcaacagaacttccctgagagttttgagtatggaatgagtatcctgtaccattgcaagaagggatttcacttgctgggatcttcagccttgacctgtatggcaaatggcttatgggaccgatccctgcccaagtgtttggctatatcctgtggacacccaggggtccctgccaacgccgtcctcactggagagctgtttacctatggcgccgtcgtgcactactcctgcagagggagcgagagcctcataggcaacgacacgagagtgtgccaggaagacagtcactggagcggggcactgccccactgcacaggaaataatcctggattctgtggtgatccggggaccccagcacatgggtctcggcttggtgatgactttaagacaaagagtcttctccgcttctcctgtgaaatggggcaccagctgaggggctcccctgaacgcacgtgtttgctcaatgggtcatggtcaggactgcagccggtgtgtgaggccgtgtcctgtggcaaccctggcacacccaccaacggaatgattgtcagtagtgatggcattctgttctccagctcggtcatctatgcctgctgggaaggctacaagacctcagggctcatgacacggcattgcacagccaatgggacctggacaggcactgctcccgactgcacaattataagttgtggggatccaggcacactagcaaatggcatccagtttgggaccgacttcaccttcaacaagactgtgagctatcagtgtaacccaggctatgtcatggaagcagtcacatccgccactattcgctgtaccaaagacggcaggtggaatccgagcaaacctgtctgcaaagccgtgctgtgtcctcagccgccgccggtgcagaatggaacagtggagggaagtgatttccgctggggctccagcataagttacagctgcatggacggttaccagctctctcactccgccatcctctcctgtgaaggtcgcggggtgtggaaaggagagatcccccagtgtctccctgtgttctgcggagaccctggcatccccgcagaagggcgacttagtgggaaaagtttcacctataagtccgaagtcttcttccagtgcaaatctccatttatactcgtgggatcctccagaagagtctgccaagctgacggcacgtggagcggcatacaacccacctgcattgatcctgctcataacacctgcccagaccctggtacgccacactttggaatacagaatagctccagaggctatgaggttggaagcacggtttttttcaggtgcagaaaaggctaccatattcaaggttccacgactcgcacctgccttgccaatttaacatggagtgggatacagaccgaatgtatacctcatgcctgcagacagccagaaaccccggcacacgcggatgtgagagccatcgatcttcctactttcggctacaccttagtgtacacctgccatccaggctttttcctcgcagggggatctgagcacagaacatgtaaagcagacatgaaatggacaggaaagtcgcctgtgtgtaaaagtaaaggagtgagagaagttaatgaaacagttactaaaactccagttccttcagatgtctttttcgtcaattcactgtggaaggggtattatgaatatttagggaaaagacaacccgccactctaactgttgactggttcaatgcaacaagcagtaaggtgaatgccaccttcagcgaagcctcgccagtggagctgaagttgacaggcatttacaagaaggaggaggcccacttactcctgaaagcttttcaaattaaaggccaggcagatatttttgtaagcaagttcgaaaatgacaactggggactagatggttatgtgtcatctggacttgaaagaggaggatttacttttcaaggtgacattcatggaaaagactttggaaaatttaagctagaaaggcaagatcctttaaacccagatcaagactcttccagtcattaccacggcaccagcagtggctctgtggcggctgccattctggttcctttctttgctctaattttatcagggtttgcattttacctctacaaacacagaacgagaccaaaagttcaatacaatggctatgctgggcatgaaaacagcaatggacaagcatcgtttgaaaaccccatgtatgatacaaacttaaaacccacagaagccaaggctgtgaggtttgacacaactctgaacacagtctgtacagtggtatagccctcagtgccccaacaggactgattcatagccatacctctgatggacaagcagtgattcctttggtgccatataccactctcccttccactctggctttactgcagcgatcttcaaccttgtctactggcataagtgcagcggggatctctactcaaatgtgtcagggtcttctacggatcaaactacacatgcgttttcattccaaaagtgggttctaaatgcctggctgcatctgtatgaaatcaaggcacactccaggaagactgccgcgtcgcgccaacacgtcatactcaatgcctcagactttcatatttctgtgttgctgagatgcctttcaatgcaatcgtctgggctcgtggatatgtccctcaggtgcggtgacagaatggtggcaccacgatatgtgttctcttgtgttgtttttcctttttaaacccccatgaacacgaatactctgaaaaaaataaaaagctttctggaagaagacacctttctgatagaggctcacacctacaaatgcttcactctgtccttccgagacctgacaagctttgaggacctcacagctcccctgtgtgttcatctctagggatgtttgcaatttcccagtcagctgttctgtcgcagaatgtttaatgcacaattttttgcactagtgtgttatgaatgactaagattctgataaaaaaataaattatttacacagggtttatacacactatccattg

SEQ ID NO: 302463 - DNA, 5788 bp, Homo sapiens
attaggcgttagagacctactcgatgtttcagggatagatagattaggcgtttagttcgacacacttcatgtttaaaaagcctcttctaggccgggtgcggtggctcatgcctgtaaagccagcactttgggaggctgaggcgggcggatcacgaggcaccacagtaccggcactgctgaacagtacttccaaccaactctacctgcatttccagtctgacattagtgtggcagctgctggtttccacctggaatacaaaactgtaggtcttgctgcatgccaagaaccagccctccccagcaacagcatcaaaatcggagatcggtacatggtgaacgacgtgctctccttccagtgcgagcccgggtacaccctgcagggccgttcccacatttcctgtatgccagggaccgttcgccgttggaactatccgtctcccctgtgcattgcaacctgtggagggacgctgagcaccttgggtggtgtgatcctgagccccggcttcccaggttcttaccccaacaacttagactgcacctggaggatctcattacccatcggctatggtgcacatattcagtttctgaatttttctaccgaagctaatcatgacttccttgaaattcaaaatggaccttaccacaccagccccatgattggacaatttagcggcacggatctccccgcggccctgctgagcacaacgcatgaaaccctcatccacttttatagtgaccattcgcaaaaccggcaaggatttaaacttgcttaccaagcctatgaattacagaactgtccagatccacccccatttcagaatgggtacatgatcaactcggattacagcgtggggcaatcagtatctttcgagtgttatcctgggtacattctaataggccatcctgtcctcacttgtcagcatgggatcaacagaaactggaactacccttttccaagatgtgatgccccttgtgggtacaacgtaacttctcagaacggcaccatctactcccctggctttcctgatgagtatccgatcctgaaggactgcatttggctcatcacggtgcctccagggcacggagtttacatcaacttcaccctgttacagacggaagctgtcaacgattacattgctgtttgggacggtcccgatcagaactcaccccagctgggagttttcagtggcaacacagccctcgaaacggcgtatagctccaccaaccaagtcctgctcaagttccacagcgacttttcaaatggaggcttctttgtcctcaatttccacgcatttcagctcaagaaatgtcaacctcccccagcggttccacaggcagaaatgcttactgaggatgatgatttcgaaataggagattttgtgaagtaccagtgccaccccgggtacaccttggtggggaccgacattctgacttgcaagctcagttcccagttgcagtttgagggttctctcccaacatgtgaagcacaatgcccagcaaatgaagtccggactggatcatcgggagtcattctcagtccagggtatccgggtaattattttaactcccagacttgctcttggagtattaaagtggaaccaaactacaacattaccatctttgtggacacatttcaaagtgaaaagcagtttgatgcactggaagtgtttgatggttcttctgggcaaagtcctctgctagtagtcttaagtgggaatcatactgaacaatcaaattttacaagcaggagtaatcagttatatctccgctggtccactgaccatgccaccagtaagaaaggattcaagattcgctatgcagcaccttactgcagtttgacccaccccctgaagaatgggggtattctaaacaggactgcaggagcggttggaagcaaagtgcattatttttgcaagcctggataccgaatggtcggccacagcaatgcaacctgtagacgaaacccacttggcatgtaccagtgggactccctcacgccactctgccaggctgtgtcctgtggaatcccagaatccccaggaaacggttcatttaccgggaacgagttcactttggacagtaaagtggtctatgaatgtcatgaaggcttcaagcttgaatccagccagcaagcaacagccgtgtgtcaagaagatgggctgtggagtaacaaggggaagccgcccatgtgtaagccggtcgcttgccccagcattgaagctcagctctcagaacatgtcatctggaggctggtttcaggatccttgaatgagtacggtgctcaagtattgctgagctgcagtcctggttactacttagaaggctggaggctcctgcggtgccaggccaatgggacgtggaacataggagatgagaggccaagctgtcgagctggccactgcggttccccagacccgattgtgaacggtcacattagtggagatggcttcagttacagagacacggtggtttaccagtgcaatcctggtttccggcttgtgggaacttccgtgaggatatgcctgcaagaccacaagtggtctggacaaacgcctgtctgtgtccccatcacatgtggtcaccctggaaaccctgcccacggattcactaatggcagtgagttcaacctgaatgatgtcgtgaatttcacctgcaacacgggctatttgctgcagggcgtgtctcgagcccagtgtcggagcaacggccagtggagtagccctctgcccacgtgtcgagtggtgaactgttctgatccaggctttgtggaaaatgccattcgtcacgggcaacagaacttccctgagagttttgagtatggaatgagtatcctgtaccattgcaagaagggatttcacttgctgggatcttcagccttgacctgtatggcaaatggcttatgggaccgatccctgcccaagtgtttggctatatcctgtggacacccaggggtccctgccaacgccgtcctcactggagagctgtttacctatggcgccgtcgtgcactactcctgcagagggagcgagagcctcataggcaacgacacgagagtgtgccaggaagacagtcactggagcggggcactgccccactgcacaggaaataatcctggattctgtggtgatccggggaccccagcacatgggtctcggcttggtgatgactttaagacaaagagtcttctccgcttctcctgtgaaatggggcaccagctgaggggctcccctgaacgcacgtgtttgctcaatgggtcatggtcaggactgcagccggtgtgtgaggccgtgtcctgtggcaaccctggcacacccaccaacggaatgattgtcagtagtgatggcattctgttctccagctcggtcatctatgcctgctgggaaggctacaagacctcagggctcatgacacggcattgcacagccaatgggacctggacaggcactgctcccgactgcacaattataagttgtggggatccaggcacactagcaaatggcatccagtttgggaccgacttcaccttcaacaagactgtgagctatcagtgtaacccaggctatgtcatggaagcagtcacatccgccactattcgctgtaccaaagacggcaggtggaatccgagcaaacctgtctgcaaagccgtgctgtgtcctcagccgccgccggtgcagaatggaacagtggagggaagtgatttccgctggggctccagcataagttacagctgcatggacggttaccagctctctcactccgccatcctctcctgtgaaggtcgcggggtgtggaaaggagagatcccccagtgtctccctgtgttctgcggagaccctggcatccccgcagaagggcgacttagtgggaaaagtttcacctataagtccgaagtcttcttccagtgcaaatctccatttatactcgtgggatcctccagaagagtctgccaagctgacggcacgtggagcggcatacaacccacctgcattgatcctgctcataacacctgcccagaccctggtacgccacactttggaatacagaatagctccagaggctatgaggttggaagcacggtttttttcaggtgcagaaaaggctaccatattcaaggttccacgactcgcacctgccttgccaatttaacatggagtgggatacagaccgaatgtatacctcatgcctgcagacagccagaaaccccggcacacgcggatgtgagagccatcgatcttcctactttcggctacaccttagtgtacacctgccatccaggctttttcctcgcagggggatctgagcacagaacatgtaaagcagacatgaaatggacaggaaagtcgcctgtgtgtaaaagtaaaggagtgagagaagttaatgaaacagttactaaaactccagttccttcagatgtctttttcgtcaattcactgtggaaggggtattatgaatatttagggaaaagacaacccgccactctaactgttgactggttcaatgcaacaagcagtaaggtgaatgccaccttcagcgaagcctcgccagtggagctgaagttgacaggcatttacaagaaggaggaggcccacttactcctgaaagcttttcaaattaaaggccaggcagatatttttgtaagcaagttcgaaaatgacaactggggactagatggttatgtgtcatctggacttgaaagaggaggatttacttttcaaggtgacattcatggaaaagactttggaaaatttaagctagaaaggcaagatcctttaaacccagatcaagactcttccagtcattaccacggcaccagcagtggctctgtggcggctgccattctggttcctttctttgctctaattttatcagggtttgcattttacctctacaaacacagaacgagaccaaaagttcaatacaatggctatgctgggcatgaaaacagcaatggacaagcatcgtttgaaaaccccatgtatgatacaaacttaaaacccacagaagccaaggctgtgaggtttgacacaactctgaacacagtctgtacagtggtatagccctcagtgccccaacaggactgattcatagccatacctctgatggacaagcagtgattcctttggtgccatataccactctcccttccactctggctttactgcagcgatcttcaaccttgtctactggcataagtgcagcggggatctctactcaaatgtgtcagggtcttctacggatcaaactacacatgcgttttcattccaaaagtgggttctaaatgcctggctgcatctgtatgaaatcaaggcacactccaggaagactgccgcgtcgcgccaacacgtcatactcaatgcctcagactttcatatttctgtgttgctgagatgcctttcaatgcaatcgtctgggctcgtggatatgtccctcaggtgcggtgacagaatggtggcaccacgatatgtgttctcttgtgttgtttttcctttttaaacccccatgaacacgaatactctgaaaaaaataaaaagctttctggaagaagacacctttctgatagaggctcacacctacaaatgcttcactctgtccttccgagacctgacaagctttgaggacctcacagctcccctgtgtgttcatctctagggatgtttgcaatttcccagtcagctgttctgtcgcagaatgtttaatgcacaattttttgcactagtgtgttatgaatgactaagattctgataaaaaaataaattatttacacagggtttatacacactatccattg

SEQ ID NO: 302464 - DNA, 7555 bp, Homo sapiens
ccttcctgcccggctcggccggcgctcgtccccggccccggccccgccagcccgggtctccgcgctcggagcagctcagccctgcagtggctcgggacccgatgctatgagagggaagcgagccgggcgcccagaccttcaggaggcgtcggatgcgcggcgggtcttgggaccgggctctctctccggctcgccttgccctcgggtgattatttggctccgctcatagccctgccttcctcggaggagccatcggtgtcgcgtgcgtgtggagtatctgcagacatgactgcgtggaggagattccagtcgctgctcctgcttctcgggctgctggtgctgtgcgcgaggctcctcactgcagcgaagggtcagaactgtggaggcttagtccagggtcccaatggcactattgagagcccagggtttcctcacgggtatccgaactatgccaactgcacctggatcatcatcacgggcgagcgcaataggatacagttgtccttccatacctttgctcttgaagaaaattttgatattttatcagtttacgatggacagcctcaacaagggaatttaaaagtgagattatcgggatttcagctgccctcctctatagtgagtacaggatctatcctcactctgtggttcacgacagacttcgctgtgagtgcccaaggtttcaaagcattatatgaagttttacctagccacacttgtggaaatcctggagaaatcctgaaaggagttctgcatggaacgagattcaacataggagacaaaatccggtacagctgcctccctggctacatcttggaaggccacgccatcctgacctgcatcgtcagcccaggaaatggtgcatcgtgggacttcccagctcccttttgcagagctgagggagcctgcggaggaaccttacgcgggaccagcagctccatctccagcccgcacttcccttcagagtacgagaacaacgcggactgcacctggaccattctggctgagcccggggacaccattgcgctggtcttcactgactttcagctagaagaaggatatgatttcttagagatcagtggcacggaagctccatccatatggctaactggcatgaacctcccctctccagttatcagtagcaagaattggctacgactccatttcacctctgacagcaaccaccgacgcaaaggatttaacgctcagttccaagtgaaaaaggcgattgagttgaagtcaagaggagtcaagatgctgcccagcaaggatggaagccataaaaactctgtcttgagccaaggaggtgttgcattggtctctcacatgtgtctagatcctgggattccagaaaatggtagaagagcaggttccgacttcagtagggttggtgcaaatgtacagttttcatgtgaggacaattacgtgctccagggatctaaaagcatcacctgtcagagagttacagagacgctcgctgcttggagtgaccacaggcccatctgccgagcgagaacatgtggatccaatctgcgtgggcccagcggcgtcattacctcccctaattatccggttcagtatgaagataatgcacactgtgtgtgggtcatcaccaccaccgacccggacaaggtcatcaagcttgcctttgaagagtttgagctggagcgaggctatgacaccctgacggttggtgatgctgggaaggtgggagacaccagatcggtcttgtacgtgctcacgggatccagtgttcctgacctcattgtgagcatgagcaaccagatgtggctacatctgcagtcggatgatagcattggctcacctgggtttaaagctgtttaccaagaaattgaaaagggagggtgtggggatcctggaatccccgcctatgggaagcggacgggcagcagtttcctccatggagatacactcacctttgaatgcccggcggcctttgagctggtgggggagagagttatcacctgtcagcagaacaatcagtggtctggcaacaagcccagctgtgtattttcatgtttcttcaactttacggcatcatctgggattattctgtcaccaaattatccagaggaatatgggaacaacatgaactgtgtctggttgattatctcggagccaggaagtcgaattcacctaatctttaatgattttgatgttgagcctcaatttgactttctcgcggtcaaggataatggcatttctgacataactgtcctgggtactttttctggcaatgaagtgccttcccagctggccagcagtgggcatatagttcgcttggaatttcagtctgaccattccactactggcagagggttcaacatcacttacaccacatttggtcagaatgagtgccatgatcctggcattcctataaacggacgacgttttggtgacaggtttctactcgggagctcggtttctttccactgtgatgatggctttgtcaagacccagggatccgagtccattacctgcatactgcaagacgggaacgtggtctggagctccaccgtgccccgctgtgaagctccatgtggtggacatctgacagcgtccagcggagtcattttgcctcctggatggccaggatattataaggattctttacattgtgaatggataattgaagcaaaaccaggccactctatcaaaatgacttttgacagatttcagacagaggtcaattatgacaccttggaggtcagagatgggccagccagttcgtccccactgatcggcgagtaccacggcacccaggcaccccagttcctcatcagcaccgggaacttcatgtacctgctgttcaccactgacaacagccgctccagcatcggcttcctcatccactatgagagtgtgacgcttgagtcggattcctgcctggacccgggcatccctgtgaacggccatcgccacggtggagactttggcatcaggtccacagtgactttcagctgtgacccggggtacacactaagtgacgacgagcccctcgtctgtgagaggaaccaccagtggaaccacgccttgcccagctgcgacgctctatgtggaggctacatccaagggaagagtggaacagtcctttctcctgggtttccagatttttatccaaactctctaaactgcacgtggaccattgaagtgtctcatgggaaaggagttcaaatgatctttcacacctttcatcttgagagttcccacgactatttactgatcacagaggatggaagtttttccgagcccgttgccaggctcaccgggtcggtgttgcctcatacgatcaaggcaggcctgtttggaaacttcactgcccagcttcggtttatatcagacttctcaatttcgtacgagggcttcaatatcacattttcagaatatgacctggagccatgtgatgatcctggagtccctgccttcagccgaagaattggttttcactttggtgtgggagactctctgacgttttcctgcttcctgggatatcgtttagaaggtgccaccaagcttacctgcctgggtgggggccgccgtgtgtggagtgcacctctgccaaggtgtgtggccgaatgtggagcaagtgtcaaaggaaatgaaggaacattactgtctccaaattttccatccaattatgataatacccatgagtgtatctataaaatagaaacagaagccggcaagggcatccaccttagaacacgaagcttccagctgtttgaaggagatactctaaaggtatatgatggaaaagacagttcctcacgtccactgggcacgttcactaaaaatgaacttctggggctgatcctaaacagcacatccaatcacctatggctagagttcaacaccaatggatctgacaccgaccaaggttttcaactcacctataccagttttgatctggtaaaatgtgaggatccgggcatccctaactacggctataggatccgtgatgaaggccactttaccgacactgtagttctgtacagttgcaacccggggtacgccatgcatggcagcaacaccctgacctgtttgagtggagacaggagagtgtgggacaaaccactaccttcgtgcatagcggaatgtggtggtcagatccatgcagccacatcaggacgaatattgtcccctggctatccagctccgtatgacaacaacctccactgcacctggattatagaggcagacccaggaaagaccattagcctccatttcattgttttcgacacggagatggctcacgacatcctcaaggtctgggacgggccggtggacagtgacatcctgctgaaggagtggagtggctccgcccttccggaggacatccacagcaccttcaactcactcaccctgcagttcgacagcgacttcttcatcagcaagtctggcttctccatccagttctccacctcaattgcagccacctgtaacgatccaggtatgccccaaaatggcacccgctatggagacagcagagaggctggagacaccgtcacattccagtgtgaccctggctatcagctccaaggacaagccaaaatcacctgtgtgcagctgaataaccggttcttttggcaaccagaccctcctacatgcatagctgcttgtggagggaatctgacgggcccagcaggtgttattttgtcacccaactacccacagccgtatcctcctgggaaggaatgtgactggagagtaaaagtgaacccggactttgtcatcgccttgatattcaaaagtttcaacatggagcccagctatgacttcctacacatctatgaaggggaagattccaacagccccctcattgggagttaccagggctctcaggccccagaaagaatagagagtagcggaaacagcctgtttctggcatttcggagtgatgcctccgtgggcctttcagggttcgccattgaatttaaagagaaaccacgggaagcttgttttgacccaggaaatataatgaatgggacaagagttggaacagacttcaagcttggctccaccatcacctaccagtgtgactctggctataagattcttgacccctcatccatcacctgtgtgattggggctgatgggaaaccctcctgggaccaagtgctgccctcctgcaatgctccctgtggaggccagtacacgggatcagaaggggtagttttatcaccaaactacccccataattacacagctggtcaaatatgcctctattccatcacggtaccaaaggaattcgtggtctttggacagtttgcctatttccagacagccctgaatgatttggcagaattatttgatggaacccatgcacaggccagacttctcagctcactctcggggtctcactcaggggaaacattgcccttggctacgtcaaatcaaattctgctccgattcagtgcaaagagcggtgcctctgcccgcggcttccacttcgtgtatcaagctgttcctcgtaccagtgacacccaatgcagctctgtccccgagcccagatacggaaggagaattggttctgagttttctgccggctccatcgtccgattcgagtgcaacccgggatacctgcttcagggttccacggcgctccactgccagtccgtgcccaacgccttggcacagtggaacgacacgatccccagctgtgtggtaccctgcagtggcaatttcactcaacgaagaggtacaatcctgtcccccggctaccctgagccatacggaaacaacttgaactgtatatggaagatcatagttacggagggctcgggaattcaagatccaagtgatcagttttgccacggagcagaactgggacttccctttgagatccacgatggtggggatgtgaccgcacccagactgggaagcttctcaggcaccacagtaccggcactgctgaacagtacttccaaccaactctacctgcatttccagtctgacattagtgtggcagctgctggtttccacctggaatacaaaactgtaggtcttgctgcatgccaagaaccagccctccccagcaacagcatcaaaatcggagatcggtacatggtgaacgacgtgctctccttccagtgcgagcccgggtacaccctgcagggccgttcccacatttcctgtatgccagggaccgttcgccgttggaactatccgtctcccctgtgcattgcaacctgtggagggacgctgagcaccttgggtggtgtgatcctgagccccggcttcccaggttcttaccccaacaacttagactgcacctggaggatctcattacccatcggctatggtgcacatattcagtttctgaatttttctaccgaagctaatcatgacttccttgaaattcaaaatggaccttaccacaccagccccatgattggacaatttagcggcacggatctccccgcggccctgctgagcacaacgcatgaaaccctcatccacttttatagtgaccattcgcaaaaccggcaaggatttaaacttgcttaccaagcctatgaattacagaactgtccagatccacccccatttcagaatgggtacatgatcaactcggattacagcgtggggcaatcagtatctttcgagtgttatcctgggtacattctaataggccatcctgtcctcacttgtcagcatgggatcaacagaaactggaactacccttttccaagatgtgatgccccttgtgggtacaacgtaacttctcagaacggcaccatctactcccctggctttcctgatgagtatccgatcctgaaggactgcatttggctcatcacggtgcctccagggcacggagtttacatcaacttcaccctgttacagacggaagctgtcaacgattacattgctgtttgggacggtcccgatcagaactcaccccagctgggagttttcagtggcaacacagccctcgaaacggcgtatagctccaccaaccaagtcctgctcaagttccacagcgacttttcaaatggaggcttctttgtcctcaatttccacgcatttcagctcaagaaatgtcaacctcccccagcggttccacaggcagaaatgcttactgaggatgatgatttcgaaataggagattttgtgaagtaccagtgccaccccgggtacaccttggtggggaccgacattctgacttgcaagctcagttcccagttgcagtttgagggttctctcccaacatgtgaagcacaatgcccagcaaatgaagtccggactggatcatcgggagtcattctcagtccagggtatccgggtaattattttaactcccagacttgctcttggagtattaaagtggaaccaaactacaacattaccatctttgtggacacatttcaaagtgaaaagcagtttgatgcactggaagtgtttgatggtaagtttctttaatctttgtagagcagtgacctcggcatcattgataaaaacactattacaatgttttagtaacataaagactggaatatattcttgagttaacttatgttttcccaaagcaaac

SEQ ID NO: 302465 - DNA, 1546 bp, Homo sapiens
ccttcctgcccggctcggccggcgctcgtccccggccccggccccgccagcccgggtctccgcgctcggagcagctcagccctgcagtggctcgggacccgatgctatgagagggaagcgagccgggcgcccagaccttcaggaggcgtcggatgcgcggcgggtcttgggaccgggctctctctccggctcgccttgccctcgggtgattatttggctccgctcatagccctgccttcctcggaggagccatcggtgtcgcgtgcgtgtggagtatctgcagacatgactgcgtggaggagattccagtcgctgctcctgcttctcgggctgctggtgctgtgcgcgaggctcctcactgcagcgaagggtcagaactgtggaggcttagtccagggtcccaatggcactattgagagcccagggtttcctcacgggtatccgaactatgccaactgcacctggatcatcatcacgggcgagcgcaataggatacagttgtccttccatacctttgctcttgaagaaaattttgatattttatcagtttacgatggacagcctcaacaagggaatttaaaagtgagattatcgggatttcagctgccctcctctatagtgagtacaggatctatcctcactctgtggttcacgacagacttcgctgtgagtgcccaaggtttcaaagcattatatgaagttttacctagccacacttgtggaaatcctggagaaatcctgaaaggagttctgcatggaacgagattcaacataggagacaaaatccggtacagctgcctccctggctacatcttggaaggccacgccatcctgacctgcatcgtcagcccaggaaatggtgcatcgtgggacttcccagctcccttttgcagagctgagggagcctgcggaggaaccttacgcgggaccagcagctccatctccagcccgcacttcccttcagagtacgagaacaacgcggactgcacctggaccattctggctgagcccggggacaccattgcgctggtcttcactgactttcagctagaagaaggatatgatttcttagagatcagtggcacggaagctccatccatatggctaactggcatgaacctcccctctccagttatcagtagcaagaattggctacgactccatttcacctctgacagcaaccaccgacgcaaaggatttaacgctcagttccaagtgaaaaaggcgattgagttgaagtcaagaggagtcaagatgctgcccagcaaggatggaagccataaaaactctgtctggcatcagcaagagttcagcaagtgcaggaagaaaaagagagagatcatgacaaggaatgggagaatttccctgacagcctcaggaaacttgcagtttgataattaaacagatcaagctcactcagatgagctgatgggacatgctgtgtacggaggagcatttgcagttacaacactttgtagccatgcaggatggggcaattaatccagaaccattatttaataaaaagatgattttttaaatgtggaaa

SEQ ID NO: 302466 - DNA, 405 bp, Homo sapiens
aatttctctgattctttccttttccctgtttattagttataagttgtggggatccaggcacactagcaaatggcatccagtttgggaccgacttcaccttcaacaagactgtgagctatcagtgtaacccaggctatgtcatggaagcagtcacatccgccactattcgctgtaccaaagacggcaggtggaatccgagcaaacctgtctgcaaaggtttgtttggtgactctttggattttacagatgtgtatagaagtctttattgaattatgctttgtttaattttgcaagcatttatgtagcccttctaggggctaggaattcttgaacagcaatttgcaactattaagtcactttatttttataatactttaatctcagttttacagatggaaaaactaa

SEQ ID NO: 302467 - DNA, 281 bp, Homo sapiens
tgctttttcctttcattgacttgtttatacagggatagaaactatcctattgcagttggaatcattttattaaagcaaacttttgctggtacttttctctccagcacaatgcccagcaaatgaagtccggactggatcatcgggagtcattctcagtccagggtatccgggtaattattttaactcccagacttgctcttggagtattaaagtggaaccaaactacaacattaccatctttgtggacacatttcaaagtgaaaagcagtttgatgcactgg

SEQ ID NO: 302468 - DNA, 1810 bp, Homo sapiens
agcggaaacgcagttccggttaggcggctgagtttgtttacgttgctaacagatctagcccctgctttccctagttccagttccaagatggggaaatccttcgccaacttcatgtgcaagaaagactttcatcctgcctccaaatccaatatcaaaaaagtatggatggcagaacagaaaatatcatatgataagaagaaacaagaagaattgatgcagcaatatcttaaagaacaagaatcatatgataatagattgcttatgggagatgaacgtgtaaagaatggccttaatttcatgtatgaagccccaccaggagctaaaaaagaaaacaaagagaaagaagaaacagaaggagagaccgaatacaaatttgaatggcagaaaggagccccacgagaaaaatatgccaaagatgacatgaacatcagagatcagccctttggtattcaggttcgaaatgtgaggtgcattaaatgtcacaaatggggtcatgtcaacacagatcgagaatgtcctttgtttggtctttctggaatcaatgcaagttcggttcccactgatggctcagatgctgtgttacaaattgaaggtttctgggccatcgatgcacccctcggagctaatagcggagatgagaaacagtgggtttgcactgaaacgaaatgtactggggagaaacttgaccgcaaatgatccatcacaggagtatgttgcaagtgagggtgaagaagatccagaagttgaatttttaaagtcactaacaaccaaacaaaaacagaaacttctcaggaaattagatcgactggagaagaaaaaaaagaaaaaagatagaaaaaagaaaaagtttcagaagagcagaagtaaacacaaaaaacataagtcctcttcttcctcatcttcctcctcctcctcctcttcctctactgagacttcagaaagcagtagtgagagtgagagtaacaataaagaaaaaaaaatacaaaggaagaaaagaaagaaaaacaagtgttcagggcataacaacagtgattctgaagagaaggacaagtctaagaagagaaagcttcatgaagaactttctagcagtcaccataaccgggaaaaagccaaggaaaagcccaggttcttaaaacacgagagttctagggaggacagcaaatggagccattctgattctgacaaaaagtccagaacccataaacatagcccagagaagagaggctctgaaagaaaggaggggagcagcagaagccacggcagggaggaaaggagccggagaagccggagcagaagtcctggtagttacaagcaaagggagacaaggaaacgggcacagcgaaatcctggtgaagagcaaagcagaagaaatgacagcagaagccatggcacagacttgtatagaggagaaaaaatgtacagagagcacccaggaggtacacatactaaagtgacacaaagagaatgaagcagaagtagagaagaaagactgtatgtgacaattacctgggaataaaaatatctccacttttttattgaatacctttagcaaggggtaaattatgtactgttgtctttctaataaaaaagctcaattttaatttttcatctctagactgtcaattcaagtacaaaactacatgagtactatgagaatgaattttgcaaatatttgtaagtaagctattttggggctgtggaaatattttctgttggtaactgtttcttgttccccataccagataaaaaccgcatataactctgtgacattttctttgttctgaaacatcattaaaagaatgacagtaca

SEQ ID NO: 302469 - DNA, 804 bp, Homo sapiens
agcggaaacgcagttccggttaggcggctgagtttgtttacgttgctaacagatctagcccctgctttccctagttccagttccaagatggggaaatccttcgccaacttcatgtgcaagaaagactttcatcctgcctccaaatccaatatcaaaaaagtatggatggcagaacagaaaatatcatatgataagaagaaacaagaagaattgatgcagcaatatcttaaagaacaagaatcatatgataatagattgcttatgggagatgaacgtgtaaagaatggccttaatttcatgtatgaagccccaccaggagctaaaaaagaaaacaaagagaaagaagaaacagaaggagagaccgaatacaaatttgaatggcagaaaggagccccacgagaaaaatatgccaaagatgacatgaacatcagagatcagccctttggtattcaggttcgaaatgtgaggtgcattaaatgtcacaaatggggtcatgtcaacacagatcgagaatgtcctttgtttggtctttctggaatcaatgcaagttcggttcccactgatggctcaggtaggcactagacatgatttgtttcgggagaggacaaacaaggaaagataaaacaacatttttctttactctttctgggtattgtttaattgggtttgtgtgtggggcttgttgttgtttttgactaagaccattcccaaaatatgattaatgggaaactctgatcatatatgttgaattaaaatgctgtgtaataggattaagtttaatttttccagccaaaggccctatga

SEQ ID NO: 302470 - DNA, 1782 bp, Homo sapiens
agcggaaacgcagttccggttaggcggctgagtttgtttacgttgctaacagatctagcccctgctttccctagttccagttccaagatggggaaatccttcgccaacttcatgtgcaagaaagactttcatcctgcctccaaatccaatatcaaaaaagtatggatggcagaacagaaaatatcatatgataagaagaaacaagaagaattgatgcagcaatatcttaaagaacaagaatcatatgataatagattgcttatgggagatgaacgtgtaaagaatggccttaatttcatgtatgaagccccaccaggagctaaaaaagaaaacaaagagaaagaagaaacagaaggagagaccgaatacaaatttgaatggcagaaaggagccccacgagaaaaatatgccaaagatgacatgaacatcagagatcagccctttggtattcaggttcgaaatgtgaggtgcattaaatgtcacaaatggggtcatgtcaacacagatcgagaatgtcctttgtttggtctttctggaatcaatgcaagttcggttcccactgatggctcagggccatcgatgcacccctcggagctaatagcggagatgagaaacagtgggtttgcactgaaacgaaatgtactggggagaaacttgaccgcaaatgatccatcacaggagtatgttgcaagtgagggtgaagaagatccagaagttgaatttttaaagtcactaacaaccaaacaaaaacagaaacttctcaggaaattagatcgactggagaagaaaaaaaagaaaaaagatagaaaaaagaaaaagtttcagaagagcagaagtaaacacaaaaaacataagtcctcttcttcctcatcttcctcctcctcctcctcttcctctactgagacttcagaaagcagtagtgagagtgagagtaacaataaagaaaaaaaaatacaaaggaagaaaagaaagaaaaacaagtgttcagggcataacaacagtgattctgaagagaaggacaagtctaagaagagaaagcttcatgaagaactttctagcagtcaccataaccgggaaaaagccaaggaaaagcccaggttcttaaaacacgagagttctagggaggacagcaaatggagccattctgattctgacaaaaagtccagaacccataaacatagcccagagaagagaggctctgaaagaaaggaggggagcagcagaagccacggcagggaggaaaggagccggagaagccggagcagaagtcctggtagttacaagcaaagggagacaaggaaacgggcacagcgaaatcctggtgaagagcaaagcagaagaaatgacagcagaagccatggcacagacttgtatagaggagaaaaaatgtacagagagcacccaggaggtacacatactaaagtgacacaaagagaatgaagcagaagtagagaagaaagactgtatgtgacaattacctgggaataaaaatatctccacttttttattgaatacctttagcaaggggtaaattatgtactgttgtctttctaataaaaaagctcaattttaatttttcatctctagactgtcaattcaagtacaaaactacatgagtactatgagaatgaattttgcaaatatttgtaagtaagctattttggggctgtggaaatattttctgttggtaactgtttcttgttccccataccagataaaaaccgcatataactctgtgacattttctttgttctgaaacatcattaaaagaatgacagtaca

SEQ ID NO: 302471 - DNA, 1916 bp, Homo sapiens
agcggaaacgcagttccggttaggcggctgagtttgtttacgttgctaacagatctagcccctgctttccctagttccagttccaagatggggaaatccttcgccaacttcatgtgcaagaaagactttcatcctgcctccaaatccaatatcaaaaaagtatggatggcagaacagaaaatatcatatgataagaagaaacaagaagaattgatgcagcaatatcttaaagaacaagaatcatatgataatagattgcttatgggagatgaacgtgtaaagaatggccttaatttcatgtatgaagccccaccaggagctaaaaaagaaaacaaagagaaagaagaaacagaaggagagaccgaatacaaatttgaatggcagaaaggagccccacgagaaaaatatgccaaagatgacatgaacatcagagatcagccctttggtattcaggttcgaaatgtgaggtgcattaaatgtcacaaatggggtcatgtcaacacagatcgagaatgtcctttgtttggtctttctggaatcaatgcaagttcggttcccactgatggctcagggccatcgatgcacccctcggagctaatagcggagatgagaaacagtgggtttgcactgaaacgaaatgtactggggagaaacttgaccgcaaatgatccatcacaggagtatgttgcaagtgagggtgaagaagatccagaagttgaatttttaaagtcactaacaaccaaacaaaaacagaaacttctcaggaaattagatcgactggagaagaaaaaaaagaaaaaagatagaaaaaagaaaaagtttcagaagagcagaagtaaacacaaaaaacataagtcctcttcttcctcatcttcctcctcctcctcctcttcctctactgagacttcagaaagcagtagtgagagtgagagtaacaataaagaaaaaaaaatacaaaggaagaaaagaaagaaaaacaagtgttcagggcataacaacagtgattctgaagagaaggacaagtctaagaagagaaagcttcatgaagaactttctagcagtcaccataaccgggaaaaagccaaggaaaagcccaggttcttaaaacacgagagttctagggaggacagcaaatggagccattctgattctgacaaaaagtccagaacccataaacatagcccagagaagagaggctctgaaagaaaggaggggagcagcagaagccacggcagggaggaaaggagccggagaagccggagcagaagtcctggtagttacaagcaaagggagacaaggaaacgggcacagcgaaatcctggtgaagagcaaagcagaagaaatgacagcagaagccatggcacagacttgtatagaggagaaaaaatgtacagagagcacccaggaggtacacatactaaagtgacacaaagagaatgaagcagaagtagagaagaaagactgtatgtgacaattacctgggaataaaaatatctccacttttttattgaatacctttagcaaggggtaaattatgtactgttgtctttctaataaaaaagctcaattttaatttttcatctctagactgtcaattcaagtacaaaactacatgagtactatgagaatgaattttgcaaatatttgtaagtaagctattttggggctgtggaaatattttctgttggtaactgtttcttgttccccataccagataaaaaccgcatataactctgtgacattttctttgttctgaaacatcattaaaagaatgacagtacattgaatgggtataatttacttttttcaattcaaatttgttattctaggatttgaatttgcttgaagtgaattgtaataattattcaaattcattagtataaattaaggattaataaatctttaagacttttaag

SEQ ID NO: 302472 - DNA, 1980 bp, Homo sapiens
agcggaaacgcagttccggttaggcggctgagtttgtttacgttgctaacagatctagcccctgctttccctagttccagttccaagatggggaaatccttcgccaacttcatgtgcaagaaagactttcatcctgcctccaaatccaatatcaaaaaagtatggatggcagaacagaaaatatcatatgataagaagaaacaagaagaattgatgcagcaatatcttaaagaacaagaatcatatgataatagattgcttatgggagatgaacgtgtaaagaatggccttaatttcatgtatgaagccccaccaggagctaaaaaagaaaacaaagagaaagaagaaacagaaggagagaccgaatacaaatttgaatggcagaaaggagccccacgagaaaaatatgccaaagatgacatgaacatcagagatcagccctttggtattcaggttcgaaatgtgaggtgcattaaatgtcacaaatggggtcatgtcaacacagatcgagaatgtcctttgtttggtctttctggaatcaatgcaagttcggttcccactgatggctcagggccatcgatgcacccctcggagctaatagcggagatgagaaacagtgggtttgcactgaaacgaaatgtactggggagaaacttgaccgcaaatgatccatcacaggagtatgttgcaagtgagggtgaagaagatccagaagttgaatttttaaagtcactaacaaccaaacaaaaacagaaacttctcaggaaattagatcgactggagaagaaaaaaaagaaaaaagatagaaaaaagaaaaagtttcagaagagcagaagtaaacacaaaaaacataagtcctcttcttcctcatcttcctcctcctcctcctcttcctctactgagacttcagaaagcagtagtgagagtgagagtaacaataaagaaaaaaaaatacaaaggaagaaaagaaagaaaaacaagtgttcagggcataacaacagtgattctgaagagaaggacaagtctaagaagagaaagcttcatgaagaactttctagcagtcaccataaccgggaaaaagccaaggaaaagcccaggttcttaaaacacgagagttctagggaggacagcaaatggagccattctgattctgacaaaaagtccagaacccataaacatagcccagagaagagaggctctgaaagaaaggaggggagcagcagaagccacggcagggaggaaaggagccggagaagccggagcagaagtcctggtagttacaagcaaagggagacaaggaaacgggcacagcgaaatcctggtgaagagcaaagcagaagaaatgacagcagaagccatggcacagacttgtatagaggagaaaaaatgtacagagagcacccaggaggtacacatactaaagtgacacaaagagaatgaagcagaagtagagaagaaagactgtatgtgacaattacctgggaataaaaatatctccacttttttattgaatacctttagcaaggggtaaattatgtactgttgtctttctaataaaaaagctcaattttaaaaaaaaaaaaaaaaaaaaaaaaaaaaaaaaaaaaaaaaaaaaaaaaaaaaaaaaaaaaaaaaaaaaaaaaaaaaaaaaaaaaaaaaaaagaaaaggaacaaagaagaagaaaaatagactataaaggggaccgacaaatattggtaccaacagataaacattatctacttgtaacagcgccgggccctctaattagagcagggacggtaatataatattaaccacaagacactactactcaagtaaaataataatatacgagcagagttgtcaggacgtagctatgaggtgcagcagcgacattctcctacgaaaaaggatcatacttctatctgttgtggtccacgtaaaagctactgatgcaaaactcacagtacagagttacataactccgccatcagcgagtt

SEQ ID NO: 302473 - DNA, 1688 bp, Homo sapiens
ctactactactaaattcgcggccgcgtcgacctttcatcctgcctccaaatccaatatcaaaaaagtatggatggcagaacagaaaatatcatatgataagaagaaacaagaagaattgatgcagcaatatcttaaagaacaagaatcatatgataatagattgcttatgggagatgaacgtgtaaagaatggccttaatttcatgtatgaagccccaccaggagctaaaaaagaaaacaaagagaaagaagaaacagaaggagagaccgaatacaaatttgaatggcagaaaggagccccacgagaaaaatatgccaaagatgacatgaacatcagagatcagccctttggtattcaggttcgaaatgtgaggtgcattaaatgtcacaaatggggtcatgtcaacacagatcgagaatgtcctttgtttggtctttctggaatcaatgcaagttcggttcccactgatggctcagggccatcgatgcacccctcggagctaatagcggagatgagaaacagtgggtttgcactgaaacgaaatgtactggggagaaacttgaccgcaaatgatccatcacaggagtatgttgcaagtgagggtgaagaagatccagaagttgaatttttaaagtcactaacaaccaaacaaaaacagaaacttctcaggaaattagatcgactggagaagaaaaaaaagaaaaaagatagaaaaaagaaaaagtttcagaagagcagaagtaaacacaaaaaacataagtcctcttcttcctcatcttcctcctcctcctcctcttcctctactgagacttcagaaagcagtagtgagagtgagagtaacaataaagaaaaaaaaatacaaaggaagaaaagaaagaaaaacaagtgttcagggcataacaacagtgattctgaagagaaggacaagtctaagaagagaaagcttcatgaagaactttctagcagtcaccataaccgggaaaaagccaaggaaaagcccaggttcttaaaacacgagagttctagggaggacagcaaatggagccattctgattctgacaaaaagtccagaacccataaacatagcccagagaagagaggctctgaaagaaaggaggggagcagcagaagccacggcagggaggaaaggagccggagaagccggagcagaagtcctggtagttacaagcaaagggagacaaggaaacgggcacagcgaaatcctggtgaagagcaaagcagaagaaatgacagcagaagccatggcacagacttgtatagaggagaaaaaatgtacagagagcacccaggaggtacacatactaaagtgacacaaagagaatgaagcagaagtagagaagaaagactgtatgtgacaattacctgggaataaaaatatctccacttttttattgaatacctttagcaaggggtaaattatgtactgttgtctttctaataaaaaagctcaattttaatttttcatctctagactgtcaattcaagtacaaaactacatgagtactatgagaatgaattttgcaaatatttgtaagtaagctattttggggctgtggaaatattttctgttggtaactgtttcttgttccccataccagataaaaaccgcatataactctgtgacattttctttgttctgaaacatcattaaaagaatgacagtaca

SEQ ID NO: 302474 - DNA, 1419 bp, Homo sapiens
  misc_feature (1300)..(1300): n is a, c, g, or t
  misc_feature (1303)..(1303): n is a, c, g, or t
  misc_feature (1306)..(1306): n is a, c, g, or t
  misc_feature (1317)..(1317): n is a, c, g, or t
  misc_feature (1319)..(1320): n is a, c, g, or t
  misc_feature (1324)..(1328): n is a, c, g, or t
  misc_feature (1339)..(1339): n is a, c, g, or t
  misc_feature (1341)..(1341): n is a, c, g, or t
  misc_feature (1344)..(1344): n is a, c, g, or t
  misc_feature (1347)..(1349): n is a, c, g, or t
  misc_feature (1359)..(1359): n is a, c, g, or t
  misc_feature (1415)..(1415): n is a, c, g, or t
agcggaaacgcagttccggttaggcggctgagtttgtttacgttgctaacagatctagcccctgctttccctagttccagttccaagatggggaaatccttcgccaacttcatgtgcaagaaagactttcatcctgcctccaaatccaatatcaaaaaagtatggatggcagaacagaaaatatcatatgataagaagaaacaagaagaattgatgcagcaatatcttaaagaacaagaatcatatgataatagattgcttatgggagatgaacgtgtaaagaatggccttaatttcatgtatgaagccccaccaggagctaaaaaagaaaacaaagagaaagaagaaacagaaggagagaccgaatacaaatttgaatggcagaaaggagccccacgagaaaaatatgccaaagatgacatgaacatcagagatcagccctttggtattcaggttcgaaatgtgaggtgcattaaatgtcacaaatggggtcatgtcaacacagatcgagaatgtcctttgtttggtctttctggaatcaatgcaagttcggttcccactgatggctcagggccatcgatgcacccctcggagctaatagcggagatgagaaacagtgggtttgcactgaaacgaaatgtactggggagaaacttgaccgcaaatgatccatcacaggagtatgttgcaagtgagggtgaagaagatccagaagttgaatttttaaagtcactaacaaccaaacaaaaacagaaacttctcaggaaattagatcgactggagaagaaaaaaaagaaaaaagatagaaaaaagaaaaagtttcagaagagcagaagtaaacacaaaaaacataagtcctcttcttcctcatcttcctcctcctcctcctcttcctctactgagacttcagaaagcagtagtgagagtgagagtaacaataaagaaaaaaaaatacaaaggaagaaaagaaagaaaaacaagtgttcagggcataacaacagtgattctgaagagaaggacaagtctaagaagagaaagcttcatgaagaactttctagcagtcaccataaccgggaaaaagccaaggaaaagcccaggttcttaaaacacgagagttctagggaggacagcaaatggagccattctgattctgacaaaaagtccagaacccataaacatagcccagagaagagaggctctgaaagaaaggaggggagcagcagaagccacggcagggaggaaaggagccggagaagccggagcagaagtcctggtagttacaagcacccgccccacaagnacnccngcgcacagcgncnncctnnnnnctcgctacgcngncgntcnnnccgcatccanccatcgcactatgacttgtttcagaggatgaaaaatatgtacatagagcacccacnaggt

SEQ ID NO: 302475 - DNA, 1698 bp, Homo sapiens
  misc_feature (101)..(101): n is a, c, g, or t
  misc_feature (110)..(110): n is a, c, g, or t
aggagaaccagaaggttcagtaaaagaaatcaagcatagtcctggccccacgagaacagtctccactggcacggcattgtctaaatataggagcagatctncagatgggncccagaattacttcgaacatgaggagttaactgtgagccagctcctgctgtgcctaagggaagggaatcagaaggtggagagacttgaagttgcactcaaggaggcccaagaaagagtttcagattttgaaaagaaaaccaagagaaagaagaaacagaaggagagaccgaatacaaatttgaatggcagaaaggagccccacgagaaaaatatgccaaagatgacatgaacatcagagatcagccctttggtattcaggttcgaaatgtgaggtgcattaaatgtcacaaatggggtcatgtcaacacagatcgagaatgtcctttgtttggtctttctggaatcaatgcaagttcggttcccactgatggctcagggccatcgatgcacccctcggagctaatagcggagatgagaaacagtgggtttgcactgaaacgaaatgtactggggagaaacttgaccgcaaatgatccatcacaggagtatgttgcaagtgagggtgaagaagatccagaagttgaatttttaaagtcactaacaaccaaacaaaaacagaaacttctcaggaaattagatcgactggagaagaaaaaaaagaaaaaagatagaaaaaagaaaaagtttcagaagagcagaagtaaacacaaaaaacataagtcctcttcttcctcatcttcctcctcctcctcctcttcctctactgagacttcagaaagcagtagtgagagtgagagtaacaataaagaaaaaaaaatacaaaggaagaaaagaaagaaaaacaagtgttcagggcataacaacagtgattctgaagagaaggacaagtctaagaagagaaagcttcatgaagaactttctagcagtcaccataaccgggaaaaagccaaggaaaagcccaggttcttaaaacacgagagttctagggaggacagcaaatggagccattctgattctgacaaaaagtccagaacccataaacatagcccagagaagagaggctctgaaagaaaggaggggagcagcagaagccacggcagggaggaaaggagccggagaagccggagcagaagtcctggtagttacaagcaaagggagacaaggaaacgggcacagcgaaatcctggtgaagagcaaagcagaagaaatgacagcagaagccatggcacagacttgtatagaggagaaaaaatgtacagagagcacccaggaggtacacatactaaagtgacacaaagagaatgaagcagaagtagagaagaaagactgtatgtgacaattacctgggaataaaaatatctccacttttttattgaatacctttagcaaggggtaaattatgtactgttgtctttctaataaaaaagctcaattttaatttttcatctctagactgtcaattcaagtacaaaactacatgagtactatgagaatgaattttgcaaatatttgtaagtaagctattttggggctgtggaaatattttctgttggtaactgtttcttgttccccataccagataaaaaccgcatataactctgtgacattttctttgttctgaaacatcattaaaagaatgacagtaca

SEQ ID NO: 302476 - DNA, 1449 bp, Homo sapiens
gacaaagttacataagaagactccccttgcacgtaaagaaaaatgcaattattttctattctgaatctccagactgctgttttagaaaatcatatctgattatttgctcagcagaagattattgagttgatttagctgtgattttacttaacaaagcttcaactgcattcctactgtggagtccgaaaaaggtagagagatataaatgatacattcaaactgtgatttttgtgaacagggccatcgatgcacccctcggagctaatagcggagatgagaaacagtgggtttgcactgaaacgaaatgtactggggagaaacttgaccgcaaatgatccatcacaggagtatgttgcaagtgagggtgaagaagatccagaagttgaatttttaaagtcactaacaaccaaacaaaaacagaaacttctcaggaaattagatcgactggagaagaaaaaaaagaaaaaagatagaaaaaagaaaaagtttcagaagagcagaagtaaacacaaaaaacataagtcctcttcttcctcatcttcctcctcctcctcctcttcctctactgagacttcagaaagcagtagtgagagtgagagtaacaataaagaaaaaaaaatacaaaggaagaaaagaaagaaaaacaagtgttcagggcataacaacagtgattctgaagagaaggacaagtctaagaagagaaagcttcatgaagaactttctagcagtcaccataaccgggaaaaagccaaggaaaagcccaggttcttaaaacacgagagttctagggaggacagcaaatggagccattctgattctgacaaaaagtccagaacccataaacatagcccagagaagagaggctctgaaagaaaggaggggagcagcagaagccacggcagggaggaaaggagccggagaagccggagcagaagtcctggtagttacaagcaaagggagacaaggaaacgggcacagcgaaatcctggtgaagagcaaagcagaagaaatgacagcagaagccatggcacagacttgtatagaggagaaaaaatgtacagagagcacccaggaggtacacatactaaagtgacacaaagagaatgaagcagaagtagagaagaaagactgtatgtgacaattacctgggaataaaaatatctccacttttttattgaatacctttagcaaggggtaaattatgtactgttgtctttctaataaaaaagctcaattttaatttttcatctctagactgtcaattcaagtacaaaactacatgagtactatgagaatgaattttgcaaatatttgtaagtaagctattttggggctgtggaaatattttctgttggtaactgtttcttgttccccataccagataaaaaccgcatataactctgtgacattttctttgttctgaaacatcattaaaagaatgacagtaca

SEQ ID NO: 302477 - DNA, 735 bp, Homo sapiens
agcggaaacgcagttccggttaggcggctgagtttgtttacgttgctaacagatctagcccctgctttccctagttccagttccaagatggggaaatccttcgccaacttcatgtgcaagaaagactttcatcctgcctccaaatccaatatcaaaaaagtatggatggcagaacagaaaatatcatatgataagaagaaacaagaagaattgatgcagcaatatcttaaagaacaagaatcatatgataatagattgcttatgggagatgaacgtgtaaagaatggccttaatttcatgtatgaagccccaccaggagctaaaaaagaaaacaaagagaaagaagaaacagaaggagagaccgaatacaaatttgaatggcagaaaggagccccacgagaaaaatatgccaaagatgacatgaacatcagagatcagccctttggtattcaggttcgaaatgtgaggtgcattaaatgtcacaaatggggtcatgtcaacacagatcgagaatgtcctttgtttggtctttctggaatcaatgcaagttcggttcccactgatggctcagggccatcgatgcacccctcggagctaatagcggagatgagaaacagtgggtttgcactgaaacgaaatgtactggggagaaacttgaccgcaaatgatccatcacaggagtatgttgcaggtagggatgaaggacgggtaggtatgatgaagggggtacagagc

SEQ ID NO: 302478 - DNA, 805 bp, Homo sapiens
aggcagttgggctgctggagtgcggcgccaccgcggaggacaggggcagctggcgggcagcgggtgagggggtggcggggacgcgagtggcggccgcggggccccggacaagggtccgcagagctgcagccttcgagggccagccctctccgagtccggggctgggtcccaccagtgacaaggcggcagccccgcgcacaccaaagagaaggcggctgtggcggcagcggcagccccagccatgctgtgttatgtgacgaggccggacgcggtgctgatggaggtggaggtggaggcgaaagccaacggcgaggactgcctcaaccaggtgtgcaggcgactgggaatcatagaagttgactattttggactgcagtttacgggtagcaaaggtgaaagtttatggctaaacctgagaaaccggatctcccagcagatggatgggctagccccttacaggcttaaacttagagtcaagttcttcgtggagcctcatctcatcttacaggagcagactaggtaaagtgagctaaaataaaccaatgtcaaattgacctttggttccctttagaagggccgctgcaccttcccagagatactcacaggcaagtttgttttgatgcggagttccatcttaacttaggttttccatgcaggtccttttgttgaggtggagggggagctacctacttggtccgagtgcattttccaatccttcttttagtttttcttgtctttataaacttgatgggtgagcagggttgaattcttacaaacacttgagataagtgctaccccaggaaaa

SEQ ID NO: 302479 - DNA, 2886 bp, Homo sapiens
aggcagttgggctgctggagtgcggcgccaccgcggaggacaggggcagctggcgggcagcgggtgagggggtggcggggacgcgagtggcggccgcggggccccggacaagggtccgcagagctgcagccttcgagggccagccctctccgagtccggggctgggtcccaccagtgacaaggcggcagccccgcgcacaccaaagagaaggcggctgtggcggcagcggcagccccagccatgctgtgttatgtgacgaggccggacgcggtgctgatggaggtggaggtggaggcgaaagccaacggcgaggactgcctcaaccaggcatatctttttcttgcacatcaaggaggccctcttggcaggccacctcttgtgttccccagagcaggcagtggaactcagtgccctcctggcccagaccaagtttggagactacaaccagaacactgccaagtataactatgaggagctctgtgccaaggagctctcctctgccaccttgaacagcattgttgcaaaacataaggagttggaggggaccagccaggcttcagctgaataccaagttttgcagattgtgtcggcaatggaaaactatggcatagaatggcattctgtgcgggatagcgaagggcagaaactgctcattggggttggacctgaaggaatctcaatttgtaaagatgactttagcccaattaataggatagcttatcctgtggtgcagatggccacccagtcaggaaagaatgtatatttgacggtcaccaaggaatctgggaacagcatcgtgctcttgtttaaaatgatcagcaccagggcggccagcgggctctaccgagcgataacagagacgcacgcattctacaggtgtgacacagtgaccagcgccgtgatgatgcagtatagccgtgacttgaagggccacttggcatctctgtttctgaatgaaaacattaaccttggcaagaaatatgtctttgatattaaaagaacatcaaaggaggtgtatgaccatgccaggagggctctgtacaatgctggcgttgtggacctcgtttcaagaagcaaccagagcccttcacactcgcctctgaagtcctcagaaagcagcatgaactgcagcagctgcgagggcctcagctgccagcagacccgggtgctgcaggagaagctacgcaagctgaaggaagccatgctgtgcatggtgtgctgcgaggaggagatcaactccaccttctgtccctgtggccacactgtgtgctgtgagagctgcgccgcccagctacagtcatgtcccgtctgcaggtcgcgtgtggagcatgtccagcacgtctatctgccaacgcacaccagtcttctcaatctgactgtaatctaatctgttgtgcttttgttggacttggcatgtttccatgaactgcactattataaactattaaaatgatagattgtggagaaagtaattattccaacacccatctgccatgcgatgttaaaaaaaaaaaaaaaggaagaaaaataacacagctactcctcactgcaaaaacatatccatgcgtagaatcaacaactccagtcatgggaccaggaggagctctgggacgcagacacattccttggatgttgattttttttatgatctagtaaaggaataggtaaagtctttgatgtcagtgaagtggcaacatagccaaaaagttgggtaccttttaggaaatgatgttgtaagtctccttaatgtatcctgaggtaagtttcctactggcagcagattttgtaagaattacttttaagaatttcattctttttgtatggtcatggagctccaaccatttttaataggaaagtcttttgtaaattgttgtcgttttaatgtcatttctgtctttataacttgatcaagaatgattggaaggcaaacaggtttacaaatcaattctgtgacttttaaaaagttgacaatgttgtcagatttaaaccagtgtggctagtaaaaagcagctcactcaatgtgggtggctccctattcctttacgctccccctatccctaccccacaagcctttcgattataaaatactaccaatcttgttataagattactgtggagtagtcaagtactccccgggccttctgagctggtggaatattttatttcagactgaaaacagagagcactctccttgggaagggaaagcggagcttgctgagtgagagatggagcctcatggtgtacaactgagggtagttaactcatcacttctcccaagcactcgatcccagcttcacccactggtgttgctttgcttgaactgttcaagccttttatagccttaccataagtatttagatatggtgtccttttctgtttttggggggggagttttgttgtgtttttttaaagtaagtgcttaagtattaactttgggttgtcccctctgtatgtttcgaaggggttttggttctttttgcttctgttttcttaaacatgttttccactcccacttgggcattttggaagctggtcagctagcaggttttctgggatgtcgggagacctagatgaccttatcgggtgcaatactagctaaggtaaagctagaaacctacactgtcactttactgagatttctgagtatacttttcatattgccttaatgtagcagtaatgtgtttatgcatttgtttctttgcacagacattttgtcaaatattaaaactctacttttttatggcacatattagcatataagcctttattccaagaggtatttattttttcacttgtaaaaaaataatgtttccacgtaaagaactctgttatatcctagaggactctgtcttttatattcgggataataaagactttaaagcaaa

SEQ ID NO: 302480 - DNA, 804 bp, Homo sapiens
  misc_feature (715)..(715): n is a, c, g, or t
aggcagttgggctgctggagtgcggcgccaccgcggaggacaggggcagctggcgggcagcgggtgagggggtggcggggacgcgagtggcggccgcggggccccggacaagggtccgcagagctgcagccttcgagggccagccctctccgagtccggggctgggtcccaccagtgacaaggcggcagccccgcgcacaccaaagagaaggcggctgtggcggcagcggcagccccagccatgctgtgttatgtgacgaggccggacgcggtgctgatggaggtggaggtggaggcgaaagccaacggcgaggactgcctcaaccaggtgtgcaggcgactgggaatcatagaagttgactattttggactgcagtttacgggtagcaaaggtgaaagtttatggctaaacctgagaaaccggatctcccagcagatggatgggctagccccttacaggcttaaacttagagtcaagttcttcgtggagcctcatctcatcttacaggagcagactaggcatatctttttcttgcacatcaaggaggccctcttggcaggccacctcttgtgttccccagagcaggcagtggaactcagtgccctcctggcccagaccaagtttggagactacaaccagaacactgccaagtataactatgaggagctctgtgccaaggagctctcctctgccaccttgaacagcattgttgcnaacataaggattggagcgaccaccgttcactgaataccgtttgcaatggtggaggaactgcaaaggatccggggaagagcgaagtcggg

SEQ ID NO: 302481 - DNA, 288 bp, Homo sapiens
gcagccgcctactactactaaattcgcggccgcgtgagatttctgagtatacttttcatattgccttaatgtagcagtaatgtgtttatgcatttgtttctttgcacagacattttgtcaaatattaaaactctacttttttatggcacatattagcatataagcctttattccaagaggtatttattttttcacttgtaaaaaaataatgtttccacgtaaagaactctgttatatcctagaggactctgtcttttatattcgggataataaagactttaaagcaaa

SEQ ID NO: 302482 - DNA, 405 bp, Homo sapiens
  misc_feature (361)..(361): n is a, c, g, or t
  misc_feature (402)..(402): n is a, c, g, or t
tatggtgatgtgataaccccagaggaagcgtctgatttttctgctaggtcatgagcaaatggggatcccacaaaggcacacacatggtgaagaatcactccttctagatctgctttcttttctcttcctgtctcttaggatagcttatcctgtggtgcagatggccacccaaagggctgggattacaggtgtgagccaccgtgtctggccccacataaagtttaggttgggatttttctgtttcttcaaaaaatattgtgatcttgatataggattgcactggaatctgtaggactgcattggggtagtattgggcatctttacaatattgtcttccccatccatggaatatgaagtatcntttccattactgggcatctgtaagttctttcagcagtgtcnttg

SEQ ID NO: 302483 - DNA, 3077 bp, Homo sapiens
aggcagttgggctgctggagtgcggcgccaccgcggaggacaggggcagctggcgggcagcgggtgagggggtggcggggacgcgagtggcggccgcggggccccggacaagggtccgcagagctgcagccttcgagggccagccctctccgagtccggggctgggtcccaccagtgacaaggcggcagccccgcgcacaccaaagagaaggcggctgtggcggcagcggcagccccagccatgctgtgttatgtgacgaggccggacgcggtgctgatggaggtggaggtggaggcgaaagccaacggcgaggactgcctcaaccaggtgtgcaggcgactgggaatcatagaagttgactattttggactgcagtttacgggtagcaaaggtgaaagtttatggctaaacctgagaaaccggatctcccagcagatggatgggctagccccttacaggcttaaacttagagtcaagttcttcgtggagcctcatctcatcttacaggagcagactaggcatatctttttcttgcacatcaaggaggccctcttggcaggccacctcttgtgttccccagagcaggcagtggaactcagtgccctcctggcccagaccaagtttggagactacaaccagaacactgccaagtataactatgaggagctctgtgccaaggagctctcctctgccaccttgaacagcattgttgcaaaacataaggagttggaggggaccagccaggcttcagctgaataccaagttttgcagattgtgtcggcaatggaaaactatggcatagaatggcattctgtgcgggatagcgaagggcagaaactgctcattggggttggacctgaaggaatctcaatttgtaaagatgactttagcccaattaataggatagcttatcctgtggtgcagatggccacccagtcaggaaagaatgtatatttgacggtcaccaaggaatctgggaacagcatcgtgctcttgtttaaaatgatcagcaccagggcggccagcgggctctaccgagcgataacagagacgcacgcattctacaggtgtgacacagtgaccagcgccgtgatgatgcagtatagccgtgacttgaagggccacttggcatctctgtttctgaatgaaaacattaaccttggcaagaaatatgtctttgatattaaaagaacatcaaaggaggtgtatgaccatgccaggagggctctgtacaatgctggcgttgtggacctcgtttcaagaagcaaccagagcccttcacactcgcctctgaagtcctcagaaagcagcatgaactgcagcagctgcgagggcctcagctgccagcagacccgggtgctgcaggagaagctacgcaagctgaaggaagccatgctgtgcatggtgtgctgcgaggaggagatcaactccaccttctgtccctgtggccacactgtgtgctgtgagagctgcgccgcccagctacagtcatgtcccgtctgcaggtcgcgtgtggagcatgtccagcacgtctatctgccaacgcacaccagtcttctcaatctgactgtaatctaatctgttgtgcttttgttggacttggcatgtttccatgaactgcactattataaactattaaaatgatagattgtggagaaagtaattattccaacacccatctgccatgcgatgttaaaaaaaaaaaaaaaggaagaaaaataacacagctactcctcactgcaaaaacatatccatgcgtagaatcaacaactccagtcatgggaccaggaggagctctgggacgcagacacattccttggatgttgattttttttatgatctagtaaaggaataggtaaagtctttgatgtcagtgaagtggcaacatagccaaaaagttgggtaccttttaggaaatgatgttgtaagtctccttaatgtatcctgaggtaagtttcctactggcagcagattttgtaagaattacttttaagaatttcattctttttgtatggtcatggagctccaaccatttttaataggaaagtcttttgtaaattgttgtcgttttaatgtcatttctgtctttataacttgatcaagaatgattggaaggcaaacaggtttacaaatcaattctgtgacttttaaaaagttgacaatgttgtcagatttaaaccagtgtggctagtaaaaagcagctcactcaatgtgggtggctccctattcctttacgctccccctatccctaccccacaagcctttcgattataaaatactaccaatcttgttataagattactgtggagtagtcaagtactccccgggccttctgagctggtggaatattttatttcagactgaaaacagagagcactctccttgggaagggaaagcggagcttgctgagtgagagatggagcctcatggtgtacaactgagggtagttaactcatcacttctcccaagcactcgatcccagcttcacccactggtgttgctttgcttgaactgttcaagccttttatagccttaccataagtatttagatatggtgtccttttctgtttttggggggggagttttgttgtgtttttttaaagtaagtgcttaagtattaactttgggttgtcccctctgtatgtttcgaaggggttttggttctttttgcttctgttttcttaaacatgttttccactcccacttgggcattttggaagctggtcagctagcaggttttctgggatgtcgggagacctagatgaccttatcgggtgcaatactagctaaggtaaagctagaaacctacactgtcactttactgagatttctgagtatacttttcatattgccttaatgtagcagtaatgtgtttatgcatttgtttctttgcacagacattttgtcaaatattaaaactctacttttttatggcacatattagcatataagcctttattccaagaggtatttattttttcacttgtaaaaaaataatgtttccacgtaaagaactctgttatatcctagaggactctgtcttttatattcgggataataaagactttaaagcaaa

SEQ ID NO: 302484 - DNA, 3183 bp, Homo sapiens
aggcagttgggctgctggagtgcggcgccaccgcggaggacaggggcagctggcgggcagcgggtgagggggtggcggggacgcgagtggcggccgcggggccccggacaagggtccgcagagctgcagccttcgagggccagccctctccgagtccggggctgggtcccaccagtgacaaggcggcagccccgcgcacaccaaagagaaggcggctgtggcggcagcggcagccccagccatgctgtgttatgtgacgaggccggacgcggtgctgatggaggtggaggtggaggcgaaagccaacggcgaggactgcctcaaccaggtgtgcaggcgactgggaatcatagaagttgactattttggactgcagtttacgggtagcaaaggtgaaagtttatggctaaacctgagaaaccggatctcccagcagatggatgggctagccccttacaggcttaaacttagagtcaagttcttcgtggagcctcatctcatcttacaggagcagactaggcatatctttttcttgcacatcaaggaggccctcttggcaggccacctcttgtgttccccagagcaggcagtggaactcagtgccctcctggcccagaccaagtttggagactacaaccagaacactgccaagtataactatgaggagctctgtgccaaggagctctcctctgccaccttgaacagcattgttgcaaaacataaggagttggaggggaccagccaggcttcagctgaataccaagttttgcagattgtgtcggcaatggaaaactatggcatagaatggcattctgtgcgggatagcgaagggcagaaactgctcattggggttggacctgaaggaatctcaatttgtaaagatgactttagcccaattaataggatagcttatcctgtggtgcagatggccacccagtcaggaaagaatgtatatttgacggtcaccaaggaatctgggaacagcatcgtgctcttgtttaaaatgatcagcaccagggcggccagcgggctctaccgagcgataacagagacgcacgcattctacaggtgtgacacagtgaccagcgccgtgatgatgcagtatagccgtgacttgaagggccacttggcatctctgtttctgaatgaaaacattaaccttggcaagaaatatgtctttgatattaaaagaacatcaaaggaggtgtatgaccatgccaggagggctctgtacaatgctggcgttgtggacctcgtttcaagaagcaaccagagcccttcacactcgcctctgaagtcctcagaaagcagcatgaactgcagcagctgcgagggcctcagctgccagcagacccgggtgctgcaggagaagctacgcaagctgaaggaagccatgctgtgcatggtgtgctgcgaggaggagatcaactccaccttctgtccctgtggccacactgtgtgctgtgagagctgcgccgcccagctacagtcatgtcccgtctgcaggtcgcgtgtggagcatgtccagcacgtctatctgccaacgcacaccagtcttctcaatctgactgtaatctaatctgttgtgcttttgttggacttggcatgtttccatgaactgcactattataaactattaaaatgatagattgtggagaaagtaattattccaacacccatctgccatgcgatgttaaaaaaaaaaaaaaaggaagaaaaataacacagctactcctcactgcaaaaacatatccatgcgtagaatcaacaactccagtcatgggaccaggaggagctctgggacgcagacacattccttggatgttgattttttttatgatctagtaaaggaataggtaaagtctttgatgtcagtgaagtggcaacatagccaaaaagttgggtaccttttaggaaatgatgttgtaagtctccttaatgtatcctgaggtaagtttcctactggcagcagattttgtaagaattacttttaagaatttcattctttttgtatggtcatggagctccaaccatttttaataggaaagtcttttgtaaattgttgtcgttttaatgtcatttctgtctttataacttgatcaagaatgattggaaggcaaacaggtttacaaatcaattctgtgacttttaaaaagttgacaatgttgtcagatttaaaccagtgtggctagtaaaaagcagctcactcaatgtgggtggctccctattcctttacgctccccctatccctaccccacaagcctttcgattataaaatactaccaatcttgttataagattactgtggagtagtcaagtactccccgggccttctgagctggtggaatattttatttcagactgaaaacagagagcactctccttgggaagggaaagcggagcttgctgagtgagagatggagcctcatggtgtacaactgagggtagttaactcatcacttctcccaagcactcgatcccagcttcacccactggtgttgctttgcttgaactgttcaagccttttatagccttaccataagtatttagatatggtgtccttttctgtttttggggggggagttttgttgtgtttttttaaagtaagtgcttaagtattaactttgggttgtcccctctgtatgtttcgaaggggttttggttctttttgcttctgttttcttaaacatgttttccactcccacttgggcattttggaagctggtcagctagcaggttttctgggatgtcgggagacctagatgaccttatcgggtgcaatactagctaaggtaaagctagaaacctacactgtcactttactgagatttctgagtatacttttcatattgccttaatgtagcagtaatgtgtttatgcatttgtttctttgcacagacattttgtcaaatattaaaactctacttttttatggcacatattagcatataagcctttattccaagaggtatttattttttcacttgtaaaaaaataatgtttccacgtaaagaactctgttatatcctagaggactctgtcttttatattcgggataataaagactttaaagcaaaaaaaaagtagagttttaatatttgacaaaatgtctgtgcaaagaaacaaatgcataaacacattactgctacattaaggcaatatgaaaagtatactcagaaatct

SEQ ID NO: 302485 - DNA, 2224 bp, Homo sapiens
  misc_feature (2088)..(2088): n is a, c, g, or t
  misc_feature (2123)..(2123): n is a, c, g, or t
  misc_feature (2152)..(2152): n is a, c, g, or t
  misc_feature (2185)..(2185): n is a, c, g, or t
  misc_feature (2199)..(2199): n is a, c, g, or t
aggcagttgggctgctggagtgcggcgccaccgcggaggacaggggcagctggcgggcagcgggtgagggggtggcggggacgcgagtggcggccgcggggccccggacaagggtccgcagagctgcagccttcgagggccagccctctccgagtccggggctgggtcccaccagtgacaaggcggcagccccgcgcacaccaaagagaaggcggctgtggcggcagcggcagccccagccatgctgtgttatgtgacgaggccggacgcggtgctgatggaggtggaggtggaggcgaaagccaacggcgaggactgcctcaaccaggtgtgcaggcgactgggaatcatagaagttgactattttggactgcagtttacgggtagcaaaggtgaaagtttatggctaaacctgagaaaccggatctcccagcagatggatgggctagccccttacaggcttaaacttagagtcaagttcttcgtggagcctcatctcatcttacaggagcagactaggcatatctttttcttgcacatcaaggaggccctcttggcaggccacctcttgtgttccccagagcaggcagtggaactcagtgccctcctggcccagaccaagtttggagactacaaccagaacactgccaagtataactatgaggagctctgtgccaaggagctctcctctgccaccttgaacagcattgttgcaaaacataaggagttggaggggaccagccaggcttcagctgaataccaagttttgcagattgtgtcggcaatggaaaactatggcatagaatggcattctgtgcgggatagcgaagggcagaaactgctcattggggttggacctgaaggaatctcaatttgtaaagatgactttagcccaattaataggatagcttatcctgtggtgcagatggccacccagtcaggaaagaatgtatatttgacggtcaccaaggaatctgggaacagcatcgtgctcttgtttaaaatgatcagcaccagggcggccagcgggctctaccgagcgataacagagacgcacgcattctacaggtgtgacacagtgaccagcgccgtgatgatgcagtatagccgtgacttgaagggccacttggcatctctgtttctgaatgaaaacattaaccttggcaagaaatatgtctttgatattaaaagaacatcaaaggaggtgtatgaccatgccaggagggctctgtacaatgctggcgttgtggacctcgtttcaagaagcaaccagagcccttcacactcgcctctgaagtcctcagaaagcagcatgaactgcagcagctgcgagggcctcagctgccagcagacccgggtgctgcaggagaagctacgcaagctgaaggaagccatgctgtgcatggtgtgctgcgaggaggagatcaactccaccttctgtccctgtggccacactgtgtgctgtgagagctgcgccgcccagctacagtcatgtcccgtctgcaggtcgcgtgtggagcatgtccagcacgtctatctgccaacgcacaccagtcttctcaatctgactgtaatctaatctgttgtgcttttgttggacttggcatgtttccatgaactgcactattataaactattaaaatgatagattgtggagaaagtaattattccaacacccatctgccatgcgatgttaaaaaaaaaaaaaaaggaagaaaaataacacagctactcctcactgcaaaaacatatccatgcgtagaatcaacaactccagtcatgggaccaggaggagctctgggacgcagacacattccttggatgttgattttttttatgatctagtaaaggaataggtaaagtctttgatgtcagtgaagtggcaacatagccaaaaagttgggtaccttttaggaaatgatgttgtaagtctccttaatgtatcctgaggtaagtttcctactggcagcagattttgtaagaattacttttaagaatttcattctttttgtatggtcatggagctccaaccatttttaataggaaagtcttttgtaaattgttgtcgtttttaaatggccattttcntgtccttttaataaccttggatccaaggaaatggnttttgggaaaggcaaaccaagggttttanaaaatccaaattcttggtggcctttttaaaaangggttgccaaattnttggtcaaggttttaaaaccccagt

SEQ ID NO: 302486 - DNA, 2589 bp, Homo sapiens
aggcagttgggctgctggagtgcggcgccaccgcggaggacaggggcagctggcgggcagcgggtgagggggtggcggggacgcgagtggcggccgcggggccccggacaagggtccgcagagctgcagccttcgagggccagccctctccgagtccggggctgggtcccaccagtgacaaggcggcagccccgcgcacaccaaagagaaggcggctgtggcggcagcggcagccccagccatgctgtgttatgtgacgaggccggacgcggtgctgatggaggtggaggtggaggcgaaagccaacggcgaggactgcctcaaccaggtgtgcaggcgactgggaatcatagaagttgactattttggactgcagtttacgggtagcaaaggtgaaagtttatggctaaacctgagaaaccggatctcccagcagatggatgggctagccccttacaggcttaaacttagagtcaagttcttcgtggagcctcatctcatcttacaggagcagactaggcatatctttttcttgcacatcaaggaggccctcttggcaggccacctcttgtgttccccagagcaggcagtggaactcagtgccctcctggcccagaccaagtttggagactacaaccagaacactgccaagtataactatgaggagctctgtgccaaggagctctcctctgccaccttgaacagcattgttgcaaaacataaggagttggaggggaccagccaggcttcagctgaataccaagttttgcagattgtgtcggcaatggaaaactatggcatagaatggcattctgtgcgggatagcgaagggcagaaactgctcattggggttggacctgaaggaatctcaatttgtaaagatgactttagcccaattaataggatagcttatcctgtggtgcagatggccacccagtcaggaaagaatgtatatttgtggccacactgtgtgctgtgagagctgcgccgcccagctacagtcatgtcccgtctgcaggtcgcgtgtggagcatgtccagcacgtctatctgccaacgcacaccagtcttctcaatctgactgtaatctaatctgttgtgcttttgttggacttggcatgtttccatgaactgcactattataaactattaaaatgatagattgtggagaaagtaattattccaacacccatctgccatgcgatgttaaaaaaaaaaaaaaaggaagaaaaataacacagctactcctcactgcaaaaacatatccatgcgtagaatcaacaactccagtcatgggaccaggaggagctctgggacgcagacacattccttggatgttgattttttttatgatctagtaaaggaataggtaaagtctttgatgtcagtgaagtggcaacatagccaaaaagttgggtaccttttaggaaatgatgttgtaagtctccttaatgtatcctgaggtaagtttcctactggcagcagattttgtaagaattacttttaagaatttcattctttttgtatggtcatggagctccaaccatttttaataggaaagtcttttgtaaattgttgtcgttttaatgtcatttctgtctttataacttgatcaagaatgattggaaggcaaacaggtttacaaatcaattctgtgacttttaaaaagttgacaatgttgtcagatttaaaccagtgtggctagtaaaaagcagctcactcaatgtgggtggctccctattcctttacgctccccctatccctaccccacaagcctttcgattataaaatactaccaatcttgttataagattactgtggagtagtcaagtactccccgggccttctgagctggtggaatattttatttcagactgaaaacagagagcactctccttgggaagggaaagcggagcttgctgagtgagagatggagcctcatggtgtacaactgagggtagttaactcatcacttctcccaagcactcgatcccagcttcacccactggtgttgctttgcttgaactgttcaagccttttatagccttaccataagtatttagatatggtgtccttttctgtttttggggggggagttttgttgtgtttttttaaagtaagtgcttaagtattaactttgggttgtcccctctgtatgtttcgaaggggttttggttctttttgcttctgttttcttaaacatgttttccactcccacttgggcattttggaagctggtcagctagcaggttttctgggatgtcgggagacctagatgaccttatcgggtgcaatactagctaaggtaaagctagaaacctacactgtcactttactgagatttctgagtatacttttcatattgccttaatgtagcagtaatgtgtttatgcatttgtttctttgcacagacattttgtcaaatattaaaactctacttttttatggcacatattagcatataagcctttattccaagaggtatttattttttcacttgtaaaaaaataatgtttccacgtaaagaactctgttatatcctagaggactctgtcttttatattcgggataataaagactttaaagcaaa

SEQ ID NO: 302487 - DNA, 2127 bp, Homo sapiens
gcagccgcctactactactaaattcgcggccgcgcatcgtgctcttgtttaaaatgatcagcaccagggcggccagcgggctctaccgagcgataacagagacgcacgcattctacaggtgtgacacagtgaccagcgccgtgatgatgcagtatagccgtgacttgaagggccacttggcatctctgtttctgaatgaaaacattaaccttggcaagaaatatgtctttgatattaaaagaacatcaaaggaggtgtatgaccatgccaggagggctctgtacaatgctggcgttgtggacctcgtttcaagaagcaaccagagcccttcacactcgcctctgaagtcctcagaaagcagcatgaactgcagcagctgcgagggcctcagctgccagcagacccgggtgctgcaggagaagctacgcaagctgaaggaagccatgctgtgcatggtgtgctgcgaggaggagatcaactccaccttctgtccctgtggccacactgtgtgctgtgagagctgcgccgcccagctacagtcatgtcccgtctgcaggtcgcgtgtggagcatgtccagcacgtctatctgccaacgcacaccagtcttctcaatctgactgtaatctaatctgttgtgcttttgttggacttggcatgtttccatgaactgcactattataaactattaaaatgatagattgtggagaaagtaattattccaacacccatctgccatgcgatgttaaaaaaaaaaaaaaaggaagaaaaataacacagctactcctcactgcaaaaacatatccatgcgtagaatcaacaactccagtcatgggaccaggaggagctctgggacgcagacacattccttggatgttgattttttttatgatctagtaaaggaataggtaaagtctttgatgtcagtgaagtggcaacatagccaaaaagttgggtaccttttaggaaatgatgttgtaagtctccttaatgtatcctgaggtaagtttcctactggcagcagattttgtaagaattacttttaagaatttcattctttttgtatggtcatggagctccaaccatttttaataggaaagtcttttgtaaattgttgtcgttttaatgtcatttctgtctttataacttgatcaagaatgattggaaggcaaacaggtttacaaatcaattctgtgacttttaaaaagttgacaatgttgtcagatttaaaccagtgtggctagtaaaaagcagctcactcaatgtgggtggctccctattcctttacgctccccctatccctaccccacaagcctttcgattataaaatactaccaatcttgttataagattactgtggagtagtcaagtactccccgggccttctgagctggtggaatattttatttcagactgaaaacagagagcactctccttgggaagggaaagcggagcttgctgagtgagagatggagcctcatggtgtacaactgagggtagttaactcatcacttctcccaagcactcgatcccagcttcacccactggtgttgctttgcttgaactgttcaagccttttatagccttaccataagtatttagatatggtgtccttttctgtttttggggggggagttttgttgtgtttttttaaagtaagtgcttaagtattaactttgggttgtcccctctgtatgtttcgaaggggttttggttctttttgcttctgttttcttaaacatgttttccactcccacttgggcattttggaagctggtcagctagcaggttttctgggatgtcgggagacctagatgaccttatcgggtgcaatactagctaaggtaaagctagaaacctacactgtcactttactgagatttctgagtatacttttcatattgccttaatgtagcagtaatgtgtttatgcatttgtttctttgcacagacattttgtcaaatattaaaactctacttttttatggcacatattagcatataagcctttattccaagaggtatttattttttcacttgtaaaaaaataatgtttccacgtaaagaactctgttatatcctagaggactctgtcttttatattcgggataataaagactttaaagcaaa

SEQ ID NO: 302488 - DNA, 2460 bp, Homo sapiens
gcaaatgcctcaagggcatatgggttggctgttatttattagcaagtcaaactaattttaatattaacacgaaaaagagaactcacatatagttttcttcctttcttgcatgaagaagaattttaaatttcctcttacaagttttttcaatttgtttttatttctcagatgtgtttgccaaatgtcactgtggttttatgtaaaactggttctagataatacttagtccttcagaagctgctaatttcagagctaataagaccaaatgacccctgtgtcctttccccagaagcagtcataggcttgtctttttctgcccacctattctgactctcatccctaagtctctcctgagggctgatgatgggcacgggctttctgagaagtcagccaggaatgtggagctgccacctacggctagaagcagagccaccctccctggccatgtgggcatcagcccagaaatgttggcctgagtcagtcagctgagctaaggacacacaatttcaagaagggtctcctgcattgctgcctgaagtgttatagtctactcatgtagagaccacattctgcacagaaagacgtcttcagtaattgctttattcaatgtaccttctttagcgtttcactaaaaatgtaattaatttccttcagtttatactatgtcatagtatttatttttaagcccttgtaaagtataaactttcaacctgtgagacggcaaagatctctaccaattgaaagctagaaatcactgtgatcacaattgatttagaaaattaaatgcactagagaccaggggtgtgcacagagacacaggccccccaccgaggcttgcatgctaacagagactgttggcttttctttcccagtcatgtcccgtctgcaggtcgcgtgtggagcatgtccagcacgtctatctgccaacgcacaccagtcttctcaatctgactgtaatctaatctgttgtgcttttgttggacttggcatgtttccatgaactgcactattataaactattaaaatgatagattgtggagaaagtaattattccaacacccatctgccatgcgatgttaaaaaaaaaaaaaaaggaagaaaaataacacagctactcctcactgcaaaaacatatccatgcgtagaatcaacaactccagtcatgggaccaggaggagctctgggacgcagacacattccttggatgttgattttttttatgatctagtaaaggaataggtaaagtctttgatgtcagtgaagtggcaacatagccaaaaagttgggtaccttttaggaaatgatgttgtaagtctccttaatgtatcctgaggtaagtttcctactggcagcagattttgtaagaattacttttaagaatttcattctttttgtatggtcatggagctccaaccatttttaataggaaagtcttttgtaaattgttgtcgttttaatgtcatttctgtctttataacttgatcaagaatgattggaaggcaaacaggtttacaaatcaattctgtgacttttaaaaagttgacaatgttgtcagatttaaaccagtgtggctagtaaaaagcagctcactcaatgtgggtggctccctattcctttacgctccccctatccctaccccacaagcctttcgattataaaatactaccaatcttgttataagattactgtggagtagtcaagtactccccgggccttctgagctggtggaatattttatttcagactgaaaacagagagcactctccttgggaagggaaagcggagcttgctgagtgagagatggagcctcatggtgtacaactgagggtagttaactcatcacttctcccaagcactcgatcccagcttcacccactggtgttgctttgcttgaactgttcaagccttttatagccttaccataagtatttagatatggtgtccttttctgtttttggggggggagttttgttgtgtttttttaaagtaagtgcttaagtattaactttgggttgtcccctctgtatgtttcgaaggggttttggttctttttgcttctgttttcttaaacatgttttccactcccacttgggcattttggaagctggtcagctagcaggttttctgggatgtcgggagacctagatgaccttatcgggtgcaatactagctaaggtaaagctagaaacctacactgtcactttactgagatttctgagtatacttttcatattgccttaatgtagcagtaatgtgtttatgcatttgtttctttgcacagacattttgtcaaatattaaaactctacttttttatggcacatattagcatataagcctttattccaagaggtatttattttttcacttgtaaaaaaataatgtttccacgtaaagaactctgttatatcctagaggactctgtcttttatattcgggataataaagactttaaagcaaa

SEQ ID NO: 302489 - DNA, 408 bp, Homo sapiens
gggtttgctttgatacgtaccatttgctcatccaggctgcattcctttttgttttaggtgtgcaggcgactgggaatcatagaagttgactattttggactgcagtttacgggtagcaaaggtgaaagtttatggctaaacctgagaaaccggatctcccagcagatggatgggctagccccttacaggcttaaacttagagtcaagttcttcgtggagcctcatctcatcttacaggagcagactaggtaaagtgagctaaaataaaccaatgtcaaattgacctttggttccctttagaagggccgctgcaccttcccagagatactcacaggcaagtttgttttgatgcggagttccatcttaacttaggttttccatgcaggtccttttgttgaggtggagggg

SEQ ID NO: 302490 - DNA, 5200 bp, Homo sapiens
ttcagctgggcagctctgggaacttggattaggtggagaggcagttggggggcctcgttgttttgcgtcttagttccgccctcctgtccatcaggagaaggaaaggataaaccctgggccatgaggctacccctgctcctggtttttgcctctgtcattccgggtgctgttctcctactggacaccaggcaatttttaatctataatgaagatcacaagcgctgcgtggatgcagtgagtcccagtgccgtccaaaccgcagcttgcaaccaggatgccgaatcacagaaattccgatgggtgtccgaatctcagattatgagtgttgcatttaaattatgcctgggagtgccatcaaaaacagactgggttgctatcactctctatgcctgtgactcaaaaagtgaatttcagaaatgggagtgcaaaaatgacacacttttggggatcaaaggagaagatttattttttaactacggcaacagacaagaaaagaatattatgctctacaagggatcgggtttatggagcaggtggaagatctatggaaccacagacaatctgtgctccagaggttatgaagccatgtatacgctactaggcaatgccaatggagcaacctgtgcattcccgttcaagtttgaaaacaagtggtacgcagattgcacgagtgctgggcggtcggatggatggctctggtgcggaaccactactgactatgacacagacaagctatttggatattgtccattgaaatttgagggcagtgaaagcttatggaataaagacccgctgaccagcgtttcctaccagataaactccaaatccgctttaacgtggcaccaggcgaggaaaagctgccaacaacagaacgctgagctcctgagcatcacagagatacatgagcaaacatacctgacaggattaaccagttccttgacctcaggactctggattggacttaacagtctgagcttcaacagcggttggcagtggagtgaccgcagtcctttccgatatttgaactggttaccaggaagtccatcagctgaacctggaaaaagctgtgtgtcactaaatcctggaaaaaatgctaaatgggaaaatctggaatgtgttcagaaactgggctatatttgcaaaaagggcaacaccactttaaattcttttgttattccctcagaaagtgatgtgcctactcactgtcctagtcagtggtggccgtatgccggtcactgttacaagattcacagagatgagaaaaaaatccagagggatgctctgaccacctgcaggaaggaaggcggtgacctcacaagtatccacaccatcgaggaattggactttattatctcccagctaggatatgagccaaatgacgaattgtggatcggcttaaatgacattaagattcaaatgtactttgagtggagtgatgggacccctgtaacgtttaccaaatggcttcgtggagaaccaagccatgaaaacaacagacaggaggattgtgtggtgatgaaaggcaaggatgggtactgggcagatcggggctgtgagtggcctcttggctacatctgcaagatgaaatcacgaagccaaggtccagaaatagtggaagtcgaaaaaggctgcaggaaaggctggaaaaaacatcacttttactgctatatgattggacatacgctttcaacatttgcagaagcaaaccaaacctgtaataatgagaatgcttatttaacaactattgaagacagatatgaacaagccttcctgactagtttcgttggcttaaggcctgaaaaatatttctggacaggactttcagatatacaaaccaaagggacttttcagtggaccatcgaggaagaggttcggttcacccactggaattcagatatgccagggcgaaagccagggtgtgttgccatgagaaccgggattgcagggggcttatgggatgttttgaaatgtgatgaaaaggcaaaatttgtgtgcaagcactgggcagaaggagtaacccacccaccgaagcccacgacgactcccgaacccaaatgtccggaggattggggcgccagcagtagaacaagcttgtgtttcaagctgtatgcaaaaggaaaacatgagaagaaaacgtggtttgaatctcgagatttttgtcgagctctgggtggagacttagctagcatcaataacaaagaggaacagcaaacaatatggcgattaataacagctagtggaagctaccacaaactgttttggttgggattgacatatggaagcccttcagaaggttttacttggagtgatggttctcctgtttcatatgaaaactgggcttatggagaacctaataattatcaaaatgttgaatactgtggtgagctgaaaggtgaccctactatgtcttggaatgatattaattgtgaacaccttaacaactggatttgccagatacaaaaaggacaaacaccaaaacctgagccaacaccagctcctcaagacaatccaccagttactgaagatgggtgggttatttacaaagactaccagtattatttcagcaaagagaaggaaaccatggacaatgcgcgagcgttttgcaagaggaattttggtgatcttgtttctattcaaagtgaaagtgaaaagaagtttctatggaaatatgtaaacagaaatgatgcacagtctgcatattttattggtttattgatcagcttggataaaaagtttgcttggatggatggaagcaaagtggattacgtgtcttgggccacaggtgaacccaattttgcaaatgaagatgaaaactgtgtgaccatgtattcaaattcagggttttggaatgacattaactgtggctatccaaacgccttcatttgccagcgacataacagtagtatcaatgctaccacagttatgcctaccatgccctcggtcccatcagggtgcaaggaaggttggaatttctacagcaacaagtgtttcaaaatctttggatttatggaagaagaaagaaaaaattggcaagaggcacgaaaagcttgtataggctttggagggaatctggtctccatacaaaatgaaaaagagcaagcatttcttacctatcacatgaaggactccactttcagtgcctggactgggctgaatgatgtcaattcagaacacacgttcctttggacggatggacgaggagtccattacacaaactgggggaaaggttaccctggtggaagaagaagcagtctttcttatgaagatgctgactgtgttgttattattggaggtgcatcaaatgaagcaggaaaatggatggatgatacctgcgacagtaaacgaggctacatatgccagacacgatccgacccttccttgactaatcctccagcaacgattcaaacagatggctttgttaaatatggcaaaagcagctattcactcatgagacaaaaatttcaatggcatgaagcggagacatactgcaagcttcacaattcccttatagccagcattctggatccctacagtaatgcatttgcgtggctgcagatggaaacatctaatgaacgtgtgtggatcgccctgaacagtaacttgactgataatcaatacacttggactgataagtggagggtgaggtacactaactgggctgctgatgagcccaaattgaaatcagcatgtgtttatctggatcttgatggctactggaagacagcacattgcaatgaaagtttttactttctctgtaaaagatcagatgaaatccctgctactgaacccccacaactgcctggcagatgcccggagtcagatcacacagcatggattcctttccatggtcactgttactatattgagtcctcatatacaagaaactggggccaagcttctctggaatgtcttcgaatgggttcctctctggtttccattgaaagtgctgcagaatccagttttctgtcatatcgggttgagccacttaaaagtaaaaccaatttttggataggattgttcagaaatgttgaagggacgtggctgtggataaataacagtccggtctcctttgtcaactggaacacaggagatccctctggtgaacggaatgattgtgtagctttacatgcgtcttctgggttttggagtaatattcactgttcttcctacaaaggatatatttgtaaaagaccaaaaattattgatgctaaacctactcatgaattacttacaacaaaagctgacacaaggaagatggacccttctaaaccgtcttccaacgtggccggagtagtcatcattgtgatcctcctgattttaacgggtgctggccttgccgcctatttcttttataagaaaagacgtgtgcacctacctcaagagggcgcctttgaaaacactctgtattttaacagtcagtcaagcccaggaactagtgatatgaaagatctcgtgggcaatattgaacagaatgaacactcggtcatctagtacctcaatgcgattctgagatatttgaatttcataaaattgtaactgaaatttaaaatttttagttcaatgtgattgttttctttaaaatgagtactgaattgtactggtctgtccttttttcctttgcctaattgaagaaataattgcttgttttctagcctggcaagatattttcataaaagagggataacaatgctgattactaccttttaaaatattttagataaatgcacagcaccacagcaccacatctaagcattagtgatgggtagctgatgtcagcttcatgtggattttaagcactctagaaacaatgaagcttcttggcatattttaaggagctcccaaaatgtgttacctattaaattgtaactcagcaagtagaagaccatttgaaaagtcaggtacaaatatcctcaagtggcataaaaatgtagtcagttttctcttttaccagtttttatttccactccaattatttagaactttatttgtacatgtgcagaagaataaggcagctgagaatcttgtttcccccaagagagttttacaggctgagtgttgcaaatgtgttctttgtcctgttatatgtatatcaggaatacaaggatgtgaaataaaactgtaaatttgcataactggatgtacttagataatgtgaaataaacattaaagacaaggtctatttttaatagatttgcatttt

SEQ ID NO: 302491 - DNA, 4454 bp, Homo sapiens
  misc_feature (37)..(37): n is a, c, g, or t
ttgctggggtgactccagaggatcccgggagtagtcnaaagacccgctgaccagcgtttcctaccagataaactccaaatccgctttaacgtggcaccaggcgaggaaaagctgccaacaacagaacgctgagctcctgagcatcacagagatacatgagcaaacatacctgacaggattaaccagttccttgacctcaggactctggattggacttaacagtctgagcttcaacagcggttggcagtggagtgaccgcagtcctttccgatatttgaactggttaccaggaagtccatcagctgaacctggaaaaagctgtgtgtcactaaatcctggaaaaaatgctaaatgggaaaatctggaatgtgttcagaaactgggctatatttgcaaaaagggcaacaccactttaaattcttttgttattccctcagaaagtgatgtgcctactcactgtcctagtcagtggtggccgtatgccggtcactgttacaagattcacagagatgagaaaaaaatccagagggatgctctgaccacctgcaggaaggaaggcggtgacctcacaagtatccacaccatcgaggaattggactttattatctcccagctaggatatgagccaaatgacgaattgtggatcggcttaaatgacattaagattcaaatgtactttgagtggagtgatgggacccctgtaacgtttaccaaatggcttcgtggagaaccaagccatgaaaacaacagacaggaggattgtgtggtgatgaaaggcaaggatgggtactgggcagatcggggctgtgagtggcctcttggctacatctgcaagatgaaatcacgaagccaaggtccagaaatagtggaagtcgaaaaaggctgcaggaaaggctggaaaaaacatcacttttactgctatatgattggacatacgctttcaacatttgcagaagcaaaccaaacctgtaataatgagaatgcttatttaacaactattgaagacagatatgaacaagccttcctgactagtttcgttggcttaaggcctgaaaaatatttctggacaggactttcagatatacaaaccaaagggacttttcagtggaccatcgaggaagaggttcggttcacccactggaattcagatatgccagggcgaaagccagggtgtgttgccatgagaaccgggattgcagggggcttatgggatgttttgaaatgtgatgaaaaggcaaaatttgtgtgcaagcactgggcagaaggagtaacccacccaccgaagcccacgacgactcccgaacccaaatgtccggaggattggggcgccagcagtagaacaagcttgtgtttcaagctgtatgcaaaaggaaaacatgagaagaaaacgtggtttgaatctcgagatttttgtcgagctctgggtggagacttagctagcatcaataacaaagaggaacagcaaacaatatggcgattaataacagctagtggaagctaccacaaactgttttggttgggattgacatatggaagcccttcagaaggttttacttggagtgatggttctcctgtttcatatgaaaactgggcttatggagaacctaataattatcaaaatgttgaatactgtggtgagctgaaaggtgaccctactatgtcttggaatgatattaattgtgaacaccttaacaactggatttgccagatacaaaaaggacaaacaccaaaacctgagccaacaccagctcctcaagacaatccaccagttactgaagatgggtgggttatttacaaagactaccagtattatttcagcaaagagaaggaaaccatggacaatgcgcgagcgttttgcaagaggaattttggtgatcttgtttctattcaaagtgaaagtgaaaagaagtttctatggaaatatgtaaacagaaatgatgcacagtctgcatattttattggtttattgatcagcttggataaaaagtttgcttggatggatggaagcaaagtggattacgtgtcttgggccacaggtgaacccaattttgcaaatgaagatgaaaactgtgtgaccatgtattcaaattcagggttttggaatgacattaactgtggctatccaaacgccttcatttgccagcgacataacagtagtatcaatgctaccacagttatgcctaccatgccctcggtcccatcagggtgcaaggaaggttggaatttctacagcaacaagtgtttcaaaatctttggatttatggaagaagaaagaaaaaattggcaagaggcacgaaaagcttgtataggctttggagggaatctggtctccatacaaaatgaaaaagagcaagcatttcttacctatcacatgaaggactccactttcagtgcctggactgggctgaatgatgtcaattcagaacacacgttcctttggacggatggacgaggagtccattacacaaactgggggaaaggttaccctggtggaagaagaagcagtctttcttatgaagatgctgactgtgttgttattattggaggtgcatcaaatgaagcaggaaaatggatggatgatacctgcgacagtaaacgaggctacatatgccagacacgatccgacccttccttgactaatcctccagcaacgattcaaacagatggctttgttaaatatggcaaaagcagctattcactcatgagacaaaaatttcaatggcatgaagcggagacatactgcaagcttcacaattcccttatagccagcattctggatccctacagtaatgcatttgcgtggctgcagatggaaacatctaatgaacgtgtgtggatcgccctgaacagtaacttgactgataatcaatacacttggactgataagtggagggtgaggtacactaactgggctgctgatgagcccaaattgaaatcagcatgtgtttatctggatcttgatggctactggaagacagcacattgcaatgaaagtttttactttctctgtaaaagatcagatgaaatccctgctactgaacccccacaactgcctggcagatgcccggagtcagatcacacagcatggattcctttccatggtcactgttactatattgagtcctcatatacaagaaactggggccaagcttctctggaatgtcttcgaatgggttcctctctggtttccattgaaagtgctgcagaatccagttttctgtcatatcgggttgagccacttaaaagtaaaaccaatttttggataggattgttcagaaatgttgaagggacgtggctgtggataaataacagtccggtctcctttgtcaactggaacacaggagatccctctggtgaacggaatgattgtgtagctttacatgcgtcttctgggttttggagtaatattcactgttcttcctacaaaggatatatttgtaaaagaccaaaaattattgatgctaaacctactcatgaattacttacaacaaaagctgacacaaggaagatggacccttctaaaccgtcttccaacgtggccggagtagtcatcattgtgatcctcctgattttaacgggtgctggccttgccgcctatttcttttataagaaaagacgtgtgcacctacctcaagagggcgcctttgaaaacactctgtattttaacagtcagtcaagcccaggaactagtgatatgaaagatctcgtgggcaatattgaacagaatgaacactcggtcatctagtacctcaatgcgattctgagatatttgaatttcataaaattgtaactgaaatttaaaatttttagttcaatgtgattgttttctttaaaatgagtactgaattgtactggtctgtccttttttcctttgcctaattgaagaaataattgcttgttttctagcctggcaagatattttcataaaagagggataacaatgctgattactaccttttaaaatattttagataaatgcacagcaccacagcaccacatctaagcattagtgatgggtagctgatgtcagcttcatgtggattttaagcactctagaaacaatgaagcttcttggcatattttaaggagctcccaaaatgtgttacctattaaattgtaactcagcaagtagaagaccatttgaaaagtcaggtacaaatatcctcaagtggcataaaaatgtagtcagttttctcttttaccagtttttatttccactccaattatttagaactttatttgtacatgtgcagaagaataaggcagctgagaatcttgtttcccccaagagagttttacaggctgagtgttgcaaatgtgttctttgtcctgttatatgtatatcaggaatacaaggatgtgaaataaaactgtaaatttgcataactggatgtacttagataatgtgaaataaacattaaagacaaggtctatttttaatagatttgcatttt

SEQ ID NO: 302492 - DNA, 1954 bp, Homo sapiens
tgaaataatgtcagagaggcacagttctttggctgtatctgcctgttatcatacgggagccccaaggatatggtggctgactgtgttgttattattggaggtgcatcaaatgaagcaggaaaatggatggatgatacctgcgacagtaaacgaggctacatatgccagacacgatccgacccttccttgactaatcctccagcaacgattcaaacagatggctttgttaaatatggctactgcaagcttcacaattcccttatagccagcattctggatccctacagtaatgcatttgcgtggctgcagatggaaacatctaatgaacgtgtgtggatcgccctgaacagtaacttgactgataatcaatacacttggactgataagtggagggtgaggtacactaactgggctgctgatgagcccaaattgaaatcagcatgtgtttatctggatcttgatggctactggaagacagcacattgcaatgaaagtttttactttctctgtaaaagatcagatgaaatccctgctactgaacccccacaactgcctggcagatgcccggagtcagatcacacagcatggattcctttccatggtcactgttactatattgagtcctcatatacaagaaactggggccaagcttctctggaatgtcttcgaatgggttcctctctggtttccattgaaagtgctgcagaatccagttttctgtcatatcgggttgagccacttaaaagtaaaaccaatttttggataggattgttcagaaatgttgaagggacgtggctgtggataaataacagtccggtctcctttgtcaactggaacacaggagatccctctggtgaacggaatgattgtgtagctttacatgcgtcttctgggttttggagtaatattcactgttcttcctacaaaggatatatttgtaaaagaccaaaaattattgatgctaaacctactcatgaattacttacaacaaaagctgacacaaggaagatggacccttctaaaccgtcttccaacgtggccggagtagtcatcattgtgatcctcctgattttaacgggtgctggccttgccgcctatttcttttataagaaaagacgtgtgcacctacctcaagagggcgcctttgaaaacactctgtattttaacagtcagtcaagcccaggaactagtgatatgaaagatctcgtgggcaatattgaacagaatgaacactcggtcatctagtacctcaatgcgattctgagatatttgaatttcataaaattgtaactgaaatttaaaatttttagttcaatgtgattgttttctttaaaatgagtactgaattgtactggtctgtccttttttcctttgcctaattgaagaaataattgcttgttttctagcctggcaagatattttcataaaagagggataacaatgctgattactaccttttaaaatattttagataaatgcacagcaccacagcaccacatctaagcattagtgatgggtagctgatgtcagcttcatgtggattttaagcactctagaaacaatgaagcttcttggcatattttaaggagctcccaaaatgtgttacctattaaattgtaactcagcaagtagaagaccatttgaaaagtcaggtacaaatatcctcaagtggcataaaaatgtagtcagttttctcttttaccagtttttatttccactccaattatttagaactttatttgtacatgtgcagaagaataaggcagctgagaatcttgtttcccccaagagagttttacaggctgagtgttgcaaatgtgttctttgtcctgttatatgtatatcaggaatacaaggatgtgaaataaaactgtaaatttgcataactggatgtacttagataatgtgaaataaacattaaagacaaggtctatttttaatagatttgcatttt

SEQ ID NO: 302493 - DNA, 5146 bp, Homo sapiens
ttcagctgggcagctctgggaacttggattaggtggagaggcagttggggggcctcgttgttttgcgtcttagttccgccctcctgtccatcaggagaaggaaaggataaaccctgggccatgaggctacccctgctcctggtttttgcctctgtcattccgggtgctgttctcctactggacaccaggcaatttttaatctataatgaagatcacaagcgctgcgtggatgcagtgagtcccagtgccgtccaaaccgcagcttgcaaccaggatgccgaatcacagaaattccgatgggtgtccgaatctcagattatgagtgttgcatttaaattatgcctgggagtgccatcaaaaacagactgggttgctatcactctctatgcctgtgactcaaaaagtgaatttcagaaatgggagtgcaaaaatgacacacttttggggatcaaaggagaagatttattttttaactacggcaacagacaagaaaagaatattatgctctacaagggatcgggtttatggagcaggtggaagatctatggaaccacagacaatctgtgctccagaggttatgaagccatgtatacgctactaggcaatgccaatggagcaacctgtgcattcccgttcaagtttgaaaacaagtggtacgcagattgcacgagtgctgggcggtcggatggatggctctggtgcggaaccactactgactatgacacagacaagctatttggatattgtccattgaaatttgagggcagtgaaagcttatggaataaagacccgctgaccagcgtttcctaccagataaactccaaatccgctttaacgtggcaccaggcgaggaaaagctgccaacaacagaacgctgagctcctgagcatcacagagatacatgagcaaacatacctgacaggattaaccagttccttgacctcaggactctggattggacttaacagtctgagcttcaacagcggttggcagtggagtgaccgcagtcctttccgatatttgaactggttaccaggaagtccatcagctgaacctggaaaaagctgtgtgtcactaaatcctggaaaaaatgctaaatgggaaaatctggaatgtgttcagaaactgggctatatttgcaaaaagggcaacaccactttaaattcttttgttattccctcagaaagtgatgtgcctactcactgtcctagtcagtggtggccgtatgccggtcactgttacaagattcacagagatgagaaaaaaatccagagggatgctctgaccacctgcaggaaggaaggcggtgacctcacaagtatccacaccatcgaggaattggactttattatctcccagctaggatatgagccaaatgacgaattgtggatcggcttaaatgacattaagattcaaatgtactttgagtggagtgatgggacccctgtaacgtttaccaaatggcttcgtggagaaccaagccatgaaaacaacagacaggaggattgtgtggtgatgaaaggcaaggatgggtactgggcagatcggggctgtgagtggcctcttggctacatctgcaagatgaaatcacgaagccaaggtccagaaatagtggaagtcgaaaaaggctgcaggaaaggctggaaaaaacatcacttttactgctatatgattggacatacgctttcaacatttgcagaagcaaaccaaacctgtaataatgagaatgcttatttaacaactattgaagacagatatgaacaagccttcctgactagtttcgttggcttaaggcctgaaaaatatttctggacaggactttcagatatacaaaccaaagggacttttcagtggaccatcgaggaagaggttcggttcacccactggaattcagatatgccagggcgaaagccagggtgtgttgccatgagaaccgggattgcagggggcttatgggatgttttgaaatgtgatgaaaaggcaaaatttgtgtgcaagcactgggcagaaggagtaacccacccaccgaagcccacgacgactcccgaacccaaatgtccggaggattggggcgccagcagtagaacaagcttgtgtttcaagctgtatgcaaaaggaaaacatgagaagaaaacgtggtttgaatctcgagatttttgtcgagctctgggtggagacttagctagcatcaataacaaagaggaacagcaaacaatatggcgattaataacagctagtggaagctaccacaaactgttttggttgggattgacatatggaagcccttcagaaggttttacttggagtgatggttctcctgtttcatatgaaaactgggcttatggagaacctaataattatcaaaatgttgaatactgtggtgagctgaaaggtgaccctactatgtcttggaatgatattaattgtgaacaccttaacaactggatttgccagatacaaaaaggacaaacaccaaaacctgagccaacaccagctcctcaagacaatccaccagttactgaagatgggtgggttatttacaaagactaccagtattatttcagcaaagagaaggaaaccatggacaatgcgcgagcgttttgcaagaggaattttggtgatcttgtttctattcaaagtgaaagtgaaaagaagtttctatggaaatatgtaaacagaaatgatgcacagtctgcatattttattggtttattgatcagcttggataaaaagtttgcttggatggatggaagcaaagtggattacgtgtcttgggccacaggtgaacccaattttgcaaatgaagatgaaaactgtgtgaccatgtattcaaattcagggttttggaatgacattaactgtggctatccaaacgccttcatttgccagcgacataacagtagtatcaatgctaccacagttatgcctaccatgccctcggtcccatcagggtgcaaggaaggttggaatttctacagcaacaagtgtttcaaaatctttggatttatggaagaagaaagaaaaaattggcaagaggcacgaaaagcttgtataggctttggagggaatctggtctccatacaaaatgaaaaagagcaagcatttcttacctatcacatgaaggactccactttcagtgcctggactgggctgaatgatgtcaattcagaacacacgttcctttggacggatggacgaggagtccattacacaaactgggggaaaggttaccctggtggaagaagaagcagtctttcttatgaagatgctgactgtgttgttattattggaggtgcatcaaatgaagcaggaaaatggatggatgatacctgcgacagtaaacgaggctacatatgccagacacgatccgacccttccttgactaatcctccagcaacgattcaaacagatggctttgttaaatatggcaaaagcagctattcactcatgagacaaaaatttcaatggcatgaagcggagacatactgcaagcttcacaattcccttatagccagcattctggatccctacagtaatgcatttgcgtggctgcagatggaaacatctaatgaacgtgtgtggatcgccctgaacagtaacttgactgataatcaatacacttggactgataagtggagggtgaggtacactaactgggctgctgatgagcccaaattgaaatcagcatgtgtttatctggatcttgatggctactggaagacagcacattgcaatgaaagtttttactttctctgtaaaagatcagatgaaatccctgctactgaacccccacaactgcctggcagatgcccggagtcagatcacacagcatggattcctttccatggtcactgttactatattgagtcctcatatacaagaaactggggccaagcttctctggaatgtcttcgaatgggttcctctctggtttccattgaaagtgctgcagaatccagttttctgtcatatcgggttgagccacttaaaagtaaaaccaatttttggataggattgttcagaaatgttgaagggacgtggctgtggataaataacagtccggtctcctttgtcaactggaacacaggagatccctctggtgaacggaatgattgtgtagctttacatgcgtcttctgggttttggagtaatattcactgttcttcctacaaaggatatatttgtaaaagaccaaaaattattgatgctaaacctactcatgaattacttacaacaaaagtcatcattgtgatcctcctgattttaacgggtgctggccttgccgcctatttcttttataagaaaagacgtgtgcacctacctcaagagggcgcctttgaaaacactctgtattttaacagtcagtcaagcccaggaactagtgatatgaaagatctcgtgggcaatattgaacagaatgaacactcggtcatctagtacctcaatgcgattctgagatatttgaatttcataaaattgtaactgaaatttaaaatttttagttcaatgtgattgttttctttaaaatgagtactgaattgtactggtctgtccttttttcctttgcctaattgaagaaataattgcttgttttctagcctggcaagatattttcataaaagagggataacaatgctgattactaccttttaaaatattttagataaatgcacagcaccacagcaccacatctaagcattagtgatgggtagctgatgtcagcttcatgtggattttaagcactctagaaacaatgaagcttcttggcatattttaaggagctcccaaaatgtgttacctattaaattgtaactcagcaagtagaagaccatttgaaaagtcaggtacaaatatcctcaagtggcataaaaatgtagtcagttttctcttttaccagtttttatttccactccaattatttagaactttatttgtacatgtgcagaagaataaggcagctgagaatcttgtttcccccaagagagttttacaggctgagtgttgcaaatgtgttctttgtcctgttatatgtatatcaggaatacaaggatgtgaaataaaactgtaaatttgcataactggatgtacttagataatgtgaaataaacattaaagacaaggtctatttttaatagatttgcatttt

SEQ ID NO: 302494 - DNA, 5163 bp, Homo sapiens
ttcagctgggcagctctgggaacttggattaggtggagaggcagttggggggcctcgttgttttgcgtcttagttccgccctcctgtccatcaggagaaggaaaggataaaccctgggccatgaggctacccctgctcctggtttttgcctctgtcattccgggtgctgttctcctactggacaccaggcaatttttaatctataatgaagatcacaagcgctgcgtggatgcagtgagtcccagtgccgtccaaaccgcagcttgcaaccaggatgccgaatcacagaaattccgatgggtgtccgaatctcagattatgagtgttgcatttaaattatgcctgggagtgccatcaaaaacagactgggttgctatcactctctatgcctgtgactcaaaaagtgaatttcagaaatgggagtgcaaaaatgacacacttttggggatcaaaggagaagatttattttttaactacggcaacagacaagaaaagaatattatgctctacaagggatcgggtttatggagcaggtggaagatctatggaaccacagacaatctgtgctccagaggttatgaagccatgtatacgctactaggcaatgccaatggagcaacctgtgcattcccgttcaagtttgaaaacaagtggtacgcagattgcacgagtgctgggcggtcggatggatggctctggtgcggaaccactactgactatgacacagacaagctatttggatattgtccattgaaatttgagggcagtgaaagcttatggaataaagacccgctgaccagcgtttcctaccagataaactccaaatccgctttaacgtggcaccaggcgaggaaaagctgccaacaacagaacgctgagctcctgagcatcacagagatacatgagcaaacatacctgacaggattaaccagttccttgacctcaggactctggattggacttaacagtctgagcttcaacagcggttggcagtggagtgaccgcagtcctttccgatatttgaactggttaccaggaagtccatcagctgaacctggaaaaagctgtgtgtcactaaatcctggaaaaaatgctaaatgggaaaatctggaatgtgttcagaaactgggctatatttgcaaaaagggcaacaccactttaaattcttttgttattccctcagaaagtgatgtgcctactcactgtcctagtcagtggtggccgtatgccggtcactgttacaagattcacagagatgagaaaaaaatccagagggatgctctgaccacctgcaggaaggaaggcggtgacctcacaagtatccacaccatcgaggaattggactttattatctcccagctaggatatgagccaaatgacgaattgtggatcggcttaaatgacattaagattcaaatgtactttgagtggagtgatgggacccctgtaacgtttaccaaatggcttcgtggagaaccaagccatgaaaacaacagacaggaggattgtgtggtgatgaaaggcaaggatgggtactgggcagatcggggctgtgagtggcctcttggctacatctgcaagatgaaatcacgaagccaaggtccagaaatagtggaagtcgaaaaaggctgcaggaaaggctggaaaaaacatcacttttactgctatatgattggacatacgctttcaacatttgcagaagcaaaccaaacctgtaataatgagaatgcttatttaacaactattgaagacagatatgaacaagccttcctgactagtttcgttggcttaaggcctgaaaaatatttctggacaggactttcagatatacaaaccaaagggacttttcagtggaccatcgaggaagaggttcggttcacccactggaattcagatatgccagggcgaaagccagggtgtgttgccatgagaaccgggattgcagggggcttatgggatgttttgaaatgtgatgaaaaggcaaaatttgtgtgcaagcactgggcagaaggagtaacccacccaccgaagcccacgacgactcccgaacccaaatgtccggaggattggggcgccagcagtagaacaagcttgtgtttcaagctgtatgcaaaaggaaaacatgagaagaaaacgtggtttgaatctcgagatttttgtcgagctctgggtggagacttagctagcatcaataacaaagaggaacagcaaacaatatggcgattaataacagctagtggaagctaccacaaactgttttggttgggattgacatatggaagcccttcagaaggttttacttggagtgatggttctcctgtttcatatgaaaactgggcttatggagaacctaataattatcaaaatgttgaatactgtggtgagctgaaaggtgaccctactatgtcttggaatgatattaattgtgaacaccttaacaactggatttgccagatacaaaaaggacaaacaccaaaacctgagccaacaccagctcctcaagacaatccaccagttactgaagatgggtgggttatttacaaagactaccagtattatttcagcaaagagaaggaaaccatggacaatgcgcgagcgttttgcaagaggaattttggtgatcttgtttctattcaaagtgaaagtgaaaagaagtttctatggaaatatgtaaacagaaatgatgcacagtctgcatattttattggtttattgatcagcttggataaaaagtttgcttggatggatggaagcaaagtggattacgtgtcttgggccacaggtgaacccaattttgcaaatgaagatgaaaactgtgtgaccatgtattcaaattcagggttttggaatgacattaactgtggctatccaaacgccttcatttgccagcgacataacagtagtatcaatgctaccacagttatgcctaccatgccctcggtcccatcagggtgcaaggaaggttggaatttctacagcaacaagtgtttcaaaatctttggatttatggaagaagaaagaaaaaattggcaagaggcacgaaaagcttgtataggctttggagggaatctggtctccatacaaaatgaaaaagagcaagcatttcttacctatcacatgaaggactccactttcagtgcctggactgggctgaatgatgtcaattcagaacacacgttcctttggacggatggacgaggagtccattacacaaactgggggaaaggttaccctggtggaagaagaagcagtctttcttatgaagatgctgactgtgttgttattattggaggtgcatcaaatgaagcaggaaaatggatggatgatacctgcgacagtaaacgaggctacatatgccagacacgatccgacccttccttgactaatcctccagcaacgattcaaacagatggctttgttaaatatggcaaaagcagctattcactcatgagacaaaaatttcaatggcatgaagcggagacatactgcaagcttcacaattcccttatagccagcattctggatccctacagtaatgcatttgcgtggctgcagatggaaacatctaatgaacgtgtgtggatcgccctgaacagtaacttgactgataatcaatacacttggactgataagtggagggtgaggtacactaactgggctgctgatgagcccaaattgaaatcagcatgtgtttatctggatcttgatggctactggaagacagcacattgcaatgaaagtttttactttctctgtaaaagatcagatgatgcccggagtcagatcacacagcatggattcctttccatggtcactgttactatattgagtcctcatatacaagaaactggggccaagcttctctggaatgtcttcgaatgggttcctctctggtttccattgaaagtgctgcagaatccagttttctgtcatatcgggttgagccacttaaaagtaaaaccaatttttggataggattgttcagaaatgttgaagggacgtggctgtggataaataacagtccggtctcctttgtcaactggaacacaggagatccctctggtgaacggaatgattgtgtagctttacatgcgtcttctgggttttggagtaatattcactgttcttcctacaaaggatatatttgtaaaagaccaaaaattattgatgctaaacctactcatgaattacttacaacaaaagctgacacaaggaagatggacccttctaaaccgtcttccaacgtggccggagtagtcatcattgtgatcctcctgattttaacgggtgctggccttgccgcctatttcttttataagaaaagacgtgtgcacctacctcaagagggcgcctttgaaaacactctgtattttaacagtcagtcaagcccaggaactagtgatatgaaagatctcgtgggcaatattgaacagaatgaacactcggtcatctagtacctcaatgcgattctgagatatttgaatttcataaaattgtaactgaaatttaaaatttttagttcaatgtgattgttttctttaaaatgagtactgaattgtactggtctgtccttttttcctttgcctaattgaagaaataattgcttgttttctagcctggcaagatattttcataaaagagggataacaatgctgattactaccttttaaaatattttagataaatgcacagcaccacagcaccacatctaagcattagtgatgggtagctgatgtcagcttcatgtggattttaagcactctagaaacaatgaagcttcttggcatattttaaggagctcccaaaatgtgttacctattaaattgtaactcagcaagtagaagaccatttgaaaagtcaggtacaaatatcctcaagtggcataaaaatgtagtcagttttctcttttaccagtttttatttccactccaattatttagaactttatttgtacatgtgcagaagaataaggcagctgagaatcttgtttcccccaagagagttttacaggctgagtgttgcaaatgtgttctttgtcctgttatatgtatatcaggaatacaaggatgtgaaataaaactgtaaatttgcataactggatgtacttagataatgtgaaataaacattaaagacaaggtctatttttaatagatttgcatttt

SEQ ID NO: 302495 - DNA, 1486 bp, Homo sapiens
ggctcccaaagtgctgggattacaggcgtgagccaccactcctggcctggagtcttattttacttttcattcaaatgctttttaacatcttaggcttcagcaggctaatttcaaaacccctagccttgaatgttttacttatgggtagattgggtaggttttaagggtgagtatcagtggctcaaatgtaacttggagaatcacatttccagatcttctaatgtactcaaacgcaccatacaaccataggcaactgctatggctcagacagagagacagatagatgataggtaggtagatatatagataaaggtacagatcttttttttctacctgtatttttatatctatcatatcataatatcatatatcaatcaacacacatcaaatgtggaggattccatgtatttgtgaggcaaataatatttgctatctacctgcaattattctgggtttttataaatttttttttttttacacacagttattgatgctaaacctactcatgaattacttacaacaaaagctgacacaaggaagatggacccttctaaaccgtcttccaacgtggccggagtagtcatcattgtgatcctcctgattttaacgggtgctggccttgccgcctatttcttttataagaaaagacgtgtgcacctacctcaagagggcgcctttgaaaacactctgtattttaacagtcagtcaagcccaggaactagtgatatgaaagatctcgtgggcaatattgaacagaatgaacactcggtcatctagtacctcaatgcgattctgagatatttgaatttcataaaattgtaactgaaatttaaaatttttagttcaatgtgattgttttctttaaaatgagtactgaattgtactggtctgtccttttttcctttgcctaattgaagaaataattgcttgttttctagcctggcaagatattttcataaaagagggataacaatgctgattactaccttttaaaatattttagataaatgcacagcaccacagcaccacatctaagcattagtgatgggtagctgatgtcagcttcatgtggattttaagcactctagaaacaatgaagcttcttggcatattttaaggagctcccaaaatgtgttacctattaaattgtaactcagcaagtagaagaccatttgaaaagtcaggtacaaatatcctcaagtggcataaaaatgtagtcagttttctcttttaccagtttttatttccactccaattatttagaactttatttgtacatgtgcagaagaataaggcagctgagaatcttgtttcccccaagagagttttacaggctgagtgttgcaaatgtgttctttgtcctgttatatgtatatcaggaatacaaggatgtgaaataaaactgtaaatttgcataactggatgtacttagataatgtgaaataaacattaaagacaaggtctatttttaatagatttgcatttt

SEQ ID NO: 302496 - DNA, 735 bp, Homo sapiens
attgaaagtgctgcagaatccagttttctgtcatatcgggttgagccacttaaaagtaaaaccaatttttggataggattgttcagaaatgttgaaggtaatttttgcagcatgcttatttaatcacaaatattgtaaaatgttgtatgtaaaacaaggtttcgtttccaaaatgtgttgccttaaaaatgattaattcatgaggaatttgaaaattcaaactcatatttttatttaagaactgaaatttaaaatgagtttcatatcatgctatcctcaaagttgctaattaaaaaatatcttttgtagctaagatagtttgaggagctttaaaaagcattttctatgttttcgtggggccaggaaaaaaatgctaaggaaaggataagtataaatatttgtactaattagaaatacggttttaactaaagctatacggtaaacctattctttttcgtttccttccctgtaataattagtcattatagtcttgcctgttaagtctggttataaatgactattgattctagtataaaagaatatgcttagaaatttcgcataaattggctgaacttattttaagataggttatatttaacttttgtctttattggttttatctgatgaccagggacgtggctgtggataaataacagtccggtctcctttgtcaactggaacacaggagatccctctggtgaacggaatgattgtgtagctttacatgcgtcttct

SEQ ID NO: 302497 - DNA, 199 bp, Homo sapiens
ccggagtcagatcacacagcatggattcctttccatggtcactgttactatattgagtcctcatatacaagaaactggggccaagcttctctggaatgtcttcgaatgggtgagtgccacatttcctgaaggaaaactccataatcatctattctggggtccactgacactatacatgaaatatacaaagaatgtaaaa

SEQ ID NO: 302498 - DNA, 410 bp, Homo sapiens
caagttcttgtttgtttgttttgctttctttaaaaatataggattaaccagttccttgacctcaggactctggattggacttaacagtctgagcttcaacagcggttggcagtggagtgaccgcagtcctttccgatatttgaactggttaccaggtagggttaagcctgtttgtgtcgaattaatccaaatttaagtcatctagacgccccgaagacgtttattatctcacctgttgatctcaaagagaagaattgggagacttcatcaaatacagttcatttcaccttgttttgaaatctatgctagatttccatttactgaattgtaaggttataccagcttcctgggatagggatttgtctgccaggattctcacacaaaacaataaaggtctctgtttaaagttt

SEQ ID NO: 302499 - DNA, 720 bp, Homo sapiens
taatttttaaaatacccaaagaattgagcaaaaaggactttggcaaggcaggttgttggatttaaaaccgttctcccattaatgccaaagccagcagaggtaccaactatagctccacggccagaagataccagcagctctgcctttactgaaatttcagctggagaaaggtccacagcacaatgaggcttttcacaggcattgttttctgctccttggtcatgggagtcaccagtgaaagctggcgttcgtttttcaaggaggctctccaaggggttggggacatgggcagagcctattgggacataatgatatccaatcaccaaaattcaaacagatatctctatgctcggggaaactatgatgctgcccaaagaggacctgggggtgtctgggctgctaaactcatcagccgttccagggtctatcttcagggattaatagactactatttatttggaaacagcagcactgtattggaggactcgaagtccaacgagaaagctgaggaatggggccggagtggcaaagaccccgaccgcttcagacctgacggcctgcctaagaaatactgagcttcctgctcctctgctctcagggaaactgggctgtgagccacacacttctccccccagacagggacacagggtcactgagctttgtgtccccaggaactggtatagggcacctagaggtgttcaataaatgtttgtcaaattg

SEQ ID NO: 302500 - DNA, 666 bp, Homo sapiens
taatttttaaaatacccaaagaattgagcaaaaaggactttggcaaggcaggttgttggatttaaaaccgttctcccattaatgccaaagccagcagaggtaccaactatagctccacggccagaagataccagcagctctgcctttactgaaatttcagctggagaaaggtccacagcacaatgaggcttttcacaggcattgttttctgctccttggtcatgggagtcaccagtgaaagctggcgttcgtttttcaaggaggctctccaaggggttggggacatgggcagagcctattgggacataatgatatccaatcaccgacctgggggtgtctgggctgctaaactcatcagccgttccagggtctatcttcagggattaatagactactatttatttggaaacagcagcactgtattggaggactcgaagtccaacgagaaagctgaggaatggggccggagtggcaaagaccccgaccgcttcagacctgacggcctgcctaagaaatactgagcttcctgctcctctgctctcagggaaactgggctgtgagccacacacttctccccccagacagggacacagggtcactgagctttgtgtccccaggaactggtatagggcacctagaggtgttcaataaatgtttgtcaaattg

SEQ ID NO: 302501 - DNA, 880 bp, Homo sapiens
  misc_feature (852)..(852): n is a, c, g, or t
  misc_feature (855)..(855): n is a, c, g, or t
  misc_feature (863)..(863): n is a, c, g, or t
cctgcacttaaggcactctgttatttagactcatcttactgtacctgttccttagaccttccataatgctactgtctcactgaaacatttaaattttaccctttagactgtagcctggatattattcttgtagtttacctctttaaaaacaaaacaaaacaaaacaaaaaactccccttcctcactgcccaatataaaaggcaaatgtgtacatggcagagtttgtgtgttgtcttgaaagattcaggtatgttgcctttatggtttcccccttctacatttcttagactacatttagagaactgtggccgttatctggaagtaaccatttgcactggagttctatgctctcgcacctttccaaagttaacagattttggggttgtgttgtcacccaagagattgttgtttgccatactttgtctgaaaaattcctttgtgtttctattgacttcaatgatagtaagaaaagtggttgttagttatagatgtctaggtacttcaggggcacttcattgagagttttgtcttggatattcttgaaagtttatatttttataattttttcttacatcagatgtttctttgcagtggcttaatgtttgaaattattttgtggctttttttgtaaatattgaaatgtagcaataatgtcttttgaatattcccaagcccatgagtccttgaaaatattttttatatatacagtaactttatgtgtaaatacataagcggcgtaagtttaaaggatgttggtgttccacgtgttttattcctgtatgttgtccaattgttgacagttctgaagaattctaataaaatgtacatatataaatccaaccacaaaaacanagnacgtaagngccgcgggcttattccc

SEQ ID NO: 302502 - DNA, 1205 bp, Homo sapiens
cgccggccggacggacgccgctcccgccgcctccgctccgcccgccgcgccgcgcgcccttgctcggcatgtcggcggccgtggcgtgcgtggattacttcgccgccgacgtgctcatggccatctcttcgggcgccgtggtgcaccgcgggcggcccggccccgagggcgcgggccccgccgccggcctggatgtgcgcgcggcgcgccgcgaggccgcctcacccgggaccccggggccacccccgccgccccccgccgcttctggcccgggccccggcgccgccgcggcgccccacctgctggccgccagcatcctggccgacctgcgcggcggacccggagccgccccggggggcgcctcgcccgcctcctcctcctcagccgcctcgtccccgtcctcgggccgcgcccccggcgccgcgccctccgccgccgccaagagccaccgctgtcccttcccggactgcgccaaagcctactacaagtcctcgcacctaaagtcgcacctgcggacgcacacaggggaacgcccttttgcttgtgactggcagggctgcgacaagaagttcgcccgctccgacgagctggcccgccaccaccggacgcacacgggcgagaagcgcttctcctgccctctgtgctccaagcgcttcacccgcagtgaccacctggccaagcacgcccgccgccaccccggcttccacccggacctgctccggcgccctggtgcccgcagtacctcccccagcgactcgctgccctgcagcctggccgggagccctgcgcccagccccgcgcccagcccagcccccgcaggcctgtagggccctcgtgcagcccaccctgaccgccaggatgcttctgccatccaggggtgtagtgaggacccacggggagcctgggccccttccagccgtgggcaaaccctgaagacacccctgcccccctccagagagtgaggagggggcctgagactggacctgggtctgcctgacctcagagcagtgtccaggggcttggagagacctgcgcccacccctccactctcccaggagtcgctgatcactgggacctggttccagccgtttgcaggggaggcggctccgagaggcgtgtgctttccgtgggtggcgcccctcccccgccctgcctggcctcatccttgtatttaattaattaaacaagcccctttttaaacccta

SEQ ID NO: 302503 - DNA, 2429 bp, Homo sapiens
acgcggtcgggcggcgagcggatggccgccccggcggcagtggcgggggctccgggggcccagcgaggggaacgcccttttgcttgtgactggcagggctgcgacaagaagttcgcccgctccgacgagctggcccgccaccaccggacgcacacgggcgagaagcgcttctcctgccctctgtgctccaagcgcttcacccgcagtgaccacctggccaagcacgcccgccgccaccccggcttccacccggacctgctccggcgccctggtgcccgcagtacctcccccagcgactcgctgccctgcagcctggccgggagccctgcgcccagccccgcgcccagcccagcccccgcaggcctgtagggccctcgtgcagcccaccctgaccgccaggatgcttctgccatccaggggtgtagtgaggacccacggggagcctgggccccttccagccgtgggcaaaccctgaagacacccctgcccccctccagagagtgaggagggggcctgagactggacctgggtctgcctgacctcagaggtggctctcaggatgggtgacggggggcttgtgtctgtaaatagccatgatactaactttcttcccatctgtgcaacggggcccccccagggcagctaggaggtcctcccctctcctctccaccaccccgtgctgcccccctcccggggtggggtttgggggggtggagtggacttctgggagccggcccggggaaagcaccccctgccccatccctgcagattgggatgaagtgttcagacagccatagaggagtcgggggttgacacggcccctgcctctccccaccccaccccaccccaccgaaagccatgggagtagttcagggaaatgggggtgcagcccagccaccccccattcgggtactcaatctcaggtgtccacaagttctgcccacggtaggggctgcctggccccccagacctcgggggtagagccaggagtggggcagcgttaggatgcccggaggggctccaggtgttgcttctgagacctgggatggggagggaggggacctctgggttcttccaaagaacatttgactcagtggggtcgggagggaatcctggcttatttattttcctctgtcctcgggtgtgggggccctagctcgccctctctgggtgggtgggtgagagaggctgcaggggaggctggcaccgggcttgggcctccagtccctgccttgctgactttggccgttgcggtatcacgtgacaatcaactctcccttaacgacgactgcggctgttgggctgcgctgccctccctggcctgcaggtggggccgtggagcccatgcccgccggggttgcaggctcttccgggcctgggctgcagcctggcccggccctgcttccctggcctcccctccttctcctgggtgcttggaagaggtgggtcctggcccgtggttgaggtcttgcctcgtggactggaagcagagggctggctgtgcagcctcctggggtagctcgttttttttgcaccgggtagaatattttttcaggcacggattcctttttttctgggcccccatgggtggtccggcatcctcagggggtgtgagtgtgtgtggggggtctctgagctgaacttgggtggggtggggacttgttcctcgggggccacctttgtgtccttgtcagcggtcgtcctgctgtggcctgggttgcatttcctcttggggggggtattgaggacccccagcctggaatgagaagggtccccggttccatgtcagacccagaaaggtggatccccccactgttggctgcaggaggtttttggtacccccttttgttccagaaccgtcctgcctctcgcttggggacaggggggctttggatggcactggtgtgcacctggacccagccccggcctggcaggatccagggatgggtgcctgggatcctggggggagggaggcaggggacgcccttctggagctgggctcggagggtcctgccccatccagccctcggctctctgtgttctctgtccctagcctcaaaccctcttctggcagcgctagtgagatgccttagtctgtgggggtgggtgggggactggggccccgttttcctttgtgagtcttggttggccccagccctggcaggggcctgtctggagcaggggtaggtagggctgtgggttccagaactctataactgggcccctctccagtgtccaggggcttggagagacctgcgcccacccctccactctcccaggagtcgctgatcactgggacctggttccagccgtttgcaggggaggcggctccgagaggcgtgtgctttccgtgggtggcgcccctcccccgccctgcctggcctcatccttgtatttaattaattaaacaagcccctttttaaacccta

SEQ ID NO: 302504 - DNA, 2596 bp, Homo sapiens
cgccggccggacggacgccgctcccgccgcctccgctccgcccgccgcgccgcgcgcccttgctcggcatgtcggcggccgtggcgtgcgtggattacttcgccgccgacgtgctcatggccatctcttcgggcgccgtggtgcaccgcgggcggcccggccccgagggcgcgggccccgccgccggcctggatgtgcgcgcggcgcgccgcgaggccgcctcacccgggaccccggggccacccccgccgccccccgccgcttctggcccgggccccggcgccgccgcggcgccccacctgctggccgccagcatcctggccgacctgcgcggcggacccggagccgccccggggggcgcctcgcccgcctcctcctcctcagccgcctcgtccccgtcctcgggccgcgcccccggcgccgcgccctccgccgccgccaagagccaccgctgtcccttcccggactgcgccaaagcctactacaagtcctcgcacctaaagtcgcacctgcggacgcacacaggggaacgcccttttgcttgtgactggcagggctgcgacaagaagttcgcccgctccgacgagctggcccgccaccaccggacgcacacgggcgagaagcgcttctcctgccctctgtgctccaagcgcttcacccgcagtgaccacctggccaagcacgcccgccgccaccccggcttccacccggacctgctccggcgccctggtgcccgcagtacctcccccagcgactcgctgccctgcagcctggccgggagccctgcgcccagccccgcgcccagcccagcccccgcaggcctgtagggccctcgtgcagcccaccctgaccgccaggatgcttctgccatccaggggtgtagtgaggacccacggggagcctgggccccttccagccgtgggcaaaccctgaagacacccctgcccccctccagagagtgaggagggggcctgagactggacctgggtctgcctgacctcagaggtggctctcaggatgggtgacggggggcttgtgtctgtaaatagccatgatactaactttcttcccatctgtgcaacggggcccccccagggcagctaggaggtcctcccctctcctctccaccaccccgtgctgcccccctcccggggtggggtttgggggggtggagtggacttctgggagccggcccggggaaagcaccccctgccccatccctgcagattgggatgaagtgttcagacagccatagaggagtcgggggttgacacggcccctgcctctccccaccccaccccaccccaccgaaagccatgggagtagttcagggaaatgggggtgcagcccagccaccccccattcgggtactcaatctcaggtgtccacaagttctgcccacggtaggggctgcctggccccccagacctcgggggtagagccaggagtggggcagcgttaggatgcccggaggggctccaggtgttgcttctgagacctgggatggggagggaggggacctctgggttcttccaaagaacatttgactcagtggggtcgggagggaatcctggcttatttattttcctctgtcctcgggtgtgggggccctagctcgccctctctgggtgggtgggtgagagaggctgcaggggaggctggcaccgggcttgggcctccagtccctgccttgctgactttggccgttgcggtatcacgtgacaatcaactctcccttaacgacgactgcggctgttgggctgcgctgccctccctggcctgcaggtggggccgtggagcccatgcccgccggggttgcaggctcttccgggcctgggctgcagcctggcccggccctgcttccctggcctcccctccttctcctgggtgcttggaagaggtgggtcctggcccgtggttgaggtcttgcctcgtggactggaagcagagggctggctgtgcagcctcctggggtagctcgttttttttgcaccgggtagaatattttttcaggcacggattcctttttttctgggcccccatgggtggtccggcatcctcagggggtgtgagtgtgtgtggggggtctctgagctgaacttgggtggggtggggacttgttcctcgggggccacctttgtgtccttgtcagcggtcgtcctgctgtggcctgggttgcatttcctcttggggggggtattgaggacccccagcctggaatgagaagggtccccggttccatgtcagacccagaaaggtggatccccccactgttggctgcaggaggtttttggtacccccttttgttccagaaccgtcctgcctctcgcttggggacaggggggctttggatggcactggtgtgcacctggacccagccccggcctggcaggatccagggatgggtgcctgggatcctggggggagggaggcaggggacgcccttctggagctgggctcggagggtcctgccccatccagccctcggctctctgtgttctctgtccctagcctcaaaccctcttctggcagcgctagtgagatgccttagtctgtgggggtgggtggttgtctttattgttatctcttttatttt

SEQ ID NO: 302505 - DNA, 2887 bp, Homo sapiens
cgccggccggacggacgccgctcccgccgcctccgctccgcccgccgcgccgcgcgcccttgctcggcatgtcggcggccgtggcgtgcgtggattacttcgccgccgacgtgctcatggccatctcttcgggcgccgtggtgcaccgcgggcggcccggccccgagggcgcgggccccgccgccggcctggatgtgcgcgcggcgcgccgcgaggccgcctcacccgggaccccggggccacccccgccgccccccgccgcttctggcccgggccccggcgccgccgcggcgccccacctgctggccgccagcatcctggccgacctgcgcggcggacccggagccgccccggggggcgcctcgcccgcctcctcctcctcagccgcctcgtccccgtcctcgggccgcgcccccggcgccgcgccctccgccgccgccaagagccaccgctgtcccttcccggactgcgccaaagcctactacaagtcctcgcacctaaagtcgcacctgcggacgcacacaggggaacgcccttttgcttgtgactggcagggctgcgacaagaagttcgcccgctccgacgagctggcccgccaccaccggacgcacacgggcgagaagcgcttctcctgccctctgtgctccaagcgcttcacccgcagtgaccacctggccaagcacgcccgccgccaccccggcttccacccggacctgctccggcgccctggtgcccgcagtacctcccccagcgactcgctgccctgcagcctggccgggagccctgcgcccagccccgcgcccagcccagcccccgcaggcctgtagggccctcgtgcagcccaccctgaccgccaggatgcttctgccatccaggggtgtagtgaggacccacggggagcctgggccccttccagccgtgggcaaaccctgaagacacccctgcccccctccagagagtgaggagggggcctgagactggacctgggtctgcctgacctcagaggtggctctcaggatgggtgacggggggcttgtgtctgtaaatagccatgatactaactttcttcccatctgtgcaacggggcccccccagggcagctaggaggtcctcccctctcctctccaccaccccgtgctgcccccctcccggggtggggtttgggggggtggagtggacttctgggagccggcccggggaaagcaccccctgccccatccctgcagattgggatgaagtgttcagacagccatagaggagtcgggggttgacacggcccctgcctctccccaccccaccccaccccaccgaaagccatgggagtagttcagggaaatgggggtgcagcccagccaccccccattcgggtactcaatctcaggtgtccacaagttctgcccacggtaggggctgcctggccccccagacctcgggggtagagccaggagtggggcagcgttaggatgcccggaggggctccaggtgttgcttctgagacctgggatggggagggaggggacctctgggttcttccaaagaacatttgactcagtggggtcgggagggaatcctggcttatttattttcctctgtcctcgggtgtgggggccctagctcgccctctctgggtgggtgggtgagagaggctgcaggggaggctggcaccgggcttgggcctccagtccctgccttgctgactttggccgttgcggtatcacgtgacaatcaactctcccttaacgacgactgcggctgttgggctgcgctgccctccctggcctgcaggtggggccgtggagcccatgcccgccggggttgcaggctcttccgggcctgggctgcagcctggcccggccctgcttccctggcctcccctccttctcctgggtgcttggaagaggtgggtcctggcccgtggttgaggtcttgcctcgtggactggaagcagagggctggctgtgcagcctcctggggtagctcgttttttttgcaccgggtagaatattttttcaggcacggattcctttttttctgggcccccatgggtggtccggcatcctcagggggtgtgagtgtgtgtggggggtctctgagctgaacttgggtggggtggggacttgttcctcgggggccacctttgtgtccttgtcagcggtcgtcctgctgtggcctgggttgcatttcctcttggggggggtattgaggacccccagcctggaatgagaagggtccccggttccatgtcagacccagaaaggtggatccccccactgttggctgcaggaggtttttggtacccccttttgttccagaaccgtcctgcctctcgcttggggacaggggggctttggatggcactggtgtgcacctggacccagccccggcctggcaggatccagggatgggtgcctgggatcctggggggagggaggcaggggacgcccttctggagctgggctcggagggtcctgccccatccagccctcggctctctgtgttctctgtccctagcctcaaaccctcttctggcagcgctagtgagatgccttagtctgtgggggtgggtgggggactggggccccgttttcctttgtgagtcttggttggccccagccctggcaggggcctgtctggagcaggggtaggtagggctgtgggttccagaactctataactgggcccctctccagtgtccaggggcttggagagacctgcgcccacccctccactctcccaggagtcgctgatcactgggacctggttccagccgtttgcaggggaggcggctccgagaggcgtgtgctttccgtgggtggcgcccctcccccgccctgcctggcctcatccttgtatttaattaattaaacaagcccctttttaaacccta

SEQ ID NO: 302506 - DNA, 3043 bp, Homo sapiens
cgccggccggacggacgccgctcccgccgcctccgctccgcccgccgcgccgcgcgcccttgctcggcatgtcggcggccgtggcgtgcgtggattacttcgccgccgacgtgctcatggccatctcttcgggcgccgtggtgcaccgcgggcggcccggccccgagggcgcgggccccgccgccggcctggatgtgcgcgcggcgcgccgcgaggccgcctcacccgggaccccggggccacccccgccgccccccgccgcttctggcccgggccccggcgccgccgcggcgccccacctgctggccgccagcatcctggccgacctgcgcggcggacccggagccgccccggggggcgcctcgcccgcctcctcctcctcagccgcctcgtccccgtcctcgggccgcgcccccggcgccgcgccctccgccgccgccaagagccaccgctgtcccttcccggactgcgccaaagcctactacaagtcctcgcacctaaagtcgcacctgcggacgcacacaggggaacgcccttttgcttgtgactggcagggctgcgacaagaagttcgcccgctccgacgagctggcccgccaccaccggacgcacacgggcgagaagcgcttctcctgccctctgtgctccaagcgcttcacccgcagtgaccacctggccaagcacgcccgccgccaccccggcttccacccggacctgctccggcgccctggtgcccgcagtacctcccccagcgactcgctgccctgcagcctggccgggagccctgcgcccagccccgcgcccagcccagcccccgcaggcctgtagggccctcgtgcagcccaccctgaccgccaggatgcttctgccatccaggggtgtagtgaggacccacggggagcctgggccccttccagccgtgggcaaaccctgaagacacccctgcccccctccagagagtgaggagggggcctgagactggacctgggtctgcctgacctcagaggtggctctcaggatgggtgacggggggcttgtgtctgtaaatagccatgatactaactttcttcccatctgtgcaacggggcccccccagggcagctaggaggtcctcccctctcctctccaccaccccgtgctgcccccctcccggggtggggtttgggggggtggagtggacttctgggagccggcccggggaaagcaccccctgccccatccctgcagattgggatgaagtgttcagacagccatagaggagtcgggggttgacacggcccctgcctctccccaccccaccccaccccaccgaaagccatgggagtagttcagggaaatgggggtgcagcccagccaccccccattcgggtactcaatctcaggtgtccacaagttctgcccacggtaggggctgcctggccccccagacctcgggggtagagccaggagtggggcagcgttaggatgcccggaggggctccaggtgttgcttctgagacctgggatggggagggaggggacctctgggttcttccaaagaacatttgactcagtggggtcgggagggaatcctggcttatttattttcctctgtcctcgggtgtgggggccctagctcgccctctctgggtgggtgggtgagagaggctgcaggggaggctggcaccgggcttgggcctccagtccctgccttgctgactttggccgttgcggtatcacgtgacaatcaactctcccttaacgacgactgcggctgttgggctgcgctgccctccctggcctgcaggtggggccgtggagcccatgcccgccggggttgcaggctcttccgggcctgggctgcagcctggcccggccctgcttccctggcctcccctccttctcctgggtgcttggaagaggtgggtcctggcccgtggttgaggtcttgcctcgtggactggaagcagagggctggctgtgcagcctcctggggtagctcgttttttttgcaccgggtagaatattttttcaggcacggattcctttttttctgggcccccatgggtggtccggcatcctcagggggtgtgagtgtgtgtggggggtctctgagctgaacttgggtggggtggggacttgttcctcgggggccacctttgtgtccttgtcagcggtcgtcctgctgtggcctgggttgcatttcctcttggggggggtattgaggacccccagcctggaatgagaagggtccccggttccatgtcagacccagaaaggtggatccccccactgttggctgcaggaggtttttggtacccccttttgttccagaaccgtcctgcctctcgcttggggacaggggggctttggatggcactggtgtgcacctggacccagccccggcctggcaggatccagggatgggtgcctgggatcctggggggagggaggcaggggacgcccttctggagctgggctcggagggtcctgccccatccagccctcggctctctgtgttctctgtccctagcctcaaaccctcttctggcagcgctagtgagatgccttagtctgtgggggtgggtgggggactggggccccgttttcctttgtgagtcttggttggccccagccctggcaggggcctgtctggagcaggggtaggtagggctgtgggttccagaactctataactgggcccctctccagtgtccaggggcttggagagacctgcgcccacccctccactctcccaggagtcgctgatcactgggacctggttccagccgtttgcaggggaggcggctccgagaggcgtgtgctttccgtgggtggcgcccctcccccgccctgcctggcctcatccttgtatttaattaattaaacaagcccctttttaaaccctaaaaaaaaaaagaaaaaaacacagcagcggagcgacagaagcaggtaaaagaacagagaggaaagacgaggaggacaggacagaagagagaagagaagaagaagacacgatgacaaagaggaacagcagagacaacacacaaagaaggagagaagag

SEQ ID NO: 302507 - DNA, 1791 bp, Homo sapiens
cgccggccggacggacgccgctcccgccgcctccgctccgcccgccgcgccgcgcgcccttgctcggcatgtcggcggccgtggcgtgcgtggattacttcgccgccgacgtgctcatggccatctcttcgggcgccgtggtgcaccgcgggcggcccggccccgagggcgcgggccccgccgccggcctggatgtgcgcgcggcgcgccgcgaggccgcctcacccgggaccccggggccacccccgccgccccccgccgcttctggcccgggccccggcgccgccgcggcgccccacctgctggccgccagcatcctggccgacctgcgcggcggacccggagccgccccggggggcgcctcgcccgcctcctcctcctcagccgcctcgtccccgtcctcgggccgcgcccccggcgccgcgccctccgccgccgccaagagccaccgctgtcccttcccggactgcgccaaagcctactacaagtcctcgcacctaaagtcgcacctgcggacgcacacaggggaacgcccttttgcttgtgactggcagggctgcgacaagaagttcgcccgctccgacgagctggcccgccaccaccggacgcacacgggcgagaagcgcttctcctgccctctgtgctccaagcgcttcacccgcagtgaccacctggccaagcacgcccgccgccaccccggcttccacccggacctgctccggcgccctggtgcccgcagtacctcccccagcgactcgctgccctgcagcctggccgggagccctgcgcccagccccgcgcccagcccagcccccgcaggcctgtagggccctcgtgcagcccaccctgaccgccaggatgcttctgccatccaggggtgtagtgaggacccacggggagcctgggccccttccagccgtgggcaaaccctgaagacacccctgcccccctccagagagtgaggagggggcctgagactggacctgggtctgcctgacctcagaggtggctctcaggatgggtgacggggggcttgtgtctgtaaatagccatgatactaactttcttcccatctgtgcaacggggcccccccagggcagctaggaggtcctcccctctcctctccaccaccccgtgctgcccccctcccggggtggggtttgggggggtggagtggacttctgggagccggcccggggaaagcaccccctgccccatccctgcagattgggatgaagtgttcagacagccatagaggagtcgggggttgacacggcccctgcctctccccaccccaccccaccccaccgaaagccatgggagtagttcagggaaatgggggtgcagcccagccaccccccattcgggtactcaatctcaggtgtccacaagttctgcccacggtaggggctgcctggccccccagacctcgggggtagagccaggagtggggcagcgttaggatgcccggaggggctccaggtgttgcttctgagacctgggatggggagggaggggacctctgggttcttccaaagaacatttgactcagtggggtcgggagggaatcctggcttatttattttcctctcagtgtccaggggcttggagagacctgcgcccacccctccactctcccaggagtcgctgatcactgggacctggttccagccgtttgcaggggaggcggctccgagaggcgtgtgctttccgtgggtggcgcccctcccccgccctgcctggcctcatccttgtatttaattaattaaacaagcccctttttaaacccta

SEQ ID NO: 302508 - DNA, 2916 bp, Homo sapiens
gcccaggtgactgactaatccgccgccttcaggagacagaattggccaaggcctgaaggccccggagtgcaccagcggcatgtacaaagagaccgtctactccgccttcaatctgctcatgcattacccacccccctcgggagcagggcagcacccccagccgcagcccccgctgcacaaggccaatcagcccccccacggtgtcccccaactctctctctacgaacatttcaacagcccacatcccacccctgcacctgcggacatcagccagaagcaagttcacaggcctctgcagacccctgacctctctggcttctactccctgacctcaggcagcatggggcagctcccccacactgtgagctggttcacccacccatccttgatgctaggttctggtgtacctggtcacccagcagccatcccccacccggccattgtgcccccctcagggaagcaggagctgcagcccttcgaccgcaacctgaagacacaagcagagtccaaggcagagaaggaggccaagaagccaaccatcaagaagcccctcaatgccttcatgctgtacatgaaggagatgagagccaaggtcattgcagagtgcacacttaaggagagcgctgccatcaaccagatcctgggccgcaggtggcacgcgctgtcgcgagaagagcaggccaagtactatgagctggcccgcaaggagaggcagctgcacatgcagctatacccaggctggtcagcgcgggacaactacgggaagaagaagaggcggtcgagggaaaagcaccaagaatccaccacagaccctggctcgcctaagaaatgccgtgctcgctttggcctcaaccagcagacggattggtgtggtccgtgcagataactctcttcactattcctaggaggaaaaagaaatgcattcggtacttacccggagaaggccgctgccccagccccgttccttccgatgacagtgctctaggctgccccgggtccccagctccccaggactcaccctcataccatctgctgccccgcttccccacagaactgcttactagccctgcggagccggcacctacatccccaggtctctccactgctctcagcctcccaaccccagggcccccacaggccccccgcagcaccctgcagagcacacaggtacagcaacaggaatctcagagacaggtggcctagcaggcacaggacacctggccgcctccaggagcctaccccctgaaagtgacagagacccagatctcatggaaactggccaggggtcctgttaacgtcatctcagggtccagaccctgaagatttcagaggctgcagaacttctgcctgaacctggggtcatcgattcaaactgctccaagtggtgggaatcagatctgtcttgatgtgtcatctaattaagggaatcccttgtacctatggctgcctgcatctattctttgtaccatctgtcttgccagccagaagcctctgcctccctagcttttctgctataggtcagagatgggctgaactgagcctagctaccttctctacccatctcccccatcccccactgccacaccctccccattcagacacttcatggaccaagaatgagctggtttgtcaaacaacatgtgagcatggtcacaagcacaaagctcaagatgacagctcttctaaggaaatggagaagctctgtttataaaaacaaaaacaaaaccagctgctactcataagttggaccagaggaagccccttactatgatctcaggagcttgcaagaagcaggaaggggaatggaataggttaagtttaggcctatcaacctaagcaacagaaataatctgacactaccttatcaggcaaattggggaggggagggtgtatctagctctagttcaaattatttggaagtgttccctgagaaacccaccagcctaagaagctctggccccaggcttgtcactagcagctgcagtcaacagttcaaagaagtcatggcccaaatccagtgtgcacccctccccattcacagagcctttttcacaattccatttccagttcatctatggcagtccagccagctcctgggcagcttgagagggcaaacccaaaacctcatgacagccagagcctgtctttcagcattcagtccgcctggccggctccagtttccccatggggctgcgggacagaggaccattacaactagatcaaggagcccagaaaacctccagtagtggacaacaggttttcaccatagcctacgttaacccatttttgagccaagcttcaaccctcagccttgaaaaacaagtctttaatttaatttttgttttttgcctaaatccaaagaaaaagggctgccgggccaggcgcggtggctcacgcctgtaatcccagcactttggcaggccgaggcaggtggatcacctgacgtcagtagtttgagaccagcctggccaacatggtgaaaccctgtatctactaaaaatacaaaaattagccggacgtggtggtgcgcgcatgtaatcccagctactcgggaggctgaggcggaagaatcacttgaacccgggaggcggaggttccagtgagccgagatggcgctattgcactccagtctgggtaacagggagactgcatctcaaaaaaaaaaaaaaaaaaaaaaagggctgtccatgtattcacacacccctcaaaaaaagcctttagttcctactttagccactggtttctcagaatccaaagatcacatattctagtgtaacactgcaagaagtcttgagaaaaagattattgtagtgttcaaaatatttttgtattgttaatgcatcatcatagaaaaacttttaaacatgagaataaagatactttttactgggtttgtttttcaaagcctgaaaaaaa

SEQ ID NO: 302509 - DNA, 2820 bp, Homo sapiens
gcccaggtgactgactaatccgccgccttcaggagacagaattggccaaggcctgaaggccccggagtgcaccagcggcatgtacaaagagaccgtctactccgccttcaatctgctcatgcattacccacccccctcgggagcagggcagcacccccagccgcagcccccgctgcacaaggccaatcagcccccccacggtgtcccccaactctctctctacgaacatttcaacagcccacatcccacccctgcacctgcggacatcagccagaagcaagttcacaggcctctgcagacccctgacctctctggcttctactccctgacctcaggcagcatggggcagctcccccacactgtgagctggttcacccacccatccttgatgctaggttctggtgtacctggtcacccagcagccatcccccacccggccattgtgcccccctcagggaagcaggagctgcagcccttcgaccgcaacctgaagacacaagcagagtccaaggcagagaaggaggccaagaagccaaccatcaagaagcccctcaatgccttcatgctgtacatgaaggagatgagagccaaggtcattgcagagtgcacacttaaggagagcgctgccatcaaccagatcctgggccgcaggtggcacgcgctgtcgcgagaagagcaggccaagtactatgagctggcccgcaaggagaggcagctgcacatgcagctatacccaggctggtcagcgcgggacaactacgggaagaagaagaggcggtcgagggaaaagcaccaagaatccaccacaggaggaaaaagaaatgcattcggtacttacccggagaaggccgctgccccagccccgttccttccgatgacagtgctctaggctgccccgggtccccagctccccaggactcaccctcataccatctgctgccccgcttccccacagaactgcttactagccctgcggagccggcacctacatccccaggtctctccactgctctcagcctcccaaccccagggcccccacaggccccccgcagcaccctgcagagcacacaggtacagcaacaggaatctcagagacaggtggcctagcaggcacaggacacctggccgcctccaggagcctaccccctgaaagtgacagagacccagatctcatggaaactggccaggggtcctgttaacgtcatctcagggtccagaccctgaagatttcagaggctgcagaacttctgcctgaacctggggtcatcgattcaaactgctccaagtggtgggaatcagatctgtcttgatgtgtcatctaattaagggaatcccttgtacctatggctgcctgcatctattctttgtaccatctgtcttgccagccagaagcctctgcctccctagcttttctgctataggtcagagatgggctgaactgagcctagctaccttctctacccatctcccccatcccccactgccacaccctccccattcagacacttcatggaccaagaatgagctggtttgtcaaacaacatgtgagcatggtcacaagcacaaagctcaagatgacagctcttctaaggaaatggagaagctctgtttataaaaacaaaaacaaaaccagctgctactcataagttggaccagaggaagccccttactatgatctcaggagcttgcaagaagcaggaaggggaatggaataggttaagtttaggcctatcaacctaagcaacagaaataatctgacactaccttatcaggcaaattggggaggggagggtgtatctagctctagttcaaattatttggaagtgttccctgagaaacccaccagcctaagaagctctggccccaggcttgtcactagcagctgcagtcaacagttcaaagaagtcatggcccaaatccagtgtgcacccctccccattcacagagcctttttcacaattccatttccagttcatctatggcagtccagccagctcctgggcagcttgagagggcaaacccaaaacctcatgacagccagagcctgtctttcagcattcagtccgcctggccggctccagtttccccatggggctgcgggacagaggaccattacaactagatcaaggagcccagaaaacctccagtagtggacaacaggttttcaccatagcctacgttaacccatttttgagccaagcttcaaccctcagccttgaaaaacaagtctttaatttaatttttgttttttgcctaaatccaaagaaaaagggctgccgggccaggcgcggtggctcacgcctgtaatcccagcactttggcaggccgaggcaggtggatcacctgacgtcagtagtttgagaccagcctggccaacatggtgaaaccctgtatctactaaaaatacaaaaattagccggacgtggtggtgcgcgcatgtaatcccagctactcgggaggctgaggcggaagaatcacttgaacccgggaggcggaggttccagtgagccgagatggcgctattgcactccagtctgggtaacagggagactgcatctcaaaaaaaaaaaaaaaaaaaaaaagggctgtccatgtattcacacacccctcaaaaaaagcctttagttcctactttagccactggtttctcagaatccaaagatcacatattctagtgtaacactgcaagaagtcttgagaaaaagattattgtagtgttcaaaatatttttgtattgttaatgcatcatcatagaaaaacttttaaacatgagaataaagatactttttactgggtttgtttttcaaagcctgaaaaaaa

SEQ ID NO: 302510 - DNA, 404 bp, Homo sapiens
  misc_feature (331)..(331): n is a, c, g, or t
  misc_feature (355)..(356): n is a, c, g, or t
gcaacctcccagacaagccaaacctgagatgaggaggccaataagggttttctggacaggggagacgcacctccaggaattgagtgcccagaaagaccaagaggctttctagggggtgggactgcttgggcaaagtcttgggggctagtgggcggggtactggacactgtgacttgagtggtacccccttcgctgaggcctgtggttttggccaccacttttctttgacagctgggcttcctgtataccctcatcccagtgtcttcctccctcaggactcgccacactcacccaccctccttctcatttttcagcacatggcccttcatcntctacccttcctctattttattannaccattccacccctcaattccttacccgttccttcattctttccatct

SEQ ID NO: 302511 - DNA, 3015 bp, Homo sapiens
gccgagctcaagtcgtcgctcgtgaacgagtccgagggcgcggccggcggcgcagggatcccgggggtcccgggggccggcgccggggcccgcggcgaggccgaggctctcgggcgggaacacgctgcgcagagactcttcccggacaaacttccagagcccctggaggacggcctgaaggccccggagtgcaccagcggcatgtacaaagagaccgtctactccgccttcaatctgctcatgcattacccacccccctcgggagcagggcagcacccccagccgcagcccccgctgcacaaggccaatcagcccccccacggtgtcccccaactctctctctacgaacatttcaacagcccacatcccacccctgcacctgcggacatcagccagaagcaagttcacaggcctctgcagacccctgacctctctggcttctactccctgacctcaggcagcatggggcagctcccccacactgtgagctggttcacccacccatccttgatgctaggttctggtgtacctggtcacccagcagccatcccccacccggccattgtgcccccctcagggaagcaggagctgcagcccttcgaccgcaacctgaagacacaagcagagtccaaggcagagaaggaggccaagaagccaaccatcaagaagcccctcaatgccttcatgctgtacatgaaggagatgagagccaaggtcattgcagagtgcacacttaaggagagcgctgccatcaaccagatcctgggccgcaggtggcacgcgctgtcgcgagaagagcaggccaagtactatgagctggcccgcaaggagaggcagctgcacatgcagctatacccaggctggtcagcgcgggacaactacgggaagaagaagaggcggtcgagggaaaagcaccaagaatccaccacagaccctggctcgcctaagaaatgccgtgctcgctttggcctcaaccagcagacggattggtgtggtccgtgcaggaggaaaaagaaatgcattcggtacttacccggagaaggccgctgccccagccccgttccttccgatgacagtgctctaggctgccccgggtccccagctccccaggactcaccctcataccatctgctgccccgcttccccacagaactgcttactagccctgcggagccggcacctacatccccaggtctctccactgctctcagcctcccaaccccagggcccccacaggccccccgcagcaccctgcagagcacacaggtacagcaacaggaatctcagagacaggtggcctagcaggcacaggacacctggccgcctccaggagcctaccccctgaaagtgacagagacccagatctcatggaaactggccaggggtcctgttaacgtcatctcagggtccagaccctgaagatttcagaggctgcagaacttctgcctgaacctggggtcatcgattcaaactgctccaagtggtgggaatcagatctgtcttgatgtgtcatctaattaagggaatcccttgtacctatggctgcctgcatctattctttgtaccatctgtcttgccagccagaagcctctgcctccctagcttttctgctataggtcagagatgggctgaactgagcctagctaccttctctacccatctcccccatcccccactgccacaccctccccattcagacacttcatggaccaagaatgagctggtttgtcaaacaacatgtgagcatggtcacaagcacaaagctcaagatgacagctcttctaaggaaatggagaagctctgtttataaaaacaaaaacaaaaccagctgctactcataagttggaccagaggaagccccttactatgatctcaggagcttgcaagaagcaggaaggggaatggaataggttaagtttaggcctatcaacctaagcaacagaaataatctgacactaccttatcaggcaaattggggaggggagggtgtatctagctctagttcaaattatttggaagtgttccctgagaaacccaccagcctaagaagctctggccccaggcttgtcactagcagctgcagtcaacagttcaaagaagtcatggcccaaatccagtgtgcacccctccccattcacagagcctttttcacaattccatttccagttcatctatggcagtccagccagctcctgggcagcttgagagggcaaacccaaaacctcatgacagccagagcctgtctttcagcattcagtccgcctggccggctccagtttccccatggggctgcgggacagaggaccattacaactagatcaaggagcccagaaaacctccagtagtggacaacaggttttcaccatagcctacgttaacccatttttgagccaagcttcaaccctcagccttgaaaaacaagtctttaatttaatttttgttttttgcctaaatccaaagaaaaagggctgccgggccaggcgcggtggctcacgcctgtaatcccagcactttggcaggccgaggcaggtggatcacctgacgtcagtagtttgagaccagcctggccaacatggtgaaaccctgtatctactaaaaatacaaaaattagccggacgtggtggtgcgcgcatgtaatcccagctactcgggaggctgaggcggaagaatcacttgaacccgggaggcggaggttccagtgagccgagatggcgctattgcactccagtctgggtaacagggagactgcatctcaaaaaaaaaaaaaaaaaaaaaaagggctgtccatgtattcacacacccctcaaaaaaagcctttagttcctactttagccactggtttctcagaatccaaagatcacatattctagtgtaacactgcaagaagtcttgagaaaaagattattgtagtgttcaaaatatttttgtattgttaatgcatcatcatagaaaaacttttaaacatgagaataaagatactttttactgggtttgtttttcaaagcctgaaaaaaa

SEQ ID NO: 302512 - DNA, 3355 bp, Homo sapiens
gccgagctcaagtcgtcgctcgtgaacgagtccgagggcgcggccggcggcgcagggatcccgggggtcccgggggccggcgccggggcccgcggcgaggccgaggctctcgggcgggaacacgctgcgcagagactcttcccggacaaacttccagagcccctggaggacggcctgaaggccccggagtgcaccagcggcatgtacaaagagaccgtctactccgccttcaatctgctcatgcattacccacccccctcgggagcagggcagcacccccagccgcagcccccgctgcacaaggccaatcagcccccccacggtgtcccccaactctctctctacgaacatttcaacagcccacatcccacccctgcacctgcggacatcagccagaagcaagttcacaggcctctgcagacccctgacctctctggcttctactccctgacctcaggcagcatggggcagctcccccacactgtgagctggttcacccacccatccttgatgctaggttctggtgtacctggtcacccagcagccatcccccacccggccattgtgcccccctcagggaagcaggagctgcagcccttcgaccgcaacctgaagacacaagcagagtccaaggcagagaaggaggccaagaagccaaccatcaagaagcccctcaatgccttcatgctgtacatgaaggagatgagagccaaggtcattgcagagtgcacacttaaggagagcgctgccatcaaccagatcctgggccgcaggtggcacgcgctgtcgcgagaagagcaggccaagtactatgagctggcccgcaaggagaggcagctgcacatgcagctatacccaggctggtcagcgcgggacaactacgggaagaagaagaggcggtcgagggaaaagcaccaagaatccaccacagcccagcttgaggactgggatggctgggcaaggaagccataggcattgcggccccttgccttggtgcagatgtgagtcccacaaacacatctggagaagctcaaaggccgggactgggagatgactcccttggaagacaggagagatgactcccttggaagacagatgacagcccataggcctagtgacaaaaggcccctttccgaccttgtggctgttctgggaactgcacctgtcctaggtctgggccagaccaagcagaatggcagtctgaggacactgacttaccacccaagtcccaggaagagaggacaaggaatcagccaggcctgtgcaaaggcagcattttttggttgtggagtatgactatgaattcaccctctgtttacagataactctcttcactattcctaggaggaaaaagaaatgcattcggtacttacccggagaaggccgctgccccagccccgttccttccgatgacagtgctctaggctgccccgggtccccagctccccaggactcaccctcataccatctgctgccccgcttccccacagaactgcttactagccctgcggagccggcacctacatccccaggtctctccactgctctcagcctcccaaccccagggcccccacaggccccccgcagcaccctgcagagcacacaggtacagcaacaggaatctcagagacaggtggcctagcaggcacaggacacctggccgcctccaggagcctaccccctgaaagtgacagagacccagatctcatggaaactggccaggggtcctgttaacgtcatctcagggtccagaccctgaagatttcagaggctgcagaacttctgcctgaacctggggtcatcgattcaaactgctccaagtggtgggaatcagatctgtcttgatgtgtcatctaattaagggaatcccttgtacctatggctgcctgcatctattctttgtaccatctgtcttgccagccagaagcctctgcctccctagcttttctgctataggtcagagatgggctgaactgagcctagctaccttctctacccatctcccccatcccccactgccacaccctccccattcagacacttcatggaccaagaatgagctggtttgtcaaacaacatgtgagcatggtcacaagcacaaagctcaagatgacagctcttctaaggaaatggagaagctctgtttataaaaacaaaaacaaaaccagctgctactcataagttggaccagaggaagccccttactatgatctcaggagcttgcaagaagcaggaaggggaatggaataggttaagtttaggcctatcaacctaagcaacagaaataatctgacactaccttatcaggcaaattggggaggggagggtgtatctagctctagttcaaattatttggaagtgttccctgagaaacccaccagcctaagaagctctggccccaggcttgtcactagcagctgcagtcaacagttcaaagaagtcatggcccaaatccagtgtgcacccctccccattcacagagcctttttcacaattccatttccagttcatctatggcagtccagccagctcctgggcagcttgagagggcaaacccaaaacctcatgacagccagagcctgtctttcagcattcagtccgcctggccggctccagtttccccatggggctgcgggacagaggaccattacaactagatcaaggagcccagaaaacctccagtagtggacaacaggttttcaccatagcctacgttaacccatttttgagccaagcttcaaccctcagccttgaaaaacaagtctttaatttaatttttgttttttgcctaaatccaaagaaaaagggctgccgggccaggcgcggtggctcacgcctgtaatcccagcactttggcaggccgaggcaggtggatcacctgacgtcagtagtttgagaccagcctggccaacatggtgaaaccctgtatctactaaaaatacaaaaattagccggacgtggtggtgcgcgcatgtaatcccagctactcgggaggctgaggcggaagaatcacttgaacccgggaggcggaggttccagtgagccgagatggcgctattgcactccagtctgggtaacagggagactgcatctcaaaaaaaaaaaaaaaaaaaaaaagggctgtccatgtattcacacacccctcaaaaaaagcctttagttcctactttagccactggtttctcagaatccaaagatcacatattctagtgtaacactgcaagaagtcttgagaaaaagattattgtagtgttcaaaatatttttgtattgttaatgcatcatcatagaaaaacttttaaacatgagaataaagatactttttactgggtttgtttttcaaagcctgaaaaaaa

SEQ ID NO: 302513 - DNA, 3023 bp, Homo sapiens
gccgagctcaagtcgtcgctcgtgaacgagtccgagggcgcggccggcggcgcagggatcccgggggtcccgggggccggcgccggggcccgcggcgaggccgaggctctcgggcgggaacacgctgcgcagagactcttcccggacaaacttccagagcccctggaggacggcctgaaggccccggagtgcaccagcggcatgtacaaagagaccgtctactccgccttcaatctgctcatgcattacccacccccctcgggagcagggcagcacccccagccgcagcccccgctgcacaaggccaatcagcccccccacggtgtcccccaactctctctctacgaacatttcaacagcccacatcccacccctgcacctgcggacatcagccagaagcaagttcacaggcctctgcagacccctgacctctctggcttctactccctgacctcaggcagcatggggcagctcccccacactgtgagctggttcacccacccatccttgatgctaggttctggtgtacctggtcacccagcagccatcccccacccggccattgtgcccccctcagggaagcaggagctgcagcccttcgaccgcaacctgaagacacaagcagagtccaaggcagagaaggaggccaagaagccaaccatcaagaagcccctcaatgccttcatgctgtacatgaaggagatgagagccaaggtcattgcagagtgcacacttaaggagagcgctgccatcaaccagatcctgggccgcaggtggcacgcgctgtcgcgagaagagcaggccaagtactatgagctggcccgcaaggagaggcagctgcacatgcagctatacccaggctggtcagcgcgggacaactacgggaagaagaagaggcggtcgagggaaaagcaccaagaatccaccacagatgggatccctgcctgtaccatcctgagcccttaatctgaaaaagcaaggtgacaacaacacagaaccatctggttgccaggaggaaaaagaaatgcattcggtacttacccggagaaggccgctgccccagccccgttccttccgatgacagtgctctaggctgccccgggtccccagctccccaggactcaccctcataccatctgctgccccgcttccccacagaactgcttactagccctgcggagccggcacctacatccccaggtctctccactgctctcagcctcccaaccccagggcccccacaggccccccgcagcaccctgcagagcacacaggtacagcaacaggaatctcagagacaggtggcctagcaggcacaggacacctggccgcctccaggagcctaccccctgaaagtgacagagacccagatctcatggaaactggccaggggtcctgttaacgtcatctcagggtccagaccctgaagatttcagaggctgcagaacttctgcctgaacctggggtcatcgattcaaactgctccaagtggtgggaatcagatctgtcttgatgtgtcatctaattaagggaatcccttgtacctatggctgcctgcatctattctttgtaccatctgtcttgccagccagaagcctctgcctccctagcttttctgctataggtcagagatgggctgaactgagcctagctaccttctctacccatctcccccatcccccactgccacaccctccccattcagacacttcatggaccaagaatgagctggtttgtcaaacaacatgtgagcatggtcacaagcacaaagctcaagatgacagctcttctaaggaaatggagaagctctgtttataaaaacaaaaacaaaaccagctgctactcataagttggaccagaggaagccccttactatgatctcaggagcttgcaagaagcaggaaggggaatggaataggttaagtttaggcctatcaacctaagcaacagaaataatctgacactaccttatcaggcaaattggggaggggagggtgtatctagctctagttcaaattatttggaagtgttccctgagaaacccaccagcctaagaagctctggccccaggcttgtcactagcagctgcagtcaacagttcaaagaagtcatggcccaaatccagtgtgcacccctccccattcacagagcctttttcacaattccatttccagttcatctatggcagtccagccagctcctgggcagcttgagagggcaaacccaaaacctcatgacagccagagcctgtctttcagcattcagtccgcctggccggctccagtttccccatggggctgcgggacagaggaccattacaactagatcaaggagcccagaaaacctccagtagtggacaacaggttttcaccatagcctacgttaacccatttttgagccaagcttcaaccctcagccttgaaaaacaagtctttaatttaatttttgttttttgcctaaatccaaagaaaaagggctgccgggccaggcgcggtggctcacgcctgtaatcccagcactttggcaggccgaggcaggtggatcacctgacgtcagtagtttgagaccagcctggccaacatggtgaaaccctgtatctactaaaaatacaaaaattagccggacgtggtggtgcgcgcatgtaatcccagctactcgggaggctgaggcggaagaatcacttgaacccgggaggcggaggttccagtgagccgagatggcgctattgcactccagtctgggtaacagggagactgcatctcaaaaaaaaaaaaaaaaaaaaaaagggctgtccatgtattcacacacccctcaaaaaaagcctttagttcctactttagccactggtttctcagaatccaaagatcacatattctagtgtaacactgcaagaagtcttgagaaaaagattattgtagtgttcaaaatatttttgtattgttaatgcatcatcatagaaaaacttttaaacatgagaataaagatactttttactgggtttgtttttcaaagcctgaaaaaaa

SEQ ID NO: 302514 - DNA, 2084 bp, Homo sapiens
gccgagctcaagtcgtcgctcgtgaacgagtccgagggcgcggccggcggcgcagggatcccgggggtcccgggggccggcgccggggcccgcggcgaggccgaggctctcgggcgggaacacgctgcgcagagactcttcccggacaaacttccagagcccctggaggacggcctgaaggccccggagtgcaccagcggcatgtacaaagagaccgtctactccgccttcaatctgctcatgcattacccacccccctcgggagcagggcagcacccccagccgcagcccccgctgcacaaggccaatcagcccccccacggtgtcccccaactctctctctacgaacatttcaacagcccacatcccacccctgcacctgcggacatcagccagaagcaagttcacaggcctctgcagacccctgacctctctggcttctactccctgacctcaggcagcatggggcagctcccccacactgtgagctggttcacccacccatccttgatgctaggttctggtgtacctggtcacccagcagccatcccccacccggccattgtgcccccctcagggaagcaggagctgcagcccttcgaccgcaacctgaagacacaagcagagtccaaggcagagaaggaggccaagaagccaaccatcaagaagcccctcaatgccttcatgctgtacatgaaggagatgagagccaaggtcattgcagagtgcacacttaaggagagcgctgccatcaaccagatcctgggccgcaggtggcacgcgctgtcgcgagaagagcaggccaagtactatgagctggcccgcaaggagaggcagctgcacatgcagctatacccaggctggtcagcgcgggacaactacgggaagaagaagaggcggtcgagggaaaagcaccaagaatccaccacagataactctcttcactattcctaggaggaaaaagaaatgcattcggtacttacccggagaaggccgctgccccagccccgttccttccgatgacagtgctctaggctgccccgggtccccagctccccaggactcaccctcataccatctgctgccccgcttccccacagaactgcttactagccctgcggagccggcacctacatccccaggtctctccactgctctcagcctcccaaccccagggcccccacaggccccccgcagcaccctgcagagcacacaggtacagcaacaggaatctcagagacaggtggcctagcaggcacaggacacctggccgcctccaggagcctaccccctgaaagtgacagagacccagatctcatggaaactggccaggggtcctgttaacgtcatctcagggtccagaccctgaagatttcagaggctgcagaacttctgcctgaacctggggtcatcgattcaaactgctccaagtggtgggaatcagatctgtcttgatgtgtcatctaattaagggaatcccttgtacctatggctgcctgcatctattctttgtaccatctgtcttgccagccagaagcctctgcctccctagcttttctgctataggtcagagatgggctgaactgagcctagctaccttctctacccatctcccccatcccccactgccacaccctccccattcagacacttcatggaccaagaatgagctggtttgtcaaacaacatgtgagcatggtcacaagcacaaagctcaagatgacagctcttctaaggaaatggagaagctctgtttataaaaacaaaaacaaaaccagctgctactcataagttggaccagaggaagccccttactatgatctcaggagcttgcaagaagcaggaaggggaatggaataggttaagtttaggcctatcaacctaagcaacagaaataatctgacactaccttatcaggcaaattggggaggggagggtgccttatacaacctttgcctattatagtaaatcattcaaggattcataatttggcaaggacagaaaagtgtatttattttgtttaatgaatgaggggacctgctatccgcccttaatgtaggtttggcccaagagtcctccatttt

SEQ ID NO: 302515 - DNA, 1333 bp, Homo sapiens
gccgagctcaagtcgtcgctcgtgaacgagtccgagggcgcggccggcggcgcagggatcccgggggtcccgggggccggcgccggggcccgcggcgaggccgaggctctcgggcgggaacacgctgcgcagagactcttcccggacaaacttccagagcccctggaggacggcctgaaggccccggagtgcaccagcggcatgtacaaagagaccgtctactccgccttcaatctgctcatgcattacccacccccctcgggagcagggcagcacccccagccgcagcccccgctgcacaaggccaatcagcccccccacggtgtcccccaactctctctctacgaacatttcaacagcccacatcccacccctgcacctgcggacatcagccagaagcaagttcacaggcctctgcagacccctgacctctctggcttctactccctgacctcaggcagcatggggcagctcccccacactgtgagctggttcacccacccatccttgatgctaggttctggtgtacctggtcacccagcagccatcccccacccggccattgtgcccccctcagggaagcaggagctgcagcccttcgaccgcaacctgaagacacaagcagagtccaaggcagagaaggaggccaagaagccaaccatcaagaagcccctcaatgccttcatgctgtacatgaaggagatgagagccaaggtcattgcagagtgcacacttaaggagagcgctgccatcaaccagatcctgggccgcaggtggcacgcgctgtcgcgagaagagcaggccaagtactatgagctggcccgcaaggagaggcagctgcacatgcagctatacccaggctggtcagcgcgggacaactacgtgagtgcctagtgacacacagcaggggtgggcaggggaccctttgagataccatgccccaggccacaatctcagtaaggaacgcagaactactgtcctgaaggcaccgatgaggaagggcacggagggtccaaggcctcccatggctgcctcagaagaggacaagcccacatcctattctccactccagaatatgctcacacatgagctgttacccaacatttgattgggccacatgggcagaaggggagaaaggggtctggaagtcacctccttccattcaaactggagaccagattggggtgagggaagagcttctaaatgcactccatagcagcctagcaagaccagcaatcaagaaacaccagcaccccaaggtaggaggggcctgtacgcccagaatcccagggttacccaagctaggcagcaggctgtgggtatcccaatgtct

SEQ ID NO: 302516 - DNA, 161 bp, Homo sapiens
tgggatcttaaggcccctgtaggaggttctaggatgcagtaactgctgatatggcctgccaggtcaggctagcccactcactcagcttctctcctctgcagttcacaggcctctgcagacccctgacctctctggcttctactccctgacctcaggcagca

SEQ ID NO: 302517 - DNA, 422 bp, Homo sapiens
ccctctggcatggctgtgagcagaccctggctcgcctaagaaatgccgtgctcgctttggcctcaaccagcagacggattggtgtggtccgtgcaggtgggtttgtccccaccatcgttctccctttgctttaagctgcttccctgactctgcacatgttccactgggcctgcagcccactcctttggcccctcagcccactagcatactcagcagattgggagcccaggcctcctgagaatagtagtaaatactgaacacagcgcgtggagaagaccacttgggtctaagtgcaggaggattggagagaaagacacagaatgttccagaaaggaaggacagactcaagaaggcagctctgatgccagtgggcctagcaggtcctcagcaaacagacagctcagccaccactaagggggcct

SEQ ID NO: 302518 - DNA, 327 bp, Homo sapiens
tgctcgccctctgccctgctctacccctctggcatggctgtgagcagaccctggctcgcctaagaaatgccgtgctcgctttggcctcaaccagcagacggattggtgtggtccgtgcaggtgggtttgtccccaccatcgttctccctttgctttaagctgcttccctgactctgcacatgttccactgggcctgcagcccactcctttggcccctcagcccactagcatactcagcagattgggagcccaggcctcctgagaatagtagtaaatactgaacacagcgcgtggagaagaccacttgggtctaagtgcaggaggatt

SEQ ID NO: 302519 - DNA, 2965 bp, Homo sapiens
gccgagctcaagtcgtcgctcgtgaacgagtccgagggcgcggccggcggcgcagggatcccgggggtcccgggggccggcgccggggcccgcggcgaggccgaggctctcgggcgggaacacgctgcgcagagactcttcccggacaaacttccagagcccctggaggacggcctgaaggccccggagtgcaccagcggcatgtacaaagagaccgtctactccgccttcaatctgctcatgcattacccacccccctcgggagcagggcagcacccccagccgcagcccccgctgcacaaggccaatcagcccccccacggtgtcccccaactctctctctacgaacatttcaacagcccacatcccacccctgcacctgcggacatcagccagaagcaagttcacaggcctctgcagacccctgacctctctggcttctactccctgacctcaggcagcatggggcagctcccccacactgtgagctggttcacccacccatccttgatgctaggttctggtgtacctggtcacccagcagccatcccccacccggccattgtgcccccctcagggaagcaggagctgcagcccttcgaccgcaacctgaagacacaagcagagtccaaggcagagaaggaggccaagaagccaaccatcaagaagcccctcaatgccttcatgctgtacatgaaggagatgagagccaaggtcattgcagagtgcacacttaaggagagcgctgccatcaaccagatcctgggccgcaggtggcacgcgctgtcgcgagaagagcaggccaagtactatgagctggcccgcaaggagaggcagctgcacatgcagctatacccaggctggtcagcgcgggacaactacgggaagaagaagaggcggtcgagggaaaagcaccaagaatccaccacagataactctcttcactattcctaggaggaaaaagaaatgcattcggtacttacccggagaaggccgctgccccagccccgttccttccgatgacagtgctctaggctgccccgggtccccagctccccaggactcaccctcataccatctgctgccccgcttccccacagaactgcttactagccctgcggagccggcacctacatccccaggtctctccactgctctcagcctcccaaccccagggcccccacaggccccccgcagcaccctgcagagcacacaggtacagcaacaggaatctcagagacaggtggcctagcaggcacaggacacctggccgcctccaggagcctaccccctgaaagtgacagagacccagatctcatggaaactggccaggggtcctgttaacgtcatctcagggtccagaccctgaagatttcagaggctgcagaacttctgcctgaacctggggtcatcgattcaaactgctccaagtggtgggaatcagatctgtcttgatgtgtcatctaattaagggaatcccttgtacctatggctgcctgcatctattctttgtaccatctgtcttgccagccagaagcctctgcctccctagcttttctgctataggtcagagatgggctgaactgagcctagctaccttctctacccatctcccccatcccccactgccacaccctccccattcagacacttcatggaccaagaatgagctggtttgtcaaacaacatgtgagcatggtcacaagcacaaagctcaagatgacagctcttctaaggaaatggagaagctctgtttataaaaacaaaaacaaaaccagctgctactcataagttggaccagaggaagccccttactatgatctcaggagcttgcaagaagcaggaaggggaatggaataggttaagtttaggcctatcaacctaagcaacagaaataatctgacactaccttatcaggcaaattggggaggggagggtgtatctagctctagttcaaattatttggaagtgttccctgagaaacccaccagcctaagaagctctggccccaggcttgtcactagcagctgcagtcaacagttcaaagaagtcatggcccaaatccagtgtgcacccctccccattcacagagcctttttcacaattccatttccagttcatctatggcagtccagccagctcctgggcagcttgagagggcaaacccaaaacctcatgacagccagagcctgtctttcagcattcagtccgcctggccggctccagtttccccatggggctgcgggacagaggaccattacaactagatcaaggagcccagaaaacctccagtagtggacaacaggttttcaccatagcctacgttaacccatttttgagccaagcttcaaccctcagccttgaaaaacaagtctttaatttaatttttgttttttgcctaaatccaaagaaaaagggctgccgggccaggcgcggtggctcacgcctgtaatcccagcactttggcaggccgaggcaggtggatcacctgacgtcagtagtttgagaccagcctggccaacatggtgaaaccctgtatctactaaaaatacaaaaattagccggacgtggtggtgcgcgcatgtaatcccagctactcgggaggctgaggcggaagaatcacttgaacccgggaggcggaggttccagtgagccgagatggcgctattgcactccagtctgggtaacagggagactgcatctcaaaaaaaaaaaaaaaaaaaaaaagggctgtccatgtattcacacacccctcaaaaaaagcctttagttcctactttagccactggtttctcagaatccaaagatcacatattctagtgtaacactgcaagaagtcttgagaaaaagattattgtagtgttcaaaatatttttgtattgttaatgcatcatcatagaaaaacttttaaacatgagaataaagatactttttactgggtttgtttttcaaagcctgaaaaaaa

SEQ ID NO: 302520 - DNA, 3303 bp, Homo sapiens
gcccaggtgactgactaatccgccgccttcaggagacagaattggccaaggcctgaaggccccggagtgcaccagcggcatgtacaaagagaccgtctactccgccttcaatctgctcatgcattacccacccccctcgggagcagggcagcacccccagccgcagcccccgctgcacaaggccaatcagcccccccacggtgtcccccaactctctctctacgaacatttcaacagcccacatcccacccctgcacctgcggacatcagccagaagcaagttcacaggcctctgcagacccctgacctctctggcttctactccctgacctcaggcagcatggggcagctcccccacactgtgagctggttcacccacccatccttgatgctaggttctggtgtacctggtcacccagcagccatcccccacccggccattgtgcccccctcagggaagcaggagctgcagcccttcgaccgcaacctgaagacacaagcagagtccaaggcagagaaggaggccaagaagccaaccatcaagaagcccctcaatgccttcatgctgtacatgaaggagatgagagccaaggtcattgcagagtgcacacttaaggagagcgctgccatcaaccagatcctgggccgcaggtggcacgcgctgtcgcgagaagagcaggccaagtactatgagctggcccgcaaggagaggcagctgcacatgcagctatacccaggctggtcagcgcgggacaactacgggaagaagaagaggcggtcgagggaaaagcaccaagaatccaccacagagacaaactggcccagagaactcaaggatggtaatggacaagagtcactgtccatgtcttcttcctctagcccagcttgaggactgggatggctgggcaaggaagccataggcattgcggccccttgccttggtgcagatgtgagtcccacaaacacatctggagaagctcaaaggccgggactgggagatgactcccttggaagacaggagagatgactcccttggaagacagatgacagcccataggcctagtgacaaaaggcccctttccgaccttgtggctgttctgggaactgcacctgtcctaggtctgggccagaccaagcagaatggcagtctgaggacactgacttaccacccaagtcccaggaagagaggacaaggaatcagccaggcctgtgcaaaggcagcattttttggttgtggagtatgactatgaattcaccctctgtttacagataactctcttcactattcctaggaggaaaaagaaatgcattcggtacttacccggagaaggccgctgccccagccccgttccttccgatgacagtgctctaggctgccccgggtccccagctccccaggactcaccctcataccatctgctgccccgcttccccacagaactgcttactagccctgcggagccggcacctacatccccaggtctctccactgctctcagcctcccaaccccagggcccccacaggccccccgcagcaccctgcagagcacacaggtacagcaacaggaatctcagagacaggtggcctagcaggcacaggacacctggccgcctccaggagcctaccccctgaaagtgacagagacccagatctcatggaaactggccaggggtcctgttaacgtcatctcagggtccagaccctgaagatttcagaggctgcagaacttctgcctgaacctggggtcatcgattcaaactgctccaagtggtgggaatcagatctgtcttgatgtgtcatctaattaagggaatcccttgtacctatggctgcctgcatctattctttgtaccatctgtcttgccagccagaagcctctgcctccctagcttttctgctataggtcagagatgggctgaactgagcctagctaccttctctacccatctcccccatcccccactgccacaccctccccattcagacacttcatggaccaagaatgagctggtttgtcaaacaacatgtgagcatggtcacaagcacaaagctcaagatgacagctcttctaaggaaatggagaagctctgtttataaaaacaaaaacaaaaccagctgctactcataagttggaccagaggaagccccttactatgatctcaggagcttgcaagaagcaggaaggggaatggaataggttaagtttaggcctatcaacctaagcaacagaaataatctgacactaccttatcaggcaaattggggaggggagggtgtatctagctctagttcaaattatttggaagtgttccctgagaaacccaccagcctaagaagctctggccccaggcttgtcactagcagctgcagtcaacagttcaaagaagtcatggcccaaatccagtgtgcacccctccccattcacagagcctttttcacaattccatttccagttcatctatggcagtccagccagctcctgggcagcttgagagggcaaacccaaaacctcatgacagccagagcctgtctttcagcattcagtccgcctggccggctccagtttccccatggggctgcgggacagaggaccattacaactagatcaaggagcccagaaaacctccagtagtggacaacaggttttcaccatagcctacgttaacccatttttgagccaagcttcaaccctcagccttgaaaaacaagtctttaatttaatttttgttttttgcctaaatccaaagaaaaagggctgccgggccaggcgcggtggctcacgcctgtaatcccagcactttggcaggccgaggcaggtggatcacctgacgtcagtagtttgagaccagcctggccaacatggtgaaaccctgtatctactaaaaatacaaaaattagccggacgtggtggtgcgcgcatgtaatcccagctactcgggaggctgaggcggaagaatcacttgaacccgggaggcggaggttccagtgagccgagatggcgctattgcactccagtctgggtaacagggagactgcatctcaaaaaaaaaaaaaaaaaaaaaaagggctgtccatgtattcacacacccctcaaaaaaagcctttagttcctactttagccactggtttctcagaatccaaagatcacatattctagtgtaacactgcaagaagtcttgagaaaaagattattgtagtgttcaaaatatttttgtattgttaatgcatcatcatagaaaaacttttaaacatgagaataaagatactttttactgggtttgtttttcaaagcctgaaaaaaa

SEQ ID NO: 302521 - DNA, 3372 bp, Homo sapiens
gcaacctcccagacaagccaaacctgagatgaggaggccaataagggttttctggacaggggagacgcacctccaggaattgagtgcccagaaagaccaagaggctttctagggggtgggactgcttgggcaaagtcttgggggctagtgggcggggtactggacactgtgacttgagtggtacccccttcgctgaggcctgtggttttggccaccacttttctttgacagctgggcttcctgtataccctcatcccagtgtcttcctccctcaggactcgccacactcacccaccctccttctcatttttcagcacaaggccaatcagcccccccacggtgtcccccaactctctctctacgaacatttcaacagcccacatcccacccctgcacctgcggacatcagccagaagcaagttcacaggcctctgcagacccctgacctctctggcttctactccctgacctcaggcagcatggggcagctcccccacactgtgagctggttcacccacccatccttgatgctaggttctggtgtacctggtcacccagcagccatcccccacccggccattgtgcccccctcagggaagcaggagctgcagcccttcgaccgcaacctgaagacacaagcagagtccaaggcagagaaggaggccaagaagccaaccatcaagaagcccctcaatgccttcatgctgtacatgaaggagatgagagccaaggtcattgcagagtgcacacttaaggagagcgctgccatcaaccagatcctgggccgcaggtggcacgcgctgtcgcgagaagagcaggccaagtactatgagctggcccgcaaggagaggcagctgcacatgcagctatacccaggctggtcagcgcgggacaactacgggaagaagaagaggcggtcgagggaaaagcaccaagaatccaccacagcccagcttgaggactgggatggctgggcaaggaagccataggcattgcggccccttgccttggtgcagatgtgagtcccacaaacacatctggagaagctcaaaggccgggactgggagatgactcccttggaagacaggagagatgactcccttggaagacagatgacagcccataggcctagtgacaaaaggcccctttccgaccttgtggctgttctgggaactgcacctgtcctaggtctgggccagaccaagcagaatggcagtctgaggacactgacttaccacccaagtcccaggaagagaggacaaggaatcagccaggcctgtgcaaaggcagcattttttggttgtggagtatgactatgaattcaccctctgtttacagataactctcttcactattcctaggaggaaaaagaaatgcattcggtacttacccggagaaggccgctgccccagccccgttccttccgatgacagtgctctaggctgccccgggtccccagctccccaggactcaccctcataccatctgctgccccgcttccccacagaactgcttactagccctgcggagccggcacctacatccccaggtctctccactgctctcagcctcccaaccccagggcccccacaggccccccgcagcaccctgcagagcacacaggtacagcaacaggaatctcagagacaggtggcctagcaggcacaggacacctggccgcctccaggagcctaccccctgaaagtgacagagacccagatctcatggaaactggccaggggtcctgttaacgtcatctcagggtccagaccctgaagatttcagaggctgcagaacttctgcctgaacctggggtcatcgattcaaactgctccaagtggtgggaatcagatctgtcttgatgtgtcatctaattaagggaatcccttgtacctatggctgcctgcatctattctttgtaccatctgtcttgccagccagaagcctctgcctccctagcttttctgctataggtcagagatgggctgaactgagcctagctaccttctctacccatctcccccatcccccactgccacaccctccccattcagacacttcatggaccaagaatgagctggtttgtcaaacaacatgtgagcatggtcacaagcacaaagctcaagatgacagctcttctaaggaaatggagaagctctgtttataaaaacaaaaacaaaaccagctgctactcataagttggaccagaggaagccccttactatgatctcaggagcttgcaagaagcaggaaggggaatggaataggttaagtttaggcctatcaacctaagcaacagaaataatctgacactaccttatcaggcaaattggggaggggagggtgtatctagctctagttcaaattatttggaagtgttccctgagaaacccaccagcctaagaagctctggccccaggcttgtcactagcagctgcagtcaacagttcaaagaagtcatggcccaaatccagtgtgcacccctccccattcacagagcctttttcacaattccatttccagttcatctatggcagtccagccagctcctgggcagcttgagagggcaaacccaaaacctcatgacagccagagcctgtctttcagcattcagtccgcctggccggctccagtttccccatggggctgcgggacagaggaccattacaactagatcaaggagcccagaaaacctccagtagtggacaacaggttttcaccatagcctacgttaacccatttttgagccaagcttcaaccctcagccttgaaaaacaagtctttaatttaatttttgttttttgcctaaatccaaagaaaaagggctgccgggccaggcgcggtggctcacgcctgtaatcccagcactttggcaggccgaggcaggtggatcacctgacgtcagtagtttgagaccagcctggccaacatggtgaaaccctgtatctactaaaaatacaaaaattagccggacgtggtggtgcgcgcatgtaatcccagctactcgggaggctgaggcggaagaatcacttgaacccgggaggcggaggttccagtgagccgagatggcgctattgcactccagtctgggtaacagggagactgcatctcaaaaaaaaaaaaaaaaaaaaaaagggctgtccatgtattcacacacccctcaaaaaaagcctttagttcctactttagccactggtttctcagaatccaaagatcacatattctagtgtaacactgcaagaagtcttgagaaaaagattattgtagtgttcaaaatatttttgtattgttaatgcatcatcatagaaaaacttttaaacatgagaataaagatactttttactgggtttgtttttcaaagcctgaaaaaaa

SEQ ID NO: 302522 - DNA, 1977 bp, Homo sapiens
gccgagctcaagtcgtcgctcgtgaacgagtccgagggcgcggccggcggcgcagggatcccgggggtcccgggggccggcgccggggcccgcggcgaggccgaggctctcgggcgggaacacgctgcgcagagactcttcccggacaaacttccagagcccctggaggacggcctgaaggccccggagtgcaccagcggcatgtacaaagagaccgtctactccgccttcaatctgctcatgcattacccacccccctcgggagcagggcagcacccccagccgcagcccccgctgcacaaggccaatcagcccccccacggtgtcccccaactctctctctacgaacatttcaacagcccacatcccacccctgcacctgcggacatcagccagaagcaagttcacaggcctctgcagacccctgacctctctggcttctactccctgacctcaggcagcatggggcagctcccccacactgtgagctggttcacccacccatccttgatgctaggttctggtgtacctggtcacccagcagccatcccccacccggccattgtgcccccctcagggaagcaggagctgcagcccttcgaccgcaacctgaagacacaagcagagtccaaggcagagaaggaggccaagaagccaaccatcaagaagcccctcaatgccttcatgctgtacatgaaggagatgagagccaaggtcattgcagagtgcacacttaaggagagcgctgccatcaaccagatcctgggccgcaggtggcacgcgctgtcgcgagaagagcaggccaagtactatgagctggcccgcaaggagaggcagctgcacatgcagctatacccaggctggtcagcgcgggacaactacgggaagaagaagaggcggtcgagggaaaagcaccaagaatccaccacagaccctggctcgcctaagaaatgccgtgctcgctttggcctcaaccagcagacggattggtgtggtccgtgcaggaggaaaaagaaatgcattcggtacttacccggagaaggccgctgccccagccccgttccttccgatgacagtgctctaggctgccccgggtccccagctccccaggactcaccctcataccatctgctgccccgcttccccacagaactgcttactagccctgcggagccggcacctacatccccaggtctctccactgctctcagcctcccaaccccagggcccccacaggccccccgcagcaccctgcagagcacacaggtacagcaacaggaatctcagagacaggtggcctagcaggcacaggacacctggccgcctccaggagcctaccccctgaaagtgacagagacccagatctcatggaaactggccaggggtcctgttaacgtcatctcagggtccagaccctgaagatttcagaggctgcagaacttctgcctgaacctggggtcatcgattcaaactgctccaagtggtgggaatcagaatcacctgacgtcagtagtttgagaccagcctggccaacatggtgaaaccctgtatctactaaaaatacaaaaattagccggacgtggtggtgcgcgcatgtaatcccagctactcgggaggctgaggcggaagaatcacttgaacccgggaggcggaggttccagtgagccgagatggcgctattgcactccagtctgggtaacagggagactgcatctcaaaaaaaaaaaaaaaaaaaaaaagggctgtccatgtattcacacacccctcaaaaaaagcctttagttcctactttagccactggtttctcagaatccaaagatcacatattctagtgtaacactgcaagaagtcttgagaaaaagattattgtagtgttcaaaatatttttgtattgttaatgcatcatcatagaaaaacttttaaacatgagaataaagatactttttactgggtttgtttttcaaagcctgaaaaaaa

SEQ ID NO: 302523 - DNA, 1426 bp, Homo sapiens
gccgagctcaagtcgtcgctcgtgaacgagtccgagggcgcggccggcggcgcagggatcccgggggtcccgggggccggcgccggggcccgcggcgaggccgaggctctcgggcgggaacacgctgcgcagagactcttcccggacaaacttccagagcccctggaggacggcctgaaggccccggagtgcaccagcggcatgtacaaagagaccgtctactccgccttcaatctgctcatgcattacccacccccctcgggagcagggcagcacccccagccgcagcccccgctgcacaaggccaatcagcccccccacggtgtcccccaactctctctctacgaacatttcaacagcccacatcccacccctgcacctgcggacatcagccagaagcaagttcacaggcctctgcagacccctgacctctctggcttctactccctgacctcaggcagcatggggcagctcccccacactgtgagctggcccagccctcctctctaccccctgtccccttcctgcggatatagacagcacttccctgcccccactgcagcccctggcgccccctaccccaggttcacccacccatccttgatgctaggttctggtgtacctggtcacccagcagccatcccccacccggccattgtgcccccctcagggaagcaggagctgcagcccttcgaccgcaacctgaagacacaagcagagtccaaggcagagaaggaggccaagaagccaaccatcaagaagcccctcaatgccttcatgctgtacatgaaggagatgagagccaaggtcattgcagagtgcacacttaaggagagcgctgccatcaaccagatcctgggccgcaggtggcacgcgctgtcgcgagaagagcaggccaagtactatgagctggcccgcaaggagaggcagctgcacatgcagctatacccaggctggtcagcgcgggacaactacgtgagtgcctagtgacacacagcaggggtgggcaggggaccctttgagataccatgccccaggccacaatctcagtaaggaacgcagaactactgtcctgaaggcaccgatgaggaagggcacggagggtccaaggcctcccatggctgcctcagaagaggacaagcccacatcctattctccactccagaatatgctcacacatgagctgttacccaacatttgattgggccacatgggcagaaggggagaaaggggtctggaagtcacctccttccattcaaactggagaccagattggggtgagggaagagcttctaaatgcactccatagcagcctagcaagaccagcaatcaagaaacaccagcaccccaaggtaggaggggcctgtacgcccagaatcccagggttacccaagctaggcagcaggctgtgggtatcccaatgtct

SEQ ID NO: 302524 - DNA, 963 bp, Homo sapiens
tgggactcagtccttaggtgttctttttcttttaagaaataacctcttacagttgtaaccattgcggctctgtccacttctcgttgctgctctgtggcacatatcggaagcagtacagcgcgcggctctacacgcttgggtagcgggataagtcactgttttctttatttctttaaaaaaaaaaaagttctgttgcaaacgactgctgttggattctgtgtgtgatgggaatgagccacctcagatgtggagggccctgaagaatccaacgcaaacagcacatccggtgtggtcgacgggtcctccaagagtttggggcgcggaccggagtaccttgcgtgcagttatgtcggcgtcggtagtgtctgtcatttcgcggttcttagaagagtacttgagctccactccgcagcgtctgaagttgctggacgcgtacctgctgtatatactgctgaccggggcgctgcagttcggttactgtctcctcgtggggaccttccccttcaactcttttctctcgggcttcatctcttgtgtggggagtttcatcctagcggtttgcctgagaatacagatcaacccacagaacaaagcggatttccaaggcatctccccagagcgagcctttgctgattttctctttgccagcaccatcctgcaccttgttgtcatgaactttgttggctgaatcattctcatttacttaattgaggagtaggagactaaaagaatgttcactctttgaatttcctggataagagttctggagatggcagcttattggacacatggattttcttcagatttgcacttactgctagctctgctttttatgcaggagaaaagcccagagttcactgtgtgtcagaacaactttctaacaaacatttattaatccagcctctgcctttcattaaatgtaaccttttgccttccaaattaaagaactccatgccactcctc

SEQ ID NO: 302525 - DNA, 720 bp, Homo sapiens
tacggctggagaagacgacagaagggggcaaacagcacatccggtgtggtcgacgggtcctccaagagtttggggcgcggaccggagtaccttgcgtgcagttatgtcggcgtcggtagtgtctgtcatttcgcggttcttagaagagtacttgagctccactccgcagcgtctgaagttgctggacgcgtacctgctgtatatactgctgaccggggcgctgcagttcggttactgtctcctcgtggggaccttccccttcaactcttttctctcgggcttcatctcttgtgtggggagtttcatcctagcggtttgcctgagaatacagatcaacccacagaacaaagcggatttccaaggcatctccccagagcgagcctttgctgattttctctttgccagcaccatcctgcaccttgttgtcatgaactttgttggctgaatcattctcatttacttaattgaggagtaggagactaaaagaatgttcactctttgaatttcctggataagagttctggagatggcagcttattggacacatggattttcttcagatttgcacttactgctagctctgctttttatgcaggagaaaagcccagagttcactgtgtgtcagaacaactttctaacaaacatttattaatccagcctctgcctttcattaaatgtaaccttttgccttccaaattaaagaactccatgccactcctc

SEQ ID NO: 302526 - DNA, 308 bp, Homo sapiens
atgattagaacaaactgattaaatggcactgtcttctgcccaggtgaaatagactgaagtcacgctaacttttctcagttcactctttgaatttcctggataagagttctggagatggcagcttattggacacatggattttcttcagatttgcacttactgctagctctgctttttatgcaggagaaaagcccagagttcactgtgtgtcagaacaactttctaacaaacatttattaatccagcctctgcctttcattaaatgtaaccttttgccttccaaattaaagaactccatgccactcctc

SEQ ID NO: 302527 - DNA, 691 bp, Homo sapiens
taaaaatccaacatgtaccttccagctgtctacaacacaagtgcatgctcgtcggacaagaggtcacagctaaggcaacaatccacatgagttgggaagggctcatttcacctgtcaaacactgctgctctcatgtggaatgcactgtggctttttggtcaagataattaccgtggaagatcctaggtggcagcaaatcccaggtgaacagactgagccgtggaggtggcataaggcaaccctagccgagtttgcctgagaatacagatcaacccacagaacaaagcggatttccaaggcatctccccagagcgagcctttgctgattttctctttgccagcaccatcctgcaccttgttgtcatgaactttgttggctgaatcattctcatttacttaattgaggagtaggagactaaaagaatgtaagtgatgatcatagtccttgtcctataatgttgattttaggaagagaaattggatgggactggttttgatcatggttggccaggctcccatactgctattgacatttgcagaattttccattggtctgcaaagtatgcattaatatcatcataattcatcagtgctactgctcttggtcattgccttgtctttctgttcttcaaatcattaaggtaatagaaaattaatgtttgtagctagtacaataatttctgtaccaata

SEQ ID NO: 302528 - DNA, 1469 bp, Homo sapiens
tacggctggagaagacgacagaagggggcaaacagcacatccggtgtggtcgacgggtcctccaagagtttggggcgcggaccggagtaccttgcgtgcagttatgtcggcgtcggtagtgtctgtcatttcgcggttcttagaagagtacttgagctccactccgcagcgtctgaagttgctggacgcgtacctgctgtatatactgctgaccggggcgctgcagttcggttactgtctcctcgtggggaccttccccttcaactcttttctctcgggcttcatctcttgtgtggggagtttcatcctagcggtttgcctgagaatacagatcaacccacagaacaaagcggatttccaaggcatctccccagagcgagcctttgctgattttctctttgccagcaccatcctgcaccttgttgtcatgaactttgttggctgaatcattctcatttacttaattgaggagtaggagactaaaagaatgttcactctttgaatttcctggataagagttctggagatggcagcttattggacacatggattttcttcagatttgcacttactgctagctctgctttttatgcaggagaaaagcccagagttcactgtgtgtcagaacaactttctaacaaacatttattaatccagcctctgcctttcattaaatgtaaccttttgccttccaaattaaagaactccatgccactcctcaaaaaaaaaaaaaaaaaaaaaaaaaaaaaaaaaaaaaaaaaaaaaaaaaaaaaaaaaaaaaaaaaaaaaaaaaaaaaaaaaaaaaaaaaaaaaaaaaaaaaaaaaaaaggggggggggggggaatcccgggcgagccgacaccaaactagacaataccagccctgttttttataaagacaggcaggcgccccacataagcgcggccataaattaacaacacgagccggacgcggcgtacaacaacgaggcgtgaagtagagagagacagcactgcttggttacgagcaattagagagcaacccacccccgccgtggggggagggaacataactgtagaccaaccaaccaccaaaaagataagtttccctcgaggcagaaaaacaacacgcgacgtaggatggctgaaacccccccgttttctgtggctcggtggcagaaaatgtcgctcgcgtgccgtctctctttaatcatactcttcacgggggcggtgagagagtacgaacacgggcaggaacggtagacgaaccgaaggccagcaacagcacaagtagtaagcgtcaaacagcaccgaaccgaggacgaccagcacgacacaacacaacgacagccgcagccgacagcaccctacgacgccaccgagccacgaacgcgcaccacaacgaccaaccagaccaagacaggcacaccaaaagcaccgcaggcagccagacgtccacagaccgaccactgacaggatgcagggcccccc

SEQ ID NO: 302529 - DNA, 983 bp, Homo sapiens
  misc_feature (836)..(836): n is a, c, g, or t
tacggctggagaagacgacagaagggggcaaacagcacatccggtgtggtcgacgggtcctccaagagtttggggcgcggaccggagtaccttgcgtgcagttatgtcggcgtcggtagtgtctgtcatttcgcggttcttagaagagtacttgagctccactccgcagcgtctgaagttgctggacgcgtacctgctgtatatactgctgaccggggcgctgcagttcggttactgtctcctcgtggggaccttccccttcaactcttttctctcgggcttcatctcttgtgtggggagtttcatcctagcggtttgcctgagaatacagatcaacccacagaacaaagcggatttccaaggcatctccccagagcgagcctttgctgattttctctttgccagcaccatcctgcaccttgttgtcatgaactttgttggctgaatcattctcatttacttaattgaggagtaggagactaaaagaatgttcactctttgaatttcctggataagagttctggagatggcagcttattggacacatggattttcttcagatttgcacttactgctagctctgctttttatgcaggagaaaagcccagagttcactgtgtgtcagaacaactttctaacaaacatttattaatccagcctctgcctttcattaaatgtaaccttttgccttccaaattaaagaactccatgccactcctcaaaaaaaaaaaaaaaaaaaaaaaaaaaaaaaaaaaaaaaaaaaaaaaaaaaaaaaaaaaaaaaaaaaaaaaaaaaaaaaaaaaaaaaaaaaaaaaaaaaaaaaaaaaaaaaaaaanaaaaaaacctggggtttttttttttttttttatttaaaaaggggcggtttttttttgggaaattttaaaaataaatttggaataaaaattggacccaaaaggtttggggtgggcccttttttgggataaacccaaaaaaaaagttta

SEQ ID NO: 302530 - DNA, 1496 bp, Homo sapiens
  misc_feature (15)..(15): n is a, c, g, or t
  misc_feature (30)..(30): n is a, c, g, or t
  misc_feature (33)..(34): n is a, c, g, or t
  misc_feature (36)..(36): n is a, c, g, or t
tgcggatcccccaancgcagagaggatacnaanntntaaatcacaaatttagtagaagtggcagctgacagggacaaacccgggtcctccaagagtttggggcgcggaccggagtaccttgcgtgcagttatgtcggcgtcggtagtgtctgtcatttcgcggttcttagaagagtacttgagctccactccgcagcgtctgaagttgctggacgcgtacctgctgtatatactgctgaccggggcgctgcagttcggttactgtctcctcgtggggaccttccccttcaactcttttctctcgggcttcatctcttgtgtggggagtttcatcctagcggtttgcctgagaatacagatcaacccacagaacaaagcggatttccaaggcatctccccagagcgagcctttgctgattttctctttgccagcaccatcctgcaccttgttgtcatgaactttgttggctgaatcattctcatttacttaattgaggagtaggagactaaaagaatgttcactctttgaatttcctggataagagttctggagatggcagcttattggacacatggattttcttcagatttgcacttactgctagctctgctttttatgcaggagaaaagcccagagttcactgtgtgtcagaacaactttctaacaaacatttattaatccagcctctgcctttcattaaatgtaaccttttgccttccaaattaaagaactccatgccactcctcaaaaaaaaaaaaaaaaaaaaaaaaaaaaaaaaaaaaaaaaaaaaaaaaaaaaaaaaaaaaaaaaaaaaaaaaaaaaaaaaaaaaaaaaaaaaaaaaaaaaaaaaaaaaggggggggggggggaatcccgggcgagccgacaccaaactagacaataccagccctgttttttataaagacaggcaggcgccccacataagcgcggccataaattaacaacacgagccggacgcggcgtacaacaacgaggcgtgaagtagagagagacagcactgcttggttacgagcaattagagagcaacccacccccgccgtggggggagggaacataactgtagaccaaccaaccaccaaaaagataagtttccctcgaggcagaaaaacaacacgcgacgtaggatggctgaaacccccccgttttctgtggctcggtggcagaaaatgtcgctcgcgtgccgtctctctttaatcatactcttcacgggggcggtgagagagtacgaacacgggcaggaacggtagacgaaccgaaggccagcaacagcacaagtagtaagcgtcaaacagcaccgaaccgaggacgaccagcacgacacaacacaacgacagccgcagccgacagcaccctacgacgccaccgagccacgaacgcgcaccacaacgaccaaccagaccaagacaggcacaccaaaagcaccgcaggcagccagacgtccacagaccgaccactgacaggatgcagggcccccc

SEQ ID NO: 302531 - DNA, 999 bp, Homo sapiens
tacggctggagaagacgacagaagggggcaaacagcacatccggtgtggtcgacgggtcctccaagagtttggggcgcggaccggagtaccttgcgtgcagttatgtcggcgtcggtagtgtctgtcatttcgcggttcttagaagagtacttgagctccactccgcagcgtctgaagttgctggacgcgtacctgctgtatatactgctgaccggggcgctgcagttcggttactgtctcctcgtggggaccttccccttcaactcttttctctcgggcttcatctcttgtgtggggagtttcatcctagcggtttgcctgagaatacagatcaacccacagaacaaagcggatttccaaggcatctccccagagcgagcctttgctgattttctctttgccagcaccatcctgcaccttgttgtcatgaactttgttggctgaatcattctcatttacttaattgaggagtaggagactaaaagaatgttcactctttgaatttcctggataagagttctggagatggcagcttattggacacatggattttcttcagatttgcacttactgctagctctgctttttatgcaggagaaaagcccagagttcactgtgtgtcagaacaactttctaacaaacatttattaatccagcctctgcctttcattaaatgtaaccttttgccttccaaattaaagaactccatgccactcctcaaaaaaaaaaaaaagggggcgccaaaaaatcctcgggggcccagttaggtaccagcttctgacaagggcctagggaggcgataaagcaagccggcgcgttaacgtcggtggcaccgcggttggcacttgggcaggaccaccctgcggccccacggcacacccgggataggcgggatatactcacggtaggtcacacgatctgggtgatggtcgtatgaccaccgagaggaggggggaggaaaagacagcacacagcagagcagcaagcaccacaacacg

SEQ ID NO: 302532 - DNA, 808 bp, Homo sapiens
tacggctggagaagacgacagaagggggcaaacagcacatccggtgtggtcgacgggtcctccaagagtttggggcgcggaccggagtaccttgcgtgcagttatgtcggcgtcggtagtgtctgtcatttcgcggttcttagaagagtacttgagctccactccgcagcgtctgaagttgctggacgcgtacctgctgtatatactgctgaccggggcgctgcagttcggttactgtctcctcgtggggaccttccccttcaactcttttctctcgggcttcatctcttgtgtggggagtttcatcctagcggtttgcctgagaatacagatcaacccacagaacaaagcggatttccaaggcatctccccagagcgagcctttgctgattttctctttgccagcaccatcctgcaccttgttgtcatgaactttgttggctgaatcattctcatttacttaattgaggagtaggagactaaaagaatgttcactctttgaatttcctggataagagttctggagatggcagcttattggacacatggattttcttcagatttgcacttactgctagctctgctttttatgcaggagaaaagcccagagttcactgtgtgtcagaacaactttctaacaaacatttattaatccagcctctgcctttcattaaatgtaaccttttgccttccaaattaaagaactccatgccactcctctaaataattattatagtatctgcctctcaatattactcattcgcctcccgccaccctcgcacatccccggggaaataaatataataaa

SEQ ID NO: 302533 - DNA, 973 bp, Homo sapiens
  misc_feature (914)..(914): n is a, c, g, or t
tgggactcagtccttaggtgttctttttcttttaagaaataacctcttacagttgtaaccattgcggctctgtccacttctcgttgctgctctgtggcacatatcggaagcagtacagcgcgcggctctacacgcttgggtagcgggataagtcactgttttctttatttctttaaaaaaaaaaaagttctgttgcaaacgactgctgttggattctgtgtgtgatgggaatgagccacctcagatgtggagggccctgaagaatccaacgcaaacagcacatccggtgtggtcgacgggtcctccaagagtttggggcgcggaccggagtaccttgcgtgcagttatgtcggcgtcggtagtgtctgtcatttcgcggttcttagaagagtacttgagctccactccgcagcgtctgaagttgctggacgcgtacctgctgtatatactgctgaccggggcgctgcagttcggttactgtctcctcgtggggaccttccccttcaactcttttctctcgggcttcatctcttgtgtggggagtttcatcctagcggtttgcctgagaatacagatcaacccacagaacaaagcggatttccaaggcatctccccagagcgagcctttgctgattttctctttgccagcaccatcctgcaccttgttgtcatgaactttgttggctgaatcattctcatttacttaattgaggagtaggagactaaaagaatgttcactctttgaatttcctggataagagttctggagatggcagcttattggacacatggattttcttcagatttgcacttactgctagctctgctttttatgcaggagtccagcctctgcctttcattaaatgtaaccttttgccttccaaattaaagaactccatgccactcctcaaatngacctaataggaggctcatgaccattcattggcgggcggtttacaacgtccattatggg

SEQ ID NO: 302534 - DNA, 1049 bp, Homo sapiens
tgggactcagtccttaggtgttctttttcttttaagaaataacctcttacagttgtaaccattgcggctctgtccacttctcgttgctgctctgtggcacatatcggaagcagtacagcgcgcggctctacacgcttgggtagcgggataagtcactgttttctttatttctttaaaaaaaaaaaagttctgttgcaaacgactgctgttggattctgtgtgtgatgggaatgagccacctcagatgtggagggccctgaagaatccaacgcaaacagcacatccggtgtggtcgacgggtcctccaagagtttggggcgcggaccggagtaccttgcgtgcagttatgtcggcgtcggtagtgtctgtcatttcgcggttcttagaagagtacttgagctccactccgcagcgtctgaagttgctggacgcgtacctgctgtatatactgctgaccggggcgctgcagttcggttactgtctcctcgtggggaccttccccttcaactcttttctctcgggcttcatctcttgtgtggggagtttcatcctagcggtttgcctgagaatacagatcaacccacagaacaaagcggatttccaaggcatctccccagagcgagcctttgctgattttctctttgccagcaccatcctgcaccttgttgtcatgaactttgttggctgaatcattctcatttacttaattgaggagtaggagactaaaagaatatgaggaactgaagttgagagagcctggctaggatggctgagcacggtggctgatgcctgtaatcccagcattttgggaggccgaggttcactctttgaatttcctggataagagttctggagatggcagcttattggacacatggattttcttcagatttgcacttactgctagctctgctttttatgcaggagaaaagcccagagttcactgtgtgtcagaacaactttctaacaaacatttattaatccagcctctgcctttcattaaatgtaaccttttgccttccaaattaaagaactccatgccactcctc

SEQ ID NO: 302535 - DNA, 789 bp, Homo sapiens
tacggctggagaagacgacagaagggggcaaacagcacatccggtgtggtcgacgggtcctccaagagtttggggcgcggaccggagtaccttgcgtgcagttatgtcggcgtcggtagtgtctgtcatttcgcggttcttagaagagtacttgagctccactccgcagcgtctgaagttgctggacgcgtacctgctgtatatactgctgaccggggcgctgcagttcggttactgtctcctcgtggggaccttccccttcaactcttttctctcgggcttcatctcttgtgtggggagtttcatcctagcggcctggaccctttgttgttgcctcaagtgcatccccatctaggtataattagaaacctttaaatcagcagtttgcctgagaatacagatcaacccacagaacaaagcggatttccaaggcatctccccagagcgagcctttgctgattttctctttgccagcaccatcctgcaccttgttgtcatgaactttgttggctgaatcattctcatttacttaattgaggagtaggagactaaaagaatgttcactctttgaatttcctggataagagttctggagatggcagcttattggacacatggattttcttcagatttgcacttactgctagctctgctttttatgcaggagaaaagcccagagttcactgtgtgtcagaacaactttctaacaaacatttattaatccagcctctgcctttcattaaatgtaaccttttgccttccaaattaaagaactccatgccactcctc

SEQ ID NO: 302536 - DNA, 631 bp, Homo sapiens
tacggctggagaagacgacagaagggggcaaacagcacatccggtgtggtcgacgggtcctccaagagtttggggcgcggaccggagtaccttgcgtgcagttatgtcggcgtcggtagtgtctgtcatttcgcggttcttagaagagtacttgagctccactccgcagcgtctgaagttgctggacgcgtacctgctgtatatactgctgaccggggcgctgcatttgcctgagaatacagatcaacccacagaacaaagcggatttccaaggcatctccccagagcgagcctttgctgattttctctttgccagcaccatcctgcaccttgttgtcatgaactttgttggctgaatcattctcatttacttaattgaggagtaggagactaaaagaatgttcactctttgaatttcctggataagagttctggagatggcagcttattggacacatggattttcttcagatttgcacttactgctagctctgctttttatgcaggagaaaagcccagagttcactgtgtgtcagaacaactttctaacaaacatttattaatccagcctctgcctttcattaaatgtaaccttttgccttccaaattaaagaactccatgccactcctc

SEQ ID NO: 302537 - DNA, 656 bp, Homo sapiens
taaaaatccaacatgtaccttccagctgtctacaacacaagtgcatgctcgtcggacaagaggtcacagctaaggcaacaatccacatgagttgggaagggctcatttcacctgtcaaacactgctgctctcatgtggaatgcactgtggctttttggtcaagataattaccgtggaagatcctaggtggcagcaaatcccaggtgaacagactgagccgtggaggtggcataaggcaaccctagccgagtttgcctgagaatacagatcaacccacagaacaaagcggatttccaaggcatctccccagagcgagcctttgctgattttctctttgccagcaccatcctgcaccttgttgtcatgaactttgttggctgaatcattctcatttacttaattgaggagtaggagactaaaagaatgttcactctttgaatttcctggataagagttctggagatggcagcttattggacacatggattttcttcagatttgcacttactgctagctctgctttttatgcaggagaaaagcccagagttcactgtgtgtcagaacaactttctaacaaacatttattaatccagcctctgcctttcattaaatgtaaccttttgccttccaaattaaagaactccatgccactcctc

SEQ ID NO: 302538 - DNA, 429 bp, Homo sapiens
tggcttaccagattctgtaagtgtttgcctgagaatacagatcaacccacagaacaaagcggatttccaaggcatctccccagagcgagcctttgctgattttctctttgccagcaccatcctgcaccttgttgtcatgaactttgttggctgaatcattctcatttacttaattgaggagtaggagactaaaagaatgttcactctttgaatttcctggataagagttctggagatggcagcttattggacacatggattttcttcagatttgcacttactgctagctctgctttttatgcaggagaaaagcccagagttcactgtgtgtcagaacaactttctaacaaacatttattaatccagcctctgcctttcattaaatgtaaccttttgccttccaaattaaagaactccatgccactcctc

SEQ ID NO: 302539 - DNA, 1405 bp, Homo sapiens
taaaaatccaacatgtaccttccagctgtctacaacacaagtgcatgctcgtcggacaagaggtcacagctaaggcaacaatccacatgagttgggaagggctcatttcacctgtcaaacactgctgctctcatgtggaatgcactgtggctttttggtcaagataattaccgtggaagatcctaggtggcagcaaatcccaggtgaacagactgagccgtggaggtggcataaggcaaccctagccgagtttgcctgagaatacagatcaacccacagaacaaagcggatttccaaggcatctccccagagcgagcctttgctgattttctctttgccagcaccatcctgcaccttgttgtcatgaactttgttggctgaatcattctcatttacttaattgaggagtaggagactaaaagaatgttcactctttgaatttcctggataagagttctggagatggcagcttattggacacatggattttcttcagatttgcacttactgctagctctgctttttatgcaggagaaaagcccagagttcactgtgtgtcagaacaactttctaacaaacatttattaatccagcctctgcctttcattaaatgtaaccttttgccttccaaattaaagaactccatgccactcctcaaaaaaaaaaaaaaaaaaaaaaaaaaaaaaaaaaaaaaaaaaaaaaaaaaaaaaaaaaaaaaaaaaaaaaaaaaaaaaaaaaaaaaaaaaaaaaaaaaaaaaaaaaaaggggggggggggggaatcccgggcgagccgacaccaaactagacaataccagccctgttttttataaagacaggcaggcgccccacataagcgcggccataaattaacaacacgagccggacgcggcgtacaacaacgaggcgtgaagtagagagagacagcactgcttggttacgagcaattagagagcaacccacccccgccgtggggggagggaacataactgtagaccaaccaaccaccaaaaagataagtttccctcgaggcagaaaaacaacacgcgacgtaggatggctgaaacccccccgttttctgtggctcggtggcagaaaatgtcgctcgcgtgccgtctctctttaatcatactcttcacgggggcggtgagagagtacgaacacgggcaggaacggtagacgaaccgaaggccagcaacagcacaagtagtaagcgtcaaacagcaccgaaccgaggacgaccagcacgacacaacacaacgacagccgcagccgacagcaccctacgacgccaccgagccacgaacgcgcaccacaacgaccaaccagaccaagacaggcacaccaaaagcaccgcaggcagccagacgtccacagaccgaccactgacaggatgcagggcccccc

SEQ ID NO: 302540 - DNA, 790 bp, Homo sapiens
tacggctggagaagacgacagaagggggcaaacagcacatccggtgtggtcgacgggtcctccaagagtttggggcgcggaccggagtaccttgcgtgcagttatgtcggcgtcggtagtgtctgtcatttcgcggttcttagaagagtacttgagctccactccgcagcgtctgaagttgctggacgcgtacctgctgtatatactgctgaccggggcgctgcatttgcctgagaatacagatcaacccacagaacaaagcggatttccaaggcatctccccagagcgagcctttgctgattttctctttgccagcaccatcctgcaccttgttgtcatgaactttgttggctgaatcattctcatttacttaattgaggagtaggagactaaaagaatgttcactctttgaatttcctggataagagttctggagatggcagcttattggacacatggattttcttcagatttgcacttactgctagctctgctttttatgcaggagaaaagcccagagttcactgtgtgtcagaacaactttctaacaaacatttattaatccagcctctgcctttcattaaatgtaaccttttgccttccaaattaaagaactccatgccactcctctaaaaaaaaaaaaaaatgaaaaaaaatttgtggggcggttggcctggaaaagttttaaacccttggtggggggggcccgttgttaatggaatggcaaggtgtcaaggaatcggcggaaaagggtgggtttcccaaaaaaggcggggacggggttgacat

SEQ ID NO: 302541 - DNA, 545 bp, Homo sapiens
tacggctggagaagacgacagaagggggcaaacagcacatccggtgtggtcgacgggtcctccaagagtttggggcgcggaccggagtaccttgcgtgcagttatgtcggcgtcggtagtgtctgtcatttcgcggttcttagaagagtacttgagctccactccgcagcgtctgaagttgctggacgcgtacctgctgtatatactgctgaccggggcgctgcagttcggttactgtctcctcgtggggaccttccccttcaactcttttctctcgggcttcatctcttgtgtggggagtttcatcctagcgggttcactctttgaatttcctggataagagttctggagatggcagcttattggacacatggattttcttcagatttgcacttactgctagctctgctttttatgcaggagaaaagcccagagttcactgtgtgtcagaacaactttctaacaaacatttattaatccagcctctgcctttcattaaatgtaaccttttgccttccaaattaaagaactccatgccactcctc

SEQ ID NO: 302542 - DNA, 1193 bp, Homo sapiens
ggctgaaagtccaaaatctctcctttaagttctgatgccagaatctccaggttacttacttgacccaatataccaaataaggtagtgccctttttcctcctggggcagcccggttcttctgaaaggtagtatttcccagcctcttttgagtcatggtacacgtaggagattgcagtatttttatggcacactgggaaaatcagttgcttatagctggagacattggagcccctaaggctggaggtcactttccaaccagagctgtgctggagtccagtaggtgggaggctgtgctttgagggactaaaggaagcctgtatcttgtggtgagggttccacctcacaagttacagatctcagttccatttggctctagcagcaatgtggccacttctgttgcggttactctttcttcacctttttcttgccaaaaataaacttatctttaaatgaaaactaaattatttcttatattttggtcctttgttatagctgagattgggaatttttctttctttcttgaatccttacttccctaccctgcctccccaccaatggaaatctgtgcttcataagcattttagattccagaaagctctttaggttaaactacaaccctctcacctcaaagaatttgtgggccagggaagtcagtgacttatgtgaagtcttgcggctaattaatggtagagctggagttaggacacatgtctcacagttcctagttcgtttgctttgatgtgcttgaaattcagttttgacattaatttttctggatactactcccataaaatgttctttgaaaaatacttgcttctttctagtttttctcgcctggtttaaatattgtcctgagtgtgggaaccccataactgtcttgtgggttagaatttagatggaaggatttggggccctgtctctagtatcataagacatttaaccttgctgcttttttcttctaggttcactctttgaatttcctggataagagttctggagatggcagcttattggacacatggattttcttcagatttgcacttactgctagctctgctttttatgcaggagaaaagcccagagttcactgtgtgtcagaacaactttctaacaaacatttattaatccagcctctgcctttcattaaatgtaaccttttgccttccaaattaaagaactccatgccactcctc

SEQ ID NO: 302543 - DNA, 911 bp, Homo sapiens
tacggctggagaagacgacagaagggggcaaacagcacatccggtgtggtcgacgggtcctccaagagtttggggcgcggaccggagtaccttgcgtgcagttatgtcggcgtcggtagtgtctgtcatttcgcggttcttagaagagtacttgagctccactccgcagcgtctgaagttgctggacgcgtacctgctgtatatactgctgaccggggcgctgcagttcggttactgtctcctcgtggggaccttccccttcaactcttttctctcgggcttcatctcttgtgtggggagtttcatcctagcgggttcactctttgaatttcctggataagagttctggagatggcagcttattggacacatggattttcttcagatttgcacttactgctagctctgctttttatgcaggagaaaagcccagagttcactgtgtgtcagaacaactttctaacaaacatttattaatccagcctctgcctttcattaaatgtaaccttttgccttccaaattaaagaactccatgccactcctcaaaaaaaaaaaaggagaaagaaaacaaaaagagaactcaagcgagcaaacaggcaaaaaaacaggccagcggagccgaacaacaggaaaacaaaagaccagcaacgacgcgatggccgaacacaccgagcagcggaagaaccaggcagaaaacgaaaacagatgagcgcccaacagacgatgtgacgccaggccaggatggaggacacacgaggggcggccgcggccactagaagacatgagtaggaaggcagacataaagggcgcagaaaaaaggcacgcgagagatagaagtgtaggcggaacgagccgcagtgccaggggaaagaggaagagacggagggaagaaagataacgagaggagaga

SEQ ID NO: 302544 - DNA, 387 bp, Homo sapiens
tacggctggagaagacgacagaagggggcaaacagcacatccggtgtggtcgacgggtcctccaagagtttggggcgcggaccggagtaccttgcgtgcagttatgtcggcgtcggtagtgtctgtcatttcgcggttcttagaagagtacttgagctccactccgcagcgtctgaagttgctggacgcgtacctgctgtatatactgctgaccggggcgctgcagttcggttactgtctcctcgtggggaccttccccttcaactcttttctctcgggcttcatctcttgtgtggggagtttcatcctagcgggtaatggttctataagtgatcataataataatgtgttactttggtgtgctgcttttgttttcatagtactcta

SEQ ID NO: 302545 - DNA, 1076 bp, Homo sapiens
gcagcctcaaaccccagctgttggggccaggacacccagtgagcccatacttgctctttttgtcttcttcagactgcgccatggggctcagcgacggggaatggcagttggtgctgaacgtctgggggaaggtggaggctgacatcccaggccatgggcaggaagtcctcatcaggctctttaagggtcacccagagactctggagaagtttgacaagttcaagcacctgaagtcagaggacgagatgaaggcgtctgaggacttaaagaagcatggtgccaccgtgctcaccgccctgggtggcatccttaagaagaaggggcatcatgaggcagagattaagcccctggcacagtcgcatgccaccaagcacaagatccccgtgaagtacctggagttcatctcggaatgcatcatccaggttctgcagagcaagcatcccggggactttggtgctgatgcccagggggccatgaacaaggccctggagctgttccggaaggacatggcctccaactacaaggagctgggcttccagggctaggcccctgccgctcccacccccacccatctgggccccgggttcaagagagagcggggtctgatctcgtgtagccatatagagtttgcttctgagtgtctgctttgtttagtagaggtgggcaggaggagctgaggggctggggctggggtgttgaagttggctttgcatgcccagcgatgcgcctccctgtgggatgtcatcaccctgggaaccgggagtggcccttggctcactgtgttctgcatggtttggatctgaattaattgtcctttcttctaaatcccaaccgaacttcttccaacctccaaactggctgtaaccccaaatccaagccattaactacacctgacagtagcaattgtctgattaatcactggccccttgaagacagcagaatgtccctttgcaatgaggaggagatctgggctgggcgggccagctggggaagcatttgactatctggaacttgtgtgtgcctcctcaggtatggcagtgactcacctggttttaataaaacaacctgcaacatct

SEQ ID NO: 302546 - DNA, 365 bp, Homo sapiens
ttctatgcgatcaggtgcgtgtagaacctcatcagcctgaataaccggaacgtggcccttggctcactgtgttctgcatggtttggatctgaattaattgtcctttcttctaaatcccaaccgaacttcttccaacctccaaactggctgtaaccccaaatccaagccattaactacacctgacagtagcaattgtctgattaatcactggccccttgaagacagcagaatgtccctttgcaatgaggaggagatctgggctgggcgggccagctggggaagcatttgactatctggaacttgtgtgtgcctcctcaggtatggcagtgactcacctggttttaataaaacaacctgcaacatct

SEQ ID NO: 302547 - DNA, 387 bp, Homo sapiens
gcaagccaaaaccctgggcagactcaatccaaaaataaacaatcaaagagcatgttggcctggtcctttgctaggtactgtagagcaggtgagagagtgagggggaaggactccaaattagaccagttcttagccatgaagcagagactctgaagccagactacctgggtcccaatcttgggcttggtatttcctcgctgtgtgactctggctctcaagagtaaccagagactctgaagaagtttaaaagttatgaccctacgtagaggacagataaggatctaggacctaagagcatggtcccctttcctaccccctgggtgcatcctagagagggcatatagcagagatagccctacatccatcacagacagacccgtagactgg

SEQ ID NO: 302548 - DNA, 1036 bp, Homo sapiens
tgcgaggacagctggggagaaggggagctgtgactgcgccatggggctcagcgacggggaatggcagttggtgctgaacgtctgggggaaggtggaggctgacatcccaggccatgggcaggaagtcctcatcaggctctttaagggtcacccagagactctggagaagtttgacaagttcaagcacctgaagtcagaggacgagatgaaggcgtctgaggacttaaagaagcatggtgccaccgtgctcaccgccctgggtggcatccttaagaagaaggggcatcatgaggcagagattaagcccctggcacagtcgcatgccaccaagcacaagatccccgtgaagtacctggagttcatctcggaatgcatcatccaggttctgcagagcaagcatcccggggactttggtgctgatgcccagggggccatgaacaaggccctggagctgttccggaaggacatggcctccaactacaaggagctgggcttccagggctaggcccctgccgctcccacccccacccatctgggccccgggttcaagagagagcggggtctgatctcgtgtagccatatagagtttgcttctgagtgtctgctttgtttagtagaggtgggcaggaggagctgaggggctggggctggggtgttgaagttggctttgcatgcccagcgatgcgcctccctgtgggatgtcatcaccctgggaaccgggagtggcccttggctcactgtgttctgcatggtttggatctgaattaattgtcctttcttctaaatcccaaccgaacttcttccaacctccaaactggctgtaaccccaaatccaagccattaactacacctgacagtagcaattgtctgattaatcactggccccttgaagacagcagaatgtccctttgcaatgaggaggagatctgggctgggcgggccagctggggaagcatttgactatctggaacttgtgtgtgcctcctcaggtatggcagtgactcacctggttttaataaaacaacctgcaacatct

SEQ ID NO: 302549 - DNA, 952 bp, Homo sapiens
  misc_feature (17)..(17): n is a, c, g, or t
ttggtgggcatctagangatccttcccgggtctgggtaggaagtcctcatcgctctttaagggtcacccagagactctggagaagtttgacaagttcaagcacctgaagtcagaggacgagatgaaggcgtctgaggacttaaagaagcatggtgccaccgtgctcaccgccctgggtggcatccttaagaagaaggggcatcatgaggcagagattaagcccctggcacagtcgcatgccaccaagcacaagatccccgtgaagtacctggagttcatctcggaatgcatcatccaggttctgcagagcaagcatcccggggactttggtgctgatgcccagggggccatgaacaaggccctggagctgttccggaaggacatggcctccaactacaaggagctgggcttccagggctaggcccctgccgctcccacccccacccatctgggccccgggttcaagagagagcggggtctgatctcgtgtagccatatagagtttgcttctgagtgtctgctttgtttagtagaggtgggcaggaggagctgaggggctggggctggggtgttgaagttggctttgcatgcccagcgatgcgcctccctgtgggatgtcatcaccctgggaaccgggagtggcccttggctcactgtgttctgcatggtttggatctgaattaattgtcctttcttctaaatcccaaccgaacttcttccaacctccaaactggctgtaaccccaaatccaagccattaactacacctgacagtagcaattgtctgattaatcactggccccttgaagacagcagaatgtccctttgcaatgaggaggagatctgggctgggcgggccagctggggaagcatttgactatctggaacttgtgtgtgcctcctcaggtatggcagtgactcacctggttttaataaaacaacctgcaacatct

SEQ ID NO: 302550 - DNA, 1019 bp, Homo sapiens
gcagcctcaaaccccagctgttggggccaggacacccagtgagcccatacttgctctttttgtcttcttcagactgcgccatggggctcagcgacggggaatggcagttggtgctgaacgtctgggggaaggtggaggctgacatcccaggccatgggcaggaagtcctcatcaggctctttaagggtcacccagagactctggagaagtttgacaagttcaagcacctgaagtcagaggacgagatgaaggcgtctgaggacttaaagaagcatggtgccaccgtgctcaccgccctgggtggcatccttaagaagaaggggcatcatgaggcagagattaagcccctggcacagtcgcatgccaccaagcacaagatccccgtgaagtacctggagttcatctcggaatgcatcatccaggttctgcagagcaagcatcccggggactttggtgctgatgcccagggggccatgaacaagggctaggcccctgccgctcccacccccacccatctgggccccgggttcaagagagagcggggtctgatctcgtgtagccatatagagtttgcttctgagtgtctgctttgtttagtagaggtgggcaggaggagctgaggggctggggctggggtgttgaagttggctttgcatgcccagcgatgcgcctccctgtgggatgtcatcaccctgggaaccgggagtggcccttggctcactgtgttctgcatggtttggatctgaattaattgtcctttcttctaaatcccaaccgaacttcttccaacctccaaactggctgtaaccccaaatccaagccattaactacacctgacagtagcaattgtctgattaatcactggccccttgaagacagcagaatgtccctttgcaatgaggaggagatctgggctgggcgggccagctggggaagcatttgactatctggaacttgtgtgtgcctcctcaggtatggcagtgactcacctggttttaataaaacaacctgcaacatct

SEQ ID NO: 302551 - DNA, 1457 bp, Homo sapiens
gcagcctcaaaccccagctgttggggccaggacacccagtgagcccatacttgctctttttgtcttcttcagactgcgccatggggctcagcgacggggaatggcagttggtgctgaacgtctgggggaaggtggaggctgacatcccaggccatgggcaggaagtcctcatcaggctctttaagggtcacccagagactctggagaagtttgacaagttcaagcacctgaagtcagaggacgagatgaaggcgtctgaggacttaaagaagcatggtgccaccgtgctcaccgccctgggtggcatccttaagaagaaggggcatcatgaggcagagattaagcccctggcacagtcgcatgccaccaagcacaagatccccgtgaagtacctggagttcatctcggaatgcatcatccaggttctgcagagcaagcatcccggggactttggtgctgatgcccagggggccatgaacaaggccctggagctgttccggaaggacatggcctccaactacaaggagctgggcttccagggctaggcccctgccgctcccacccccacccatctgggccccgggttcaagagagagcggggtctgatctcgtgtagccatatagagtttgcttctgagtgtctgctttgtttagtagaggtgggcaggaggagctgaggggctggggctggggtgttgaagttggctttgcatgcccagcgatgcgcctccctgtgggatgtcatcaccctgggaaccgggagtggcccttggctcactgtgttctgcatggtttggatctgaattaattgtcctttcttctaaatcccaaccgaacttcttccaacctccaaactggctgtaaccccaaatccaagccattaactacacctgacagtagcaattgtctgattaatcactggccccttgaagacagcagaatgtccctttgcaatgaggaggagatctgggctgggcgggccagctggggaagcatttgactatctggaacttgtgtgtgcctcctcaggtatggcagtgactcacctggttttaataaaacaacctgcaacatctaagcaacccctaggggttgcttggttgagtagagctgcctctcagaggcagcatgagctgagagggtgataggaaggcggcgctagacagcatggaggactttctgctctccaatgggtaccagctgggcaagaccattggggaagggacctactcaaaagtcaaagaagcattttccaaaaaacaccaaagaaaagtggcaattaaagttatagacaagatgggagggccagaaggtgagccggggcccctttggagggaaggagggaggactggctgaggtgggtgggtgcttcctcctgtttgttagaacgatcattcgatcattctgctcccgctggcctgaaccaacaaccctggtccacgagttcgattcactgc

SEQ ID NO: 302552 - DNA, 604 bp, Homo sapiens
gcagcctcaaaccccagctgttggggccaggacacccagtgagcccatacttgctctttttgtcttcttcagactgcgccatggggctcagcgacggggaatggcagttggtgctgaacgtctgggggaaggtggaggctgacatcccaggccatgggcaggaagtcctcatcaggctctttaagggtcacccagagactctggagaagtttgacaagttcaagcacctgaagtcagaggacgagatgaaggcgcctccctgtgggatgtcatcaccctgggaaccgggagtggcccttggctcactgtgttctgcatggtttggatctgaattaattgtcctttcttctaaatcccaaccgaacttcttccaacctccaaactggctgtaaccccaaatccaagccattaactacacctgacagtagcaattgtctgattaatcactggccccttgaagacagcagaatgtccctttgcaatgaggaggagatctgggctgggcgggccagctggggaagcatttgactatctggaacttgtgtgtgcctcctcaggtatggcagtgactcacctggttttaataaaacaacctgcaacatct

SEQ ID NO: 302553 - DNA, 955 bp, Homo sapiens
gcagcctcaaaccccagctgttggggccaggacacccagtgagcccatacttgctctttttgtcttcttcagactgcgccatggggctcagcgacggggaatggcagttggtgctgaacgtctgggggaaggtggaggctgacatcccaggccatgggcaggaagtcctcatcaggctctttaagggtcacccagagactctggagaagtttgacaagttcaagcacctgaagtcagaggacgagatgaaggcgtctgaggacttaaagaagcatggtgccaccgtgctcaccgccctgggtggcatccttaagaagaaggggcatcatgaggcagagattaagcccctggcacagtcgcatgccaccaagcacaagatccccgtgaagtacctggagttcatctcggaatgcatcatccaggttctgcagagcaagcatcccggggactttggtgctgatgcccagggggccatgaacaaggccctggagctgttccggaaggacatggcccccacccatctgggccccgggttcaagagagagcggggtctgatctcgtgtagccatatagagtttgcttctgagtgtctgctttgtttagtagaggtgggcaggaggagctgaggggctggggctggggtggcccttggctcactgtgttctgcatggtttggatctgaattaattgtcctttcttctaaatcccaaccgaacttcttccaacctccaaactggctgtaaccccaaatccaagccattaactacacctgacagtagcaattgtctgattaatcactggccccttgaagacagcagaatgtccctttgcaatgaggaggagatctgggctgggcgggccagctggggaagcatttgactatctggaacttgtgtgtgcctcctcaggtatggcagtgactcacctggttttaataaaacaacctgcaacatct

SEQ ID NO: 302554 - DNA, 1152 bp, Homo sapiens
caatggcacctgccctaaaatagcttcccatgtgagggctagagaaaggaaaagattagaccctccctggatgagagagagaaagtgaaggagggcaggggagggggacagcgagccattgagcgatctttgtcaagcatcccagaagactgcgccatggggctcagcgacggggaatggcagttggtgctgaacgtctgggggaaggtggaggctgacatcccaggccatgggcaggaagtcctcatcaggctctttaagggtcacccagagactctggagaagtttgacaagttcaagcacctgaagtcagaggacgagatgaaggcgtctgaggacttaaagaagcatggtgccaccgtgctcaccgccctgggtggcatccttaagaagaaggggcatcatgaggcagagattaagcccctggcacagtcgcatgccaccaagcacaagatccccgtgaagtacctggagttcatctcggaatgcatcatccaggttctgcagagcaagcatcccggggactttggtgctgatgcccagggggccatgaacaaggccctggagctgttccggaaggacatggcctccaactacaaggagctgggcttccagggctaggcccctgccgctcccacccccacccatctgggccccgggttcaagagagagcggggtctgatctcgtgtagccatatagagtttgcttctgagtgtctgctttgtttagtagaggtgggcaggaggagctgaggggctggggctggggtgttgaagttggctttgcatgcccagcgatgcgcctccctgtgggatgtcatcaccctgggaaccgggagtggcccttggctcactgtgttctgcatggtttggatctgaattaattgtcctttcttctaaatcccaaccgaacttcttccaacctccaaactggctgtaaccccaaatccaagccattaactacacctgacagtagcaattgtctgattaatcactggccccttgaagacagcagaatgtccctttgcaatgaggaggagatctgggctgggcgggccagctggggaagcatttgactatctggaacttgtgtgtgcctcctcaggtatggcagtgactcacctggttttaataaaacaacctgcaacatct

SEQ ID NO: 302555 - DNA, 1197 bp, Homo sapiens
ctctgagagcattgatgaggtcaggaagcctcctgttgggtagaggagcaactaagagactgaacttggcccccaccctgaggctcacaagcttgaattgcacctgagttccaaaggagaagttgacattcttccagaacatatgcccagtgtcttcaacttgagatggagctgggatgccaagtctgcaaatactgcgccatggggctcagcgacggggaatggcagttggtgctgaacgtctgggggaaggtggaggctgacatcccaggccatgggcaggaagtcctcatcaggctctttaagggtcacccagagactctggagaagtttgacaagttcaagcacctgaagtcagaggacgagatgaaggcgtctgaggacttaaagaagcatggtgccaccgtgctcaccgccctgggtggcatccttaagaagaaggggcatcatgaggcagagattaagcccctggcacagtcgcatgccaccaagcacaagatccccgtgaagtacctggagttcatctcggaatgcatcatccaggttctgcagagcaagcatcccggggactttggtgctgatgcccagggggccatgaacaaggccctggagctgttccggaaggacatggcctccaactacaaggagctgggcttccagggctaggcccctgccgctcccacccccacccatctgggccccgggttcaagagagagcggggtctgatctcgtgtagccatatagagtttgcttctgagtgtctgctttgtttagtagaggtgggcaggaggagctgaggggctggggctggggtgttgaagttggctttgcatgcccagcgatgcgcctccctgtgggatgtcatcaccctgggaaccgggagtggcccttggctcactgtgttctgcatggtttggatctgaattaattgtcctttcttctaaatcccaaccgaacttcttccaacctccaaactggctgtaaccccaaatccaagccattaactacacctgacagtagcaattgtctgattaatcactggccccttgaagacagcagaatgtccctttgcaatgaggaggagatctgggctgggcgggccagctggggaagcatttgactatctggaacttgtgtgtgcctcctcaggtatggcagtgactcacctggttttaataaaacaacctgcaacatct

SEQ ID NO: 302556 - DNA, 933 bp, Homo sapiens
tgcgaggacagctggggagaaggggagctgtggctctttaagggtcacccagagactctggagaagtttgacaagttcaagcacctgaagtcagaggacgagatgaaggcgtctgaggacttaaagaagcatggtgccaccgtgctcaccgccctgggtggcatccttaagaagaaggggcatcatgaggcagagattaagcccctggcacagtcgcatgccaccaagcacaagatccccgtgaagtacctggagttcatctcggaatgcatcatccaggttctgcagagcaagcatcccggggactttggtgctgatgcccagggggccatgaacaaggccctggagctgttccggaaggacatggcctccaactacaaggagctgggcttccagggctaggcccctgccgctcccacccccacccatctgggccccgggttcaagagagagcggggtctgatctcgtgtagccatatagagtttgcttctgagtgtctgctttgtttagtagaggtgggcaggaggagctgaggggctggggctggggtgttgaagttggctttgcatgcccagcgatgcgcctccctgtgggatgtcatcaccctgggaaccgggagtggcccttggctcactgtgttctgcatggtttggatctgaattaattgtcctttcttctaaatcccaaccgaacttcttccaacctccaaactggctgtaaccccaaatccaagccattaactacacctgacagtagcaattgtctgattaatcactggccccttgaagacagcagaatgtccctttgcaatgaggaggagatctgggctgggcgggccagctggggaagcatttgactatctggaacttgtgtgtgcctcctcaggtatggcagtgactcacctggttttaataaaacaacctgcaacatct

SEQ ID NO: 302557 - DNA, 1164 bp, Homo sapiens
gcaagccaaaaccctgggcagactcaatccaaaaataaacaatcaaagagcatgttggcctggtcctttgctaggtactgtagagcaggtgagagagtgagggggaaggactccaaattagaccagttcttagccatgaagcagagactctgaagccagactacctgggtcccaatcttgggcttggtatttcctcgctgtgtgactctggactgcgccatggggctcagcgacggggaatggcagttggtgctgaacgtctgggggaaggtggaggctgacatcccaggccatgggcaggaagtcctcatcaggctctttaagggtcacccagagactctggagaagtttgacaagttcaagcacctgaagtcagaggacgagatgaaggcgtctgaggacttaaagaagcatggtgccaccgtgctcaccgccctgggtggcatccttaagaagaaggggcatcatgaggcagagattaagcccctggcacagtcgcatgccaccaagcacaagatccccgtgaagtacctggagttcatctcggaatgcatcatccaggttctgcagagcaagcatcccggggactttggtgctgatgcccagggggccatgaacaaggccctggagctgttccggaaggacatggcccccacccatctgggccccgggttcaagagagagcggggtctgatctcgtgtagccatatagagtttgcttctgagtgtctgctttgtttagtagaggtgggcaggaggagctgaggggctggggctggggtgttgaagttggctttgcatgcccagcgatgcgcctccctgtgggatgtcatcaccctgggaaccgggagtggcccttggctcactgtgttctgcatggtttggatctgaattaattgtcctttcttctaaatcccaaccgaacttcttccaacctccaaactggctgtaaccccaaatccaagccattaactacacctgacagtagcaattgtctgattaatcactggccccttgaagacagcagaatgtccctttgcaatgaggaggagatctgggctgggcgggccagctggggaagcatttgactatctggaacttgtgtgtgcctcctcaggtatggcagtgactcacctggttttaataaaacaacctgcaacatct

SEQ ID NO: 302558 - DNA, 1586 bp, Homo sapiens
  misc_feature (1568)..(1568): n is a, c, g, or t
agacacggggcgtccggctaaggccggggacccagggtggtgggcggggtgtcccgcccgcctgtggaccccgcgcagtaactgcgaacatttcgctttcattttgggccgagctggaggcggcggggccgtcccggaacggctgcggccgggcaccccgggagttaatccgaaagcgccgcaagccccgcgggccggccgcaccgcacgtgtcaccgagaagctgatgtagagagagacacagaaggagacagaaagcaagagaccagagtcccgggaaagtcctgccgcgcctcgggacaattataaaaatgtggccccctgggtcagcctcccagccaccgccctcacctgccgcggccacaggtctgcatccagcggctcgccctgtgtccctgcagtgccggctcagcatgtgtccagcgcgcagcctcctccttgtggctaccctggtcctcctggaccacctcagtttggccagaaacctccccgtggccactccagacccaggaatgttcccatgccttcaccactcccaaaacctgctgagggccgtcagcaacatgctccagaaggccagacaaactctagaattttacccttgcacttctgaagagattgatcatgaagatatcacaaaagataaaaccagcacagtggaggcctgtttaccattggaattaaccaagaatgagagttgcctaaattccagagagacctctttcataactaatgggagttgcctggcctccagaaagacctcttttatgatggtaagacacacagctctttcctcaaatgcaatgggggaaatgtttttagcccatctcaatggatacttccccatcttgtcatgtcacccaggccctgtgccttagtagtatttatgaagacttgaagatgtaccaggtggagttcaagaccatgaatgcaaagcttctgatggatcctaagaggcagatctttctagatcaaaacatgctggcagttattgatgagctgatgcaggccctgaatttcaacagtgagactgtgccacaaaaatcctcccttgaagaaccggatttttataaaactaaaatcaagctctgcatacttcttcatgctttcagaattcgggcagtgactattgatagagtgatgagctatctgaatgcttcctaaaaagcgaggtccctccaaaccgttgtcatttttataaaactttgaaatgaggaaactttgataggatgtggattaagaactagggagggggaaagaaggatgggactattacatccacatgatacctctgatcaagtatttttgacatttactgtggataaattgtttttaagttttcatgaatgaattgctaagaagggaaaatatccatcctgaaggtgtttttcattcactttaatagaagggcaaatatttataagctatttctgtaccaaagtgtttgtggaaacaaacatgtaagcataacttattttaaaatatttatttatataacttggtaatcatgaaagcatctgagctaacttatatttatttatgttatatttacccccttaggtgttaantccagaagggatgtaagt

SEQ ID NO: 302559 - DNA, 1541 bp, Homo sapiens
agacacggggcgtccggctaaggccggggacccagggtggtgggcggggtgtcccgcccgcctgtggaccccgcgcagtaactgcgaacatttcgctttcattttgggccgagctggaggcggcggggccgtcccggaacggctgcggccgggcaccccgggagttaatccgaaagcgccgcaagccccgcgggccggccgcaccgcacgtgtcaccgagaagctgatgtagagagagacacagaaggagacagaaagcaagagaccagagtcccgggaaagtcctgccgcgcctcgggacaattataaaaatgtggccccctgggtcagcctcccagccaccgccctcacctgccgcggccacaggtctgcatccagcggctcgccctgtgtccctgcagtgccggctcagcatgtgtccagcgcgcagcctcctccttgtggctaccctggtcctcctggaccacctcagtttggccagaaacctccccgtggccactccagacccaggaatgttcccatgccttcaccactcccaaaacctgctgagggccgtcagcaacatgctccagaaggccagacaaactctagaattttacccttgcacttctgaagagattgatcatgaagatatcacaaaagataaaaccagcacagtggaggcctgtttaccattggaattaaccaagaatgagagttgcctaaattccagagagacctctttcataactaatgggagttgcctggcctccagaaagacctcttttatgatggccctgtgccttagtagtatttatgaagacttgaagatgtaccaggtggagttcaagaccatgaatgcaaagcttctgatggatcctaagaggcagatctttctagatcaaaacatgctggcagttattgatgagctgatgcaggccctgaatttcaacagtgagactgtgccacaaaaatcctcccttgaagaaccggatttttataaaactaaaatcaagctctgcatacttcttcatgctttcagaattcgggcagtgactattgatagagtgatgagctatctgaatgcttcctaaaaagcgaggtccctccaaaccgttgtcatttttataaaactttgaaatgaggaaactttgataggatgtggattaagaactagggagggggaaagaaggatgggactattacatccacatgatacctctgatcaagtatttttgacatttactgtggataaattgtttttaagttttcatgaatgaattgctaagaagggaaaatatccatcctgaaggtgtttttcattcactttaatagaagggcaaatatttataagctatttctgtaccaaagtgtttgtggaaacaaacatgtaagcataacttattttaaaatatttatttatataacttggtaatcatgaaagcatctgagctaacttatatttatttatgttatatttattaaattatttatcaagtgtatttgaaaaatatttttaagtgttctaaaaataaaagtattgaattaaagtgattctgcaa

SEQ ID NO: 302560 - DNA, 922 bp, Homo sapiens
agacacggggcgtccggctaaggccggggacccagggtggtgggcggggtgtcccgcccgcctgtggaccccgcgcagtaactgcgaacatttcgctttcattttgggccgagctggaggcggcggggccgtcccggaacggctgcggccgggcaccccgggagttaatccgaaagcgccgcaagccccgcgggccggccgcaccgcacgtgtcaccgagaagctgatgtagagagagacacagaaggagacagaaagcaagagaccagagtcccgggaaagtcctgccgcgcctcgggacaattataaaaatgtggccccctgggtcagcctcccagccaccgccctcacctgccgcggccacaggtctgcatccagcggctcgccctgtgtccctgcagtgccggctcagcatgtgtccagcgcgcagcctcctccttgtggctaccctggtcctcctggaccacctcagtttggccagaaacctccccgtggccactccagacccaggaatgttcccatgccttcaccactcccaaaacctgctgagggccgtcagcaacatgctccagaaggccagacaaactctagaattttacccttgcacttctgaagagattgatcatgaagatatcacaaaagataaaaccagcacagtggaggcctgtttaccattggaattaaccaaggtataaaggattttcctcccagagcatgcagtgtggttaaaaactgtgcatcaaatctcacctgcttctaaaaattcacgtttctggtatccatcattatgggattttaactggtcctacttcagaagttagatttgggagaaaaattatttttaaaaaatggttttttttgcaacaatgtgaatacacttaacacttaaaaatagttcagatgctaaatattatgatatgtg

SEQ ID NO: 302561 - DNA, 1576 bp, Homo sapiens
gcctggccctggagacacgtctggagagctgttctcctaatatgggtagggtcgggcgtggagctggcagcggcgctgtgtgcgcctgcgcggggcgccgagacagggcgtgttcgctgttcagtgccggtgttgcagggagtgagggcagctggagtgcgttctgccgaagcttgtggttgcacgcccatcgtcttaggggctaccttccgtgaccatgtccaagtctctgaagaagttggtggaggagagccgggagaagaaccagcccgaggtggacatgagtgaccggggcatctccaacatgctggatgtcaacggcctctttaccttatcccatatcacacaactggtcctcagccataacaagctaacaatggtgccaccgaacatcgcagaactgaagaatttggaggtgctcaacttttttaataaccaaatcgaggagctgcccacacagatcagtagccttcagaaactcaaacacctgaaccttggcatgaacaggctgaacactttgccacgaggcttcggctccctgccagctcttgaggttctggacttgacgtacaacaacttgagcgaaaattctcttcctggaaacttcttctacctgaccaccctgcgtgcactctatctaagtgacaacgattttgaaatcctgccgccagatattgggaagctcacaaagttgcagatactcagccttagggataacgacctgatctcgctgcctaaggaaatcggggagcttacccagcttaaagagctccacattcaggggaaccgcctcaccgttctgcccccagaactaggaaacttggatttaactggccagaagcaggtattcaaagcagagaacaatccctgggtgacccccattgcagaccagttccagcttggcgtgtcccatgtttttgagtatatccgttctgagacatacaaatacctctacggcagacacatgcaggccaacccagaaccaccgaagaagaataatgacaaatcgaaaaagatcagccggaaacccctggcagccaagaacagataaggaagggattggcatcggctggccttccagcaccttctctctccaacacttcattctctcttgccctgtctctcaaataaacccaatgctgcgtgtgaggccttttttatttttcttttcactctctttctaatgcttcccaccttaccttttagattcttttgctaggtgggagattgttataaggtctttaaaccatttccatttgtttctttaacattaccaaaagcagggaacaaagctcttattcaactgcgaattccatagtgggctctggcttttcttgaatagatatcacaaggttgcttattatcaaaagaataattaaaatcatgtaaccatttaaatgtcactgttaacacttttcactctttctgttgattcacctaactcattattttgctttattaaaagtcttccttcaccaccgagatatgctaatttaacttacaaatgattttaataaaatcttgagtttgtatcacatgttacttattgactcagaataaaagaacagtctgatct

SEQ ID NO: 302562 - DNA, 1760 bp, Homo sapiens
gcctggccctggagacacgtctggagagctgttctcctaatatgggtagggtcgggcgtggagctggcagcggcgctgtgtgcgcctgcgcggggcgccgagacagggcgtgttcgctgttcagtgccggtgttgcagggagtgagggcagctggagtgcgttctgccgaagcttgtggttgcacgcccatcgtcttaggggctaccttccgtggtgagtgtgtgcggtgttgcacttggggttgcttctcgctgcgtggccgcagcggggctgaacccttcccactccatcccctccccgcacccggaccagcccctgggacgccctcggacgcccacccgctccaaccctggggaagcctcagagtggcagcgaaggcctcttgcctttccgcctctgcgcttgctgtcatcgcccacgtgctttgttgttgttcggtgcagaccatgtccaagtctctgaagaagttggtggaggagagccgggagaagaaccagcccgaggtggacatgagtgaccggggcatctccaacatgctggatgtcaacggcctctttaccttatcccatatcacacaactggtcctcagccataacaagctaacaatggtgccaccgaacatcgcagaactgaagaatttggaggtgctcaacttttttaataaccaaatcgaggagctgcccacacagatcagtagccttcagaaactcaaacacctgaaccttggcatgaacaggctgaacactttgccacgaggcttcggctccctgccagctcttgaggttctggacttgacgtacaacaacttgagcgaaaattctcttcctggaaacttcttctacctgaccaccctgcgtgcactctatctaagtgacaacgattttgaaatcctgccgccagatattgggaagctcacaaagttgcagatactcagccttagggataacgacctgatctcgctgcctaaggaaatcggggagcttacccagcttaaagagctccacattcaggggaaccgcctcaccgttctgcccccagaactaggaaacttggatttaactggccagaagcaggtattcaaagcagagaacaatccctgggtgacccccattgcagaccagttccagcttggcgtgtcccatgtttttgagtatatccgttctgagacatacaaatacctctacggcagacacatgcaggccaacccagaaccaccgaagaagaataatgacaaatcgaaaaagatcagccggaaacccctggcagccaagaacagataaggaagggattggcatcggctggccttccagcaccttctctctccaacacttcattctctcttgccctgtctctcaaataaacccaatgctgcgtgtgaggccttttttatttttcttttcactctctttctaatgcttcccaccttaccttttagattcttttgctaggtgggagattgttataaggtctttaaaccatttccatttgtttctttaacattaccaaaagcagggaacaaagctcttattcaactgcgaattccatagtgggctctggcttttcttgaatagatatcacaaggttgcttattatcaaaagaataattaaaatcatgtaaccatttaaatgtcactgttaacacttttcactctttctgttgattcacctaactcattattttgctttattaaaagtcttccttcaccaccgagatatgctaatttaacttacaaatgattttaataaaatcttgagtttg

SEQ ID NO: 302563 - DNA, 2343 bp, Homo sapiens
gcgtcattcctcttggatatagatgttttcctggacacaccagctacacaataagccagtaaatctaagtttgacctgcttgttattattgggagccctaggtatgtcaaaggcttttcaccaagccagggttattaatcaaagctgactccctcgtattgatcagacctcaaatggtcgtgttccatgccaccctgtttatatattgctgtttaatttgcagccaccctgcgtgcactctatctaagtgacaacgattttgaaatcctgccgccagatattgggaagctcacaaagttgcagatagtaagtaatttatctaaattcttagaaaatcaattcactgctgcagccttgtaggggtagaatcaagtcaatttgagcaggagtaaggtttgttttgtgggaataaaccactactcctgatagtgtttcttgattatccgccggcacttgtaaatacatggaaaggattgagctttagtagaagagaggacatagaggatgagagtttctgtggagcaccttttaatgtgtaaatatgttgacaacttgttttcttctgtttagctcagccttagggataacgacctgatctcgctgcctaaggaaatcggggagcttacccagcttaaagagctccacattcaggggaaccgcctcaccgttctgcccccagaactaggtaaggttgctgatgaatgaacttagttctgggtttcatgaataacaattatcctaatgtagcaattctgaacaacctctgtcctcttcttggcaactactctccacctaggcacacgatgctgatcatttgagaaccatttgtcattgaccagagttagctgttacaggtttgaccttcccggatcctgtgttctgcagctgtagtgtcccctgtcttagaaactgctgatgaaagatgaccccgctcagctccctgcgtgatgtagtgggaaaagcatgggattagtagtaagagccttatccctggctcctcattgactagctgggtaagctttctgggtcttggttggttattaataactttaagtatcactcttactttttaaccccttaaatttttattgacctggaaaaacttttaccaaatagttaaagtagttgttatggctacttgaacatgttgatacctctgcgggtcgtgaatttgcctctctcctgatcccatctctagtaggaattgttaaatatgttcttgctgggaatggatcctactcctggccgctgaatcctaatcctgtttctctgccaggtcgttcctatttccagggtgggtttatgtcccccgccagaaataacctccaagccagtaattctgttactgcttcgttccactgcaaaaggttcacgagttcccttatcttttcttgtgcagaccctccatagcctctcatttcttcagtcctttgaaccacattgttttctcaaactgcgattatttgcttttctactccaaaataccatcatttttaagaaacacattgaggaagcagttctttaaacaagtttggcagtttgaagaggccatttgttagaaattagaatgcaatcaccaggagggcagggacatttttgtatttgttccctcgggtacagtaggtgctcagaaaacactgactgaatgaattaatgaagcaaggaccttggatgacaggacgttaggaaggttatgagcaggctcatgtggctaatggttacgcataggaagactgagacacagagcacgcctatcagcaccttgagttctgttggcagccatattagtctaaagggaaggcagtcacgtgatttcgtggaccagctgggaagtcccgcctcctctcttgccatttcccttagctctcttgctagtgttaaaaatccacctagaggattatttaatgattttttaagggctgaggagcaactcaacacttctctttactgagttgcaagtagtcacgtgttgctttgggagcagggtgacagaatcaagaaacgctttttgcaaacattttcaaggcaaaaaacttcttgttaaaggagagatctcgggccgggcacggtggctcccagttgtaatcccagcactttgggaggccgaagcaggcggatagcttgagcccaggagtctgagaccagcctgtgcaacatggtgaaaccccgtctctacaaaaagtacaaaaaattagctggacgtggtggtgcatgcctgtagtcccagctactcgggaggctgaggtgggaggatcacctgagcctgggaggtcaaagctgcagtgagcagtgatcgtgccactgcactcctggctgggtgacagaacaagaccttgttgaaag

SEQ ID NO: 302564 - DNA, 3838 bp, Homo sapiens
gcctggccctggagacacgtctggagagctgttctcctaatatgggtagggtcgggcgtggagctggcagcggcgctgtgtgcgcctgcgcggggcgccgagacagggcgtgttcgctgttcagtgccggtgttgcagggagtgagggcagctggagtgcgttctgccgaagcttgtggttgcacgcccatcgtcttaggggctaccttccgtgaccatgtccaagtctctgaagaagttggtggaggagagccgggagaagaaccagcccgaggtggacatgagtgaccggggcatctccaacatgctggatgtcaacggcctctttaccttatcccatatcacacaactggtcctcagccataacaagctaacaatggtgccaccgaacatcgcagaactgaagaatttggaggtgctcaacttttttaataaccaaatcgaggagctgcccacacagatcagtagccttcagaaactcaaacacctgaaccttggcatgaacaggctgaacactttgccacgaggcttcggctccctgccagctcttgaggttctggacttgacgtacaacaacttgagcgaaaattctcttcctggaaacttcttctacctgaccaccctgcgtgcactctatctaagtgacaacgattttgaaatcctgccgccagatattgggaagctcacaaagttgcagatactcagccttagggataacgacctgatctcgctgcctaaggaaatcggggagcttacccagcttaaagagctccacattcaggggaaccgcctcaccgttctgcccccagaactaggaaacttggatttaactggccagaagcaggtattcaaagcagagaacaatccctgggtgacccccattgcagaccagttccagcttggcgtgtcccatgtttttgagtatatccgttctgagacatacaaatacctctacggcagacacatgcaggccaacccagaaccaccgaagaagaataatgacaaatcgaaaaagatcagccggaaacccctggcagccaagaacagataaggaagggattggcatcggctggccttccagcaccttctctctccaacacttcattctctcttgccctgtctctcaaataaacccaatgctgcgtgtgaggccttttttatttttcttttcactctctttctaatgcttcccaccttaccttttagattcttttgctaggtgggagattgttataaggtctttaaaccatttccatttgtttctttaacattaccaaaagcagggaacaaagctcttattcaactgcgaattccatagtgggctctggcttttcttgaatagatatcacaaggttgcttattatcaaaagaataattaaaatcatgtaaccatttaaatgtcactgttaacacttttcactctttctgttgattcacctaactcattattttgctttattaaaagtcttccttcaccaccgagatatgctaatttaacttacaaatgattttaataaaatcttgagtttgtatcacatgttacttattgactcagaataaaagaacagtctgatcttggggtataacacattttcatttacttttctcccccaaaatcatcttatccaattttattggttatacatgataaacttttcatgaaagaaatgcaaaattaaatcacagttcgtttcttctcacattaatttgtcaagttttttttttctttgaagactttctaaattaggaagcagaaaaacaaatctctaggagattctgccaaaggattttggaaagtagcattccttcgccgaagaaatggtgatttctgccaggggctggtagacaagaactgtgaaagagagagagaaaaaacctcaactgtgtattttgtcacggcggaaaatctgctcgcatcgaagcattcttctaagcgacttcgatgccaaggaagttgtgtaaatgtgcacgcgctacaccacacccagggtggaaaccacagttgcagagtcattaaacaatcaattgtttgtttaacatctgtgataggcagctttccttcttttcaacagtgatacctacgaaaatcaaaataaatgcaagctgaggttttgtgctcactgaaagggctgtcaaccccagaaggccgacacaaaaaaaatggtatgtgaagatgcaccgtcttttcaaatggcctgggagagtcaaatggcctgggagagggggcctgcccttctctgctgtgtcctttcggcttcccagttgagctcccaagaccaggacccactggggcatataaaatctctgctgtatcctttcggcttcccagttgagctcccaagaccaggacccactggggcatataaaaaagtcaaaaatcaaaatcaaacaacaagttctgagttacttaggaaacagacttcgcatttcaatcagagaggccacagagcaaggtctaaacttctggcttctagacaaattcctgatagaacatttaaatgtgggaagtggcttccccaggtcccatcccctgtttagggatagagttgatatcatttttataggtgccatgtatgcctctgcctgaatttttttaattgacttttgagcttttgagattgcacgagggagaacaaggcctttgctgttgtggataggaaagacttaacctaaaattaaaccagcaagaaagcattagtaaaaatctaacaatatgaagggctcttatgagtcatttttttcaaaagatgaaaactccagaaacgcacaggaacgaaatacctcccagaaacatgaagcaatcatcgaagactcactggtaatatttttaaaaagtatacagatcaaagcaaaaagaagccatgtgtaacaaagagaaatgtgcaaatattttttaaggcagtattaagtgcaagaggagtaacatgaaataaacattctttcacatggctactgggaatataaatttcgctccagaaaggccgtagcagtttgacgataggtggcaaaaccttaagattgtgtactggggcccagaatttttatttctaggaatgtatcctgaggaaattatccgagatccccacaaactgcaatgtttaggaattgtccttatagcattgcatacacaagaaaaacagagaaaagcctgatccctgtcagtggaaaaggggttcaatgaattacggtgtgtctgcatgaggcttttatgacattaaaaattgttgaacaacggccaggcacagtggctcatgcctgtaatcctaacactttgggaggccaaggtgggaagattgcctgagctcaggagtttgagaccagcctgggcaacacggtgaaaccccgtctctactaaaatacaaaaaattagccgggcgtcgcagcatgcgcctgtagtcccagctgctcaggaggctgaggcaggagaattgattgaacccgggaggcagaggttgcactgagctgagattaagccaccgcactccagcctgggcgacagagcaagattccgttcccaagaaaaaaaaattgttcaacaataagggcaaagggagagaatcataacatctgattaaacagaaaaagcaagatttttaaaactaactatataaggatggtcccagctgtgtcaaaaggaagcttgtttgtaatacgtgtgcataaaaattaaatagaggtgaacacaattattttaaggcagttaaattatctctgtattgtgaactaagactttctagaattttacttattcattctgtacttaaattttttctaatgaacacatatacttttgtaatcagaaaatattaaatgcatgtatttttcaaaatcaattggt

SEQ ID NO: 302565 - DNA, 1530 bp, Homo sapiens
gcctggccctggagacacgtctggagagctgttctcctaatatgggtagggtcgggcgtggagctggcagcggcgctgtgtgcgcctgcgcggggcgccgagacagggcgtgttcgctgttcagtgccggtgttgcagggagtgagggcagctggagtgcgttctgccgaagcttgtggttgcacgcccatcgtcttaggggctaccttccgtgaccatgtccaagtctctgaagaagttggtggaggagagccgggagaagaaccagcccgaggtggacatgagtgaccggggcatctccaacatgctggatgtcaacggcctctttaccttatcccatatcacacaactggtcctcagccataacaagctaacaatggtgccaccgaacatcgcagaactgaagaatttggaggtgctcaacttttttaataaccaaatcgaggagctgcccacacagatcagtagccttcagaaactcaaacacctgaaccttggcatgaacaggctgaacactttgccacgaggcttcggctccctgccagctcttgaggttctggacttgacgtacaacaacttgagcgaaaattctcttcctggaaacttcttctacctgaccaccctgcgtgcactctatctaagtgacaacgattttgaaatcctgccgccagatattgggaagctcacaaagttgcagatactcagccttagggataacgacctgatctcgctgcctaaggaaatcggggagcttacccagcttaaagagctccacattcaggggaaccgcctcaccgttctgcccccagaactaggaaacttggatttaactggccagaagcaggtattcaaagcagagaacaatccctgggtgacccccattgcagaccagttccagcttggcgtgtcccatgtttttgagtatatccgttctgagacatacaaatacctctacggcagacacatgcaggccaacccagaaccaccgaagaagaataatgacaaatcgaaaaagatcagccggaaacccctggcagccaagaacagataaggaagggattggcatcggctggccttccagcaccttctctctccaacacttcattctctcttgccctgtctctcaaataaacccaatgctgcgtgtgaggccttttttatttttcttttcactctctttctaatgcttcccaccttaccttttagattcttttgctaggtgggagattgttataaggtctttaaaccatttccatttgtttctttaacattaccaaaagcagggaacaaagctcttattcaactgcgaattccatagtgggctctggcttttcttgaatagatatcacaaggttgcttattatcaaaagaataattaaaatcatgtaaccatttaaatgtcactgttaacacttttcactctttctgttgattcacctaactcattattttgctttattaaaagtcttccttcaccaccgagatatgctaatttaacttacaaatgattttaataaaatcttgagtttg

SEQ ID NO: 302566 - DNA, 1991 bp, Homo sapiens
gcctggccctggagacacgtctggagagctgttctcctaatatgggtagggtcgggcgtggagctggcagcggcgctgtgtgcgcctgcgcggggcgccgagacagggcgtgttcgctgttcagtgccggtgttgcagggagtgagggcagctggagtgcgttctgccgaagcttgtggttgcacgcccatcgtcttaggggctaccttccgtgaccatgtccaagtctctgaagaagttggtggaggagagccgggagaagaaccagcccgaggtggacatgagtgaccggggcatctccaacatgctggatgtcaacggcctctttaccttatcccatatcacacaactggtcctcagccataacaagctaacaatggtgccaccgaacatcgcagaactgaagaatttggaggtgctcaacttttttaataaccaaatcgaggagctgcccacacagatcagtagccttcagaaactcaaacacctgaaccttggcatgaacaggctgaacactttgccacgaggcttcggctccctgccagctcttgaggttctggacttgacgtacaacaacttgagcgaaaattctcttcctggaaacttcttctacctgaccaccctgcgtgcactctatctaagtgacaacgattttgaaatcctgccgccagatattgggaagctcacaaagttgcagatactcagccttagggataacgacctgatctcgctgcctaaggaaatcggggagcttacccagcttaaagagctccacattcaggggaaccgcctcaccgttctgcccccagaactaggaaacttggatttaactggccagaagcaggtattcaaagcagagaacaatccctgggtgacccccattgcagaccagttccagcttggcgtgtcccatgtttttgagtatatccgttctgagacatacaaatacctctacggcagacacatgcaggccaacccagaaccaccgaagaagaataatgacaaatcgaaaaagatcagccggaaacccctggcagccaagaacagataaggaagggattggcatcggctggccttccagcaccttctctctccaacacttcattctctcttgccctgtctctcaaataaacccaatgctgcgtgtgaggccttttttatttttcttttcactctctttctaatgcttcccaccttaccttttagattcttttgctaggtgggagattgttataaggtctttaaaccatttccatttgtttctttaacattaccaaaagcagggaacaaagctcttattcaactgcgaattccatagtgggctctggcttttcttgaatagatatcacaaggttgcttattatcaaaagaataattaaaatcatgtaaccatttaaatgtcactgttaacacttttcactctttctgttgattcacctaactcattattttgctttattaaaagtcttccttcaccaccgagatatgctaatttaacttacaaatgattttaataaaatcttgagtttgaaaaaaaaaaacaaaaaaaaaaaacaaaaaaaaaaaaaaacaaaacaaaacaaaaaaacaaaaaaaaaagggggggggcgcgcggggcggcccacagaagaaaagagttctaaacagaccaccggcgggggaggcgcgcgcggggagaccacagtgagaaagagaggaacaccgagggcacacagaagaggtgtatacaagagaggaagaaccggcgggcaagaacaacaagggggggaggggaaattcccacacacaagagaaaaaaaaaccgccccgcggcggggagagaaacacgagagcgatggtcagacaaaaaaaaaacaacaaaacaaacgagggagtacctcaggaggagcacgtccatcagcggagaggagcaatacaccaacggagaggggcagccaccaaaggaacaggacgccggcgaaagcatacgaataatacacccccccggagtg

SEQ ID NO: 302567 - DNA, 4068 bp, Homo sapiens
gcctggccctggagacacgtctggagagctgttctcctaatatgggtagggtcgggcgtggagctggcagcggcgctgtgtgcgcctgcgcggggcgccgagacagggcgtgttcgctgttcagtgccggtgttgcagggagtgagggcagctggagtgcgttctgccgaagcttgtggttgcacgcccatcgtcttaggggctaccttccgtggtgagtgtgtgcggtgttgcacttggggttgcttctcgctgcgtggccgcagcggggctgaacccttcccactccatcccctccccgcacccggaccagcccctgggacgccctcggacgcccacccgctccaaccctggggaagcctcagagtggcagcgaaggcctcttgcctttccgcctctgcgcttgctgtcatcgcccacgtgctttgttgttgttcggtgcagaccatgtccaagtctctgaagaagttggtggaggagagccgggagaagaaccagcccgaggtggacatgagtgaccggggcatctccaacatgctggatgtcaacggcctctttaccttatcccatatcacacaactggtcctcagccataacaagctaacaatggtgccaccgaacatcgcagaactgaagaatttggaggtgctcaacttttttaataaccaaatcgaggagctgcccacacagatcagtagccttcagaaactcaaacacctgaaccttggcatgaacaggctgaacactttgccacgaggcttcggctccctgccagctcttgaggttctggacttgacgtacaacaacttgagcgaaaattctcttcctggaaacttcttctacctgaccaccctgcgtgcactctatctaagtgacaacgattttgaaatcctgccgccagatattgggaagctcacaaagttgcagatactcagccttagggataacgacctgatctcgctgcctaaggaaatcggggagcttacccagcttaaagagctccacattcaggggaaccgcctcaccgttctgcccccagaactaggaaacttggatttaactggccagaagcaggtattcaaagcagagaacaatccctgggtgacccccattgcagaccagttccagcttggcgtgtcccatgtttttgagtatatccgttctgagacatacaaatacctctacggcagacacatgcaggccaacccagaaccaccgaagaagaataatgacaaatcgaaaaagatcagccggaaacccctggcagccaagaacagataaggaagggattggcatcggctggccttccagcaccttctctctccaacacttcattctctcttgccctgtctctcaaataaacccaatgctgcgtgtgaggccttttttatttttcttttcactctctttctaatgcttcccaccttaccttttagattcttttgctaggtgggagattgttataaggtctttaaaccatttccatttgtttctttaacattaccaaaagcagggaacaaagctcttattcaactgcgaattccatagtgggctctggcttttcttgaatagatatcacaaggttgcttattatcaaaagaataattaaaatcatgtaaccatttaaatgtcactgttaacacttttcactctttctgttgattcacctaactcattattttgctttattaaaagtcttccttcaccaccgagatatgctaatttaacttacaaatgattttaataaaatcttgagtttgtatcacatgttacttattgactcagaataaaagaacagtctgatcttggggtataacacattttcatttacttttctcccccaaaatcatcttatccaattttattggttatacatgataaacttttcatgaaagaaatgcaaaattaaatcacagttcgtttcttctcacattaatttgtcaagttttttttttctttgaagactttctaaattaggaagcagaaaaacaaatctctaggagattctgccaaaggattttggaaagtagcattccttcgccgaagaaatggtgatttctgccaggggctggtagacaagaactgtgaaagagagagagaaaaaacctcaactgtgtattttgtcacggcggaaaatctgctcgcatcgaagcattcttctaagcgacttcgatgccaaggaagttgtgtaaatgtgcacgcgctacaccacacccagggtggaaaccacagttgcagagtcattaaacaatcaattgtttgtttaacatctgtgataggcagctttccttcttttcaacagtgatacctacgaaaatcaaaataaatgcaagctgaggttttgtgctcactgaaagggctgtcaaccccagaaggccgacacaaaaaaaatggtatgtgaagatgcaccgtcttttcaaatggcctgggagagtcaaatggcctgggagagggggcctgcccttctctgctgtgtcctttcggcttcccagttgagctcccaagaccaggacccactggggcatataaaatctctgctgtatcctttcggcttcccagttgagctcccaagaccaggacccactggggcatataaaaaagtcaaaaatcaaaatcaaacaacaagttctgagttacttaggaaacagacttcgcatttcaatcagagaggccacagagcaaggtctaaacttctggcttctagacaaattcctgatagaacatttaaatgtgggaagtggcttccccaggtcccatcccctgtttagggatagagttgatatcatttttataggtgccatgtatgcctctgcctgaatttttttaattgacttttgagcttttgagattgcacgagggagaacaaggcctttgctgttgtggataggaaagacttaacctaaaattaaaccagcaagaaagcattagtaaaaatctaacaatatgaagggctcttatgagtcatttttttcaaaagatgaaaactccagaaacgcacaggaacgaaatacctcccagaaacatgaagcaatcatcgaagactcactggtaatatttttaaaaagtatacagatcaaagcaaaaagaagccatgtgtaacaaagagaaatgtgcaaatattttttaaggcagtattaagtgcaagaggagtaacatgaaataaacattctttcacatggctactgggaatataaatttcgctccagaaaggccgtagcagtttgacgataggtggcaaaaccttaagattgtgtactggggcccagaatttttatttctaggaatgtatcctgaggaaattatccgagatccccacaaactgcaatgtttaggaattgtccttatagcattgcatacacaagaaaaacagagaaaagcctgatccctgtcagtggaaaaggggttcaatgaattacggtgtgtctgcatgaggcttttatgacattaaaaattgttgaacaacggccaggcacagtggctcatgcctgtaatcctaacactttgggaggccaaggtgggaagattgcctgagctcaggagtttgagaccagcctgggcaacacggtgaaaccccgtctctactaaaatacaaaaaattagccgggcgtcgcagcatgcgcctgtagtcccagctgctcaggaggctgaggcaggagaattgattgaacccgggaggcagaggttgcactgagctgagattaagccaccgcactccagcctgggcgacagagcaagattccgttcccaagaaaaaaaaattgttcaacaataagggcaaagggagagaatcataacatctgattaaacagaaaaagcaagatttttaaaactaactatataaggatggtcccagctgtgtcaaaaggaagcttgtttgtaatacgtgtgcataaaaattaaatagaggtgaacacaattattttaaggcagttaaattatctctgtattgtgaactaagactttctagaattttacttattcattctgtacttaaattttttctaatgaacacatatacttttgtaatcagaaaatattaaatgcatgtatttttcaaaatcaattggt

SEQ ID NO: 302568 - DNA, 3717 bp, Homo sapiens
  misc_feature (162)..(162): n is a, c, g, or t
agagagcttctgcttagtaccagttcgttgggggcgcgggcccagtcatgtaagtgaactatggttcctatgctgttgtctaagatatcctggacatagctagtgcgttgagatctcaccaatacaaaacgcccgtggggatagacgtaaccgttctgaatntaacatccatgatggagtgcttgacggtccatctacttggcatcttatccaatatggagtccactgggacgctcgatcattaacttactccccgtggtgccaccgaacatcgcagaactgaagaatttggaggtgctcaacttttttaataaccaaatcgaggagctgcccacacagatcagtagccttcagaaactcaaacacctgaaccttggcatgaacaggctgaacactttgccacgaggcttcggctccctgccagctcttgaggttctggacttgacgtacaacaacttgagcgaaaattctcttcctggaaacttcttctacctgaccaccctgcgtgcactctatctaagtgacaacgattttgaaatcctgccgccagatattgggaagctcacaaagttgcagatactcagccttagggataacgacctgatctcgctgcctaaggaaatcggggagcttacccagcttaaagagctccacattcaggggaaccgcctcaccgttctgcccccagaactaggaaacttggatttaactggccagaagcaggtattcaaagcagagaacaatccctgggtgacccccattgcagaccagttccagcttggcgtgtcccatgtttttgagtatatccgttctgagacatacaaatacctctacggcagacacatgcaggccaacccagaaccaccgaagaagaataatgacaaatcgaaaaagatcagccggaaacccctggcagccaagaacagataaggaagggattggcatcggctggccttccagcaccttctctctccaacacttcattctctcttgccctgtctctcaaataaacccaatgctgcgtgtgaggccttttttatttttcttttcactctctttctaatgcttcccaccttaccttttagattcttttgctaggtgggagattgttataaggtctttaaaccatttccatttgtttctttaacattaccaaaagcagggaacaaagctcttattcaactgcgaattccatagtgggctctggcttttcttgaatagatatcacaaggttgcttattatcaaaagaataattaaaatcatgtaaccatttaaatgtcactgttaacacttttcactctttctgttgattcacctaactcattattttgctttattaaaagtcttccttcaccaccgagatatgctaatttaacttacaaatgattttaataaaatcttgagtttgtatcacatgttacttattgactcagaataaaagaacagtctgatcttggggtataacacattttcatttacttttctcccccaaaatcatcttatccaattttattggttatacatgataaacttttcatgaaagaaatgcaaaattaaatcacagttcgtttcttctcacattaatttgtcaagttttttttttctttgaagactttctaaattaggaagcagaaaaacaaatctctaggagattctgccaaaggattttggaaagtagcattccttcgccgaagaaatggtgatttctgccaggggctggtagacaagaactgtgaaagagagagagaaaaaacctcaactgtgtattttgtcacggcggaaaatctgctcgcatcgaagcattcttctaagcgacttcgatgccaaggaagttgtgtaaatgtgcacgcgctacaccacacccagggtggaaaccacagttgcagagtcattaaacaatcaattgtttgtttaacatctgtgataggcagctttccttcttttcaacagtgatacctacgaaaatcaaaataaatgcaagctgaggttttgtgctcactgaaagggctgtcaaccccagaaggccgacacaaaaaaaatggtatgtgaagatgcaccgtcttttcaaatggcctgggagagtcaaatggcctgggagagggggcctgcccttctctgctgtgtcctttcggcttcccagttgagctcccaagaccaggacccactggggcatataaaatctctgctgtatcctttcggcttcccagttgagctcccaagaccaggacccactggggcatataaaaaagtcaaaaatcaaaatcaaacaacaagttctgagttacttaggaaacagacttcgcatttcaatcagagaggccacagagcaaggtctaaacttctggcttctagacaaattcctgatagaacatttaaatgtgggaagtggcttccccaggtcccatcccctgtttagggatagagttgatatcatttttataggtgccatgtatgcctctgcctgaatttttttaattgacttttgagcttttgagattgcacgagggagaacaaggcctttgctgttgtggataggaaagacttaacctaaaattaaaccagcaagaaagcattagtaaaaatctaacaatatgaagggctcttatgagtcatttttttcaaaagatgaaaactccagaaacgcacaggaacgaaatacctcccagaaacatgaagcaatcatcgaagactcactggtaatatttttaaaaagtatacagatcaaagcaaaaagaagccatgtgtaacaaagagaaatgtgcaaatattttttaaggcagtattaagtgcaagaggagtaacatgaaataaacattctttcacatggctactgggaatataaatttcgctccagaaaggccgtagcagtttgacgataggtggcaaaaccttaagattgtgtactggggcccagaatttttatttctaggaatgtatcctgaggaaattatccgagatccccacaaactgcaatgtttaggaattgtccttatagcattgcatacacaagaaaaacagagaaaagcctgatccctgtcagtggaaaaggggttcaatgaattacggtgtgtctgcatgaggcttttatgacattaaaaattgttgaacaacggccaggcacagtggctcatgcctgtaatcctaacactttgggaggccaaggtgggaagattgcctgagctcaggagtttgagaccagcctgggcaacacggtgaaaccccgtctctactaaaatacaaaaaattagccgggcgtcgcagcatgcgcctgtagtcccagctgctcaggaggctgaggcaggagaattgattgaacccgggaggcagaggttgcactgagctgagattaagccaccgcactccagcctgggcgacagagcaagattccgttcccaagaaaaaaaaattgttcaacaataagggcaaagggagagaatcataacatctgattaaacagaaaaagcaagatttttaaaactaactatataaggatggtcccagctgtgtcaaaaggaagcttgtttgtaatacgtgtgcataaaaattaaatagaggtgaacacaattattttaaggcagttaaattatctctgtattgtgaactaagactttctagaattttacttattcattctgtacttaaattttttctaatgaacacatatacttttgtaatcagaaaatattaaatgcatgtatttttcaaaatcaattggt

SEQ ID NO: 302569 - DNA, 3734 bp, Homo sapiens
gcctggccctggagacacgtctggagagctgttctcctaatatgggtagggtcgggcgtggagctggcagcggcgctgtgtgcgcctgcgcggggcgccgagacagggcgtgttcgctgttcagtgccggtgttgcagggagtgagggcagctggagtgcgttctgccgaagcttgtggttgcacgcccatcgtcttaggggctaccttccgtgaccatgtccaagtctctgaagaagttggtggaggagagccgggagaagaaccagcccgaggtggacatgagtgaccggggcatctccaacatgctggatgtcaacggcctctttaccttatcccatatcacacaactggtcctcagccataacaagctaacaatggtgccaccgaacatcgcagaactgaagaatttggaggtgctcaacttttttaataaccaaatcgaggagctgcccacacagatcagtagccttcagaaactcaaacacctgaaccttggcatgaacaggctgaacactttgccacgaggcttcggctccctgccagctcttgaggttctggacttgacgtacaacaacttgagcgaaaattctcttcctggaaacttcttctacctgaccaccctgcgtgcactctatctaagtgacaacgattttgaaatcctgccgccagatattgggaagctcacaaagttgcagatactcagccttagggataacgacctgatctcgctgcctaaggaaatcggggagcttacccagcttaaagagctccacattcaggggaaccgcctcaccgttctgcccccagaactaggaaacttggatttaactggccagaagcagcctctacggcagacacatgcaggccaacccagaaccaccgaagaagaataatgacaaatcgaaaaagatcagccggaaacccctggcagccaagaacagataaggaagggattggcatcggctggccttccagcaccttctctctccaacacttcattctctcttgccctgtctctcaaataaacccaatgctgcgtgtgaggccttttttatttttcttttcactctctttctaatgcttcccaccttaccttttagattcttttgctaggtgggagattgttataaggtctttaaaccatttccatttgtttctttaacattaccaaaagcagggaacaaagctcttattcaactgcgaattccatagtgggctctggcttttcttgaatagatatcacaaggttgcttattatcaaaagaataattaaaatcatgtaaccatttaaatgtcactgttaacacttttcactctttctgttgattcacctaactcattattttgctttattaaaagtcttccttcaccaccgagatatgctaatttaacttacaaatgattttaataaaatcttgagtttgtatcacatgttacttattgactcagaataaaagaacagtctgatcttggggtataacacattttcatttacttttctcccccaaaatcatcttatccaattttattggttatacatgataaacttttcatgaaagaaatgcaaaattaaatcacagttcgtttcttctcacattaatttgtcaagttttttttttctttgaagactttctaaattaggaagcagaaaaacaaatctctaggagattctgccaaaggattttggaaagtagcattccttcgccgaagaaatggtgatttctgccaggggctggtagacaagaactgtgaaagagagagagaaaaaacctcaactgtgtattttgtcacggcggaaaatctgctcgcatcgaagcattcttctaagcgacttcgatgccaaggaagttgtgtaaatgtgcacgcgctacaccacacccagggtggaaaccacagttgcagagtcattaaacaatcaattgtttgtttaacatctgtgataggcagctttccttcttttcaacagtgatacctacgaaaatcaaaataaatgcaagctgaggttttgtgctcactgaaagggctgtcaaccccagaaggccgacacaaaaaaaatggtatgtgaagatgcaccgtcttttcaaatggcctgggagagtcaaatggcctgggagagggggcctgcccttctctgctgtgtcctttcggcttcccagttgagctcccaagaccaggacccactggggcatataaaatctctgctgtatcctttcggcttcccagttgagctcccaagaccaggacccactggggcatataaaaaagtcaaaaatcaaaatcaaacaacaagttctgagttacttaggaaacagacttcgcatttcaatcagagaggccacagagcaaggtctaaacttctggcttctagacaaattcctgatagaacatttaaatgtgggaagtggcttccccaggtcccatcccctgtttagggatagagttgatatcatttttataggtgccatgtatgcctctgcctgaatttttttaattgacttttgagcttttgagattgcacgagggagaacaaggcctttgctgttgtggataggaaagacttaacctaaaattaaaccagcaagaaagcattagtaaaaatctaacaatatgaagggctcttatgagtcatttttttcaaaagatgaaaactccagaaacgcacaggaacgaaatacctcccagaaacatgaagcaatcatcgaagactcactggtaatatttttaaaaagtatacagatcaaagcaaaaagaagccatgtgtaacaaagagaaatgtgcaaatattttttaaggcagtattaagtgcaagaggagtaacatgaaataaacattctttcacatggctactgggaatataaatttcgctccagaaaggccgtagcagtttgacgataggtggcaaaaccttaagattgtgtactggggcccagaatttttatttctaggaatgtatcctgaggaaattatccgagatccccacaaactgcaatgtttaggaattgtccttatagcattgcatacacaagaaaaacagagaaaagcctgatccctgtcagtggaaaaggggttcaatgaattacggtgtgtctgcatgaggcttttatgacattaaaaattgttgaacaacggccaggcacagtggctcatgcctgtaatcctaacactttgggaggccaaggtgggaagattgcctgagctcaggagtttgagaccagcctgggcaacacggtgaaaccccgtctctactaaaatacaaaaaattagccgggcgtcgcagcatgcgcctgtagtcccagctgctcaggaggctgaggcaggagaattgattgaacccgggaggcagaggttgcactgagctgagattaagccaccgcactccagcctgggcgacagagcaagattccgttcccaagaaaaaaaaattgttcaacaataagggcaaagggagagaatcataacatctgattaaacagaaaaagcaagatttttaaaactaactatataaggatggtcccagctgtgtcaaaaggaagcttgtttgtaatacgtgtgcataaaaattaaatagaggtgaacacaattattttaaggcagttaaattatctctgtattgtgaactaagactttctagaattttacttattcattctgtacttaaattttttctaatgaacacatatacttttgtaatcagaaaatattaaatgcatgtatttttcaaaatcaattggt

SEQ ID NO: 302570 - DNA, 2936 bp, Homo sapiens
  misc_feature (59)..(59): n is a, c, g, or t
agagtgtacccaagccgggaggccgtgcgacggggaaaagaaagctactcctaccgcgnaccgtgctggccaacccagaaccaccgaagaagaataatgacaaatcgaaaaagatcagccggaaacccctggcagccaagaacagataaggaagggattggcatcggctggccttccagcaccttctctctccaacacttcattctctcttgccctgtctctcaaataaacccaatgctgcgtgtgaggccttttttatttttcttttcactctctttctaatgcttcccaccttaccttttagattcttttgctaggtgggagattgttataaggtctttaaaccatttccatttgtttctttaacattaccaaaagcagggaacaaagctcttattcaactgcgaattccatagtgggctctggcttttcttgaatagatatcacaaggttgcttattatcaaaagaataattaaaatcatgtaaccatttaaatgtcactgttaacacttttcactctttctgttgattcacctaactcattattttgctttattaaaagtcttccttcaccaccgagatatgctaatttaacttacaaatgattttaataaaatcttgagtttgtatcacatgttacttattgactcagaataaaagaacagtctgatcttggggtataacacattttcatttacttttctcccccaaaatcatcttatccaattttattggttatacatgataaacttttcatgaaagaaatgcaaaattaaatcacagttcgtttcttctcacattaatttgtcaagttttttttttctttgaagactttctaaattaggaagcagaaaaacaaatctctaggagattctgccaaaggattttggaaagtagcattccttcgccgaagaaatggtgatttctgccaggggctggtagacaagaactgtgaaagagagagagaaaaaacctcaactgtgtattttgtcacggcggaaaatctgctcgcatcgaagcattcttctaagcgacttcgatgccaaggaagttgtgtaaatgtgcacgcgctacaccacacccagggtggaaaccacagttgcagagtcattaaacaatcaattgtttgtttaacatctgtgataggcagctttccttcttttcaacagtgatacctacgaaaatcaaaataaatgcaagctgaggttttgtgctcactgaaagggctgtcaaccccagaaggccgacacaaaaaaaatggtatgtgaagatgcaccgtcttttcaaatggcctgggagagtcaaatggcctgggagagggggcctgcccttctctgctgtgtcctttcggcttcccagttgagctcccaagaccaggacccactggggcatataaaatctctgctgtatcctttcggcttcccagttgagctcccaagaccaggacccactggggcatataaaaaagtcaaaaatcaaaatcaaacaacaagttctgagttacttaggaaacagacttcgcatttcaatcagagaggccacagagcaaggtctaaacttctggcttctagacaaattcctgatagaacatttaaatgtgggaagtggcttccccaggtcccatcccctgtttagggatagagttgatatcatttttataggtgccatgtatgcctctgcctgaatttttttaattgacttttgagcttttgagattgcacgagggagaacaaggcctttgctgttgtggataggaaagacttaacctaaaattaaaccagcaagaaagcattagtaaaaatctaacaatatgaagggctcttatgagtcatttttttcaaaagatgaaaactccagaaacgcacaggaacgaaatacctcccagaaacatgaagcaatcatcgaagactcactggtaatatttttaaaaagtatacagatcaaagcaaaaagaagccatgtgtaacaaagagaaatgtgcaaatattttttaaggcagtattaagtgcaagaggagtaacatgaaataaacattctttcacatggctactgggaatataaatttcgctccagaaaggccgtagcagtttgacgataggtggcaaaaccttaagattgtgtactggggcccagaatttttatttctaggaatgtatcctgaggaaattatccgagatccccacaaactgcaatgtttaggaattgtccttatagcattgcatacacaagaaaaacagagaaaagcctgatccctgtcagtggaaaaggggttcaatgaattacggtgtgtctgcatgaggcttttatgacattaaaaattgttgaacaacggccaggcacagtggctcatgcctgtaatcctaacactttgggaggccaaggtgggaagattgcctgagctcaggagtttgagaccagcctgggcaacacggtgaaaccccgtctctactaaaatacaaaaaattagccgggcgtcgcagcatgcgcctgtagtcccagctgctcaggaggctgaggcaggagaattgattgaacccgggaggcagaggttgcactgagctgagattaagccaccgcactccagcctgggcgacagagcaagattccgttcccaagaaaaaaaaattgttcaacaataagggcaaagggagagaatcataacatctgattaaacagaaaaagcaagatttttaaaactaactatataaggatggtcccagctgtgtcaaaaggaagcttgtttgtaatacgtgtgcataaaaattaaatagaggtgaacacaattattttaaggcagttaaattatctctgtattgtgaactaagactttctagaattttacttattcattctgtacttaaattttttctaatgaacacatatacttttgtaatcagaaaatattaaatgcatgtatttttcaaaatcaattggt

SEQ ID NO: 302571 - DNA, 2886 bp, Homo sapiens
cccctatccacttctctctctcgtcgctaccaacaccaccctctacactgcaattgacctgaaggatgccttctttaccatttccctacaccctgattcccaaaacctatttgctttcacctggactgagcctgacaccctccaacacttcattctctcttgccctgtctctcaaataaacccaatgctgcgtgtgaggccttttttatttttcttttcactctctttctaatgcttcccaccttaccttttagattcttttgctaggtgggagattgttataaggtctttaaaccatttccatttgtttctttaacattaccaaaagcagggaacaaagctcttattcaactgcgaattccatagtgggctctggcttttcttgaatagatatcacaaggttgcttattatcaaaagaataattaaaatcatgtaaccatttaaatgtcactgttaacacttttcactctttctgttgattcacctaactcattattttgctttattaaaagtcttccttcaccaccgagatatgctaatttaacttacaaatgattttaataaaatcttgagtttgtatcacatgttacttattgactcagaataaaagaacagtctgatcttggggtataacacattttcatttacttttctcccccaaaatcatcttatccaattttattggttatacatgataaacttttcatgaaagaaatgcaaaattaaatcacagttcgtttcttctcacattaatttgtcaagttttttttttctttgaagactttctaaattaggaagcagaaaaacaaatctctaggagattctgccaaaggattttggaaagtagcattccttcgccgaagaaatggtgatttctgccaggggctggtagacaagaactgtgaaagagagagagaaaaaacctcaactgtgtattttgtcacggcggaaaatctgctcgcatcgaagcattcttctaagcgacttcgatgccaaggaagttgtgtaaatgtgcacgcgctacaccacacccagggtggaaaccacagttgcagagtcattaaacaatcaattgtttgtttaacatctgtgataggcagctttccttcttttcaacagtgatacctacgaaaatcaaaataaatgcaagctgaggttttgtgctcactgaaagggctgtcaaccccagaaggccgacacaaaaaaaatggtatgtgaagatgcaccgtcttttcaaatggcctgggagagtcaaatggcctgggagagggggcctgcccttctctgctgtgtcctttcggcttcccagttgagctcccaagaccaggacccactggggcatataaaatctctgctgtatcctttcggcttcccagttgagctcccaagaccaggacccactggggcatataaaaaagtcaaaaatcaaaatcaaacaacaagttctgagttacttaggaaacagacttcgcatttcaatcagagaggccacagagcaaggtctaaacttctggcttctagacaaattcctgatagaacatttaaatgtgggaagtggcttccccaggtcccatcccctgtttagggatagagttgatatcatttttataggtgccatgtatgcctctgcctgaatttttttaattgacttttgagcttttgagattgcacgagggagaacaaggcctttgctgttgtggataggaaagacttaacctaaaattaaaccagcaagaaagcattagtaaaaatctaacaatatgaagggctcttatgagtcatttttttcaaaagatgaaaactccagaaacgcacaggaacgaaatacctcccagaaacatgaagcaatcatcgaagactcactggtaatatttttaaaaagtatacagatcaaagcaaaaagaagccatgtgtaacaaagagaaatgtgcaaatattttttaaggcagtattaagtgcaagaggagtaacatgaaataaacattctttcacatggctactgggaatataaatttcgctccagaaaggccgtagcagtttgacgataggtggcaaaaccttaagattgtgtactggggcccagaatttttatttctaggaatgtatcctgaggaaattatccgagatccccacaaactgcaatgtttaggaattgtccttatagcattgcatacacaagaaaaacagagaaaagcctgatccctgtcagtggaaaaggggttcaatgaattacggtgtgtctgcatgaggcttttatgacattaaaaattgttgaacaacggccaggcacagtggctcatgcctgtaatcctaacactttgggaggccaaggtgggaagattgcctgagctcaggagtttgagaccagcctgggcaacacggtgaaaccccgtctctactaaaatacaaaaaattagccgggcgtcgcagcatgcgcctgtagtcccagctgctcaggaggctgaggcaggagaattgattgaacccgggaggcagaggttgcactgagctgagattaagccaccgcactccagcctgggcgacagagcaagattccgttcccaagaaaaaaaaattgttcaacaataagggcaaagggagagaatcataacatctgattaaacagaaaaagcaagatttttaaaactaactatataaggatggtcccagctgtgtcaaaaggaagcttgtttgtaatacgtgtgcataaaaattaaatagaggtgaacacaattattttaaggcagttaaattatctctgtattgtgaactaagactttctagaattttacttattcattctgtacttaaattttttctaatgaacacatatacttttgtaatcagaaaatattaaatgcatgtatttttcaaaatcaattggt

SEQ ID NO: 302572 - DNA, 2473 bp, Homo sapiens
gcctggccctggagacacgtctggagagctgttctcctaatatgggtagggtcgggcgtggagctggcagcggcgctgtgtgcgcctgcgcggggcgccgagacagggcgtgttcgctgttcagtgccggtgttgcagggagtgagggcagctggagtgcgttctgccgaagcttgtggttgcacgcccatcgtcttaggggctaccttccgtgaccatgtccaagtctctgaagaagttggtggaggagagccgggagaagaaccagcccgaggtggacatgagtgaccggggcatctccaacatgctggatgtcaacggcctctttaccttatcccatatcacacaactggtcctcagccataacaagctaacaatggtgccaccgaacatcgcagaactgaagaatttggaggtgctcaacttttttaataaccaaatcgaggagctgcccacacagatcagtagccttcagaaactcaaacacctgaaccttggcatgaacaggctgaacactttgccacgaggcttcggctccctgccagctcttgaggttctggacttgacgtacaacaacttgagcgaaaattctcttcctggaaacttcttctacctgaccaccctgcgtgcactctatctaagtgacaacgattttgaaatcctgccgccagatattgggaagctcacaaagttgcagatactcagccttagggataacgacctgatctcgctgcctaaggaaatcggggagcttacccagcttaaagagctccacattcaggggaaccgcctcaccgttctgcccccagaactaggtaaggttgctgatgaatgaacttagttctgggtttcatgaataacaattatcctaatgtagcaattctgaacaacctctgtcctcttcttggcaactactctccacctaggcacacgatgctgatcatttgagaaccatttgtcattgaccagagttagctgttacaggtttgaccttcccggatcctgtgttctgcagctgtagtgtcccctgtcttagaaactgctgatgaaagatgaccccgctcagctccctgcgtgatgtagtgggaaaagcatgggattagtagtaagagccttatccctggctcctcattgactagctgggtaagctttctgggtcttggttggttattaataactttaagtatcactcttactttttaaccccttaaatttttattgacctggaaaaacttttaccaaatagttaaagtagttgttatggctacttgaacatgttgatacctctgcgggtcgtgaatttgcctctctcctgatcccatctctagtaggaattgttaaatatgttcttgctgggaatggatcctactcctggccgctgaatcctaatcctgtttctctgccaggtcgttcctatttccagggtgggtttatgtcccccgccagaaataacctccaagccagtaattctgttactgcttcgttccactgcaaaaggttcacgagttcccttatcttttcttgtgcagaccctccatagcctctcatttcttcagtcctttgaaccacattgttttctcaaactgcgattatttgcttttctactccaaaataccatcatttttaagaaacacattgaggaagcagttctttaaacaagtttggcagtttgaagaggccatttgttagaaattagaatgcaatcaccaggagggcagggacatttttgtatttgttccctcgggtacagtaggtgctcagaaaacactgactgaatgaattaatgaagcaaggaccttggatgacaggacgttaggaaggttatgagcaggctcatgtggctaatggttacgcataggaagactgagacacagagcacgcctatcagcaccttgagttctgttggcagccatattagtctaaagggaaggcagtcacgtgatttcgtggaccagctgggaagtcccgcctcctctcttgccatttcccttagctctcttgctagtgttaaaaatccacctagaggattatttaatgattttttaagggctgaggagcaactcaacacttctctttactgagttgcaagtagtcacgtgttgctttgggagcagggtgacagaatcaagaaacgctttttgcaaacattttcaaggcaaaaaacttcttgttaaaggagagatctcgggccgggcacggtggctcccagttgtaatcccagcactttgggaggccgaagcaggcggatagcttgagcccaggagtctgagaccagcctgtgcaacatggtgaaaccccgtctctacaaaaagtacaaaaaattagctggacgtggtggtgcatgcctgtagtcccagctactcgggaggctgaggtgggaggatcacctgagcctgggaggtcaaagctgcagtgagcagtgatcgtgccactgcactcctggctgggtgacagaacaagaccttgttgaaag

SEQ ID NO: 302573 - DNA, 424 bp, Homo sapiens
accatgtccaagtctctgaagaagttggtggaggagagccgggagaagaaccagcccgaggtggacatgagtgaccggggcatctccaacatgctggatgtcaacggcctctgtgagttctcgggcaggactctcccgtggatgagctggaaggctttctaagtttgccaattcactgctggtcctgctgtgagcgattgtactggtttagaccccagcccctgcttgtaaacctcacttgtcaggggcttcgcgcagagggtttgcagtaggatttgttctgttccacctggaaaacgatcctgagagtccacgatgagaatcacacagacagctgtgcctcatcggttgtctctgctgtatggcattgaggtggattttccacagtttgcttaatagtcactttaattataaattgaaaatt

SEQ ID NO: 302574 - DNA, 4451 bp, Homo sapiens
gaattccgttttttttttttgacgtgacatctctttattggttcagtctatgcctggcccagcggcacgcccaggtccagggggggtctggttggaggtctctggacagtcaggggcagcatcagcagaaaccctgggtgtcggggggctgtgggagtagcagcactggtccccgcgttgacaggtgccctccttaaacctcttgcaaggaaatgtcttgagccgggcagcccgctggcaacatcttccggcggctccttccgcttgttctgaagcagcctgcgtctctcctccatagcttcgtcggccgccttgcccctgtgcgaggggaggagtaggtgggaccccatctgccctttaccccttctttccctggctgagccccacccccaccttaccaccactcaccctggccgggcacgaggccggggaccccagttggcctccgggttagcctggaagcgcttgagtcctcgctgtcgggagctggggttggcatcttcccggatggtgaagttggcctgcagcctgggctccacactgagaatgcggaacgctgggctagtctctgatagtcgctcccgtttcaccggacattccttctcccagcaacgcatgatgtcccagagggcagaggcaggggcatccgtcttcacagcgttcttacaggcgtgggagagtgagacccggaagtcagcgtggaggagggccgaccgcaactgcaggaggcttggtgtgttgcagtggatggtgctgctcagcagctggagtgcgttctgccgaagcttgtggttgcacgcccatcgtcttaggggctaccttccgtgaccatgtccaagtctctgaagaagttggtggaggagagccgggagaagaaccagcccgaggtggacatgagtgaccggggcatctccaacatgctggatgtcaacggcctctttaccttatcccatatcacacaactggtcctcagccataacaagctaacaatggtgccaccgaacatcgcagaactgaagaatttggaggtgctcaacttttttaataaccaaatcgaggagctgcccacacagatcagtagccttcagaaactcaaacacctgaaccttggcatgaacaggctgaacactttgccacgaggcttcggctccctgccagctcttgaggttctggacttgacgtacaacaacttgagcgaaaattctcttcctggaaacttcttctacctgaccaccctgcgtgcactctatctaagtgacaacgattttgaaatcctgccgccagatattgggaagctcacaaagttgcagatactcagccttagggataacgacctgatctcgctgcctaaggaaatcggggagcttacccagcttaaagagctccacattcaggggaaccgcctcaccgttctgcccccagaactaggaaacttggatttaactggccagaagcaggtattcaaagcagagaacaatccctgggtgacccccattgcagaccagttccagcttggcgtgtcccatgtttttgagtatatccgttctgagacatacaaatacctctacggcagacacatgcaggccaacccagaaccaccgaagaagaataatgacaaatcgaaaaagatcagccggaaacccctggcagccaagaacagataaggaagggattggcatcggctggccttccagcaccttctctctccaacacttcattctctcttgccctgtctctcaaataaacccaatgctgcgtgtgaggccttttttatttttcttttcactctctttctaatgcttcccaccttaccttttagattcttttgctaggtgggagattgttataaggtctttaaaccatttccatttgtttctttaacattaccaaaagcagggaacaaagctcttattcaactgcgaattccatagtgggctctggcttttcttgaatagatatcacaaggttgcttattatcaaaagaataattaaaatcatgtaaccatttaaatgtcactgttaacacttttcactctttctgttgattcacctaactcattattttgctttattaaaagtcttccttcaccaccgagatatgctaatttaacttacaaatgattttaataaaatcttgagtttgtatcacatgttacttattgactcagaataaaagaacagtctgatcttggggtataacacattttcatttacttttctcccccaaaatcatcttatccaattttattggttatacatgataaacttttcatgaaagaaatgcaaaattaaatcacagttcgtttcttctcacattaatttgtcaagttttttttttctttgaagactttctaaattaggaagcagaaaaacaaatctctaggagattctgccaaaggattttggaaagtagcattccttcgccgaagaaatggtgatttctgccaggggctggtagacaagaactgtgaaagagagagagaaaaaacctcaactgtgtattttgtcacggcggaaaatctgctcgcatcgaagcattcttctaagcgacttcgatgccaaggaagttgtgtaaatgtgcacgcgctacaccacacccagggtggaaaccacagttgcagagtcattaaacaatcaattgtttgtttaacatctgtgataggcagctttccttcttttcaacagtgatacctacgaaaatcaaaataaatgcaagctgaggttttgtgctcactgaaagggctgtcaaccccagaaggccgacacaaaaaaaatggtatgtgaagatgcaccgtcttttcaaatggcctgggagagtcaaatggcctgggagagggggcctgcccttctctgctgtgtcctttcggcttcccagttgagctcccaagaccaggacccactggggcatataaaatctctgctgtatcctttcggcttcccagttgagctcccaagaccaggacccactggggcatataaaaaagtcaaaaatcaaaatcaaacaacaagttctgagttacttaggaaacagacttcgcatttcaatcagagaggccacagagcaaggtctaaacttctggcttctagacaaattcctgatagaacatttaaatgtgggaagtggcttccccaggtcccatcccctgtttagggatagagttgatatcatttttataggtgccatgtatgcctctgcctgaatttttttaattgacttttgagcttttgagattgcacgagggagaacaaggcctttgctgttgtggataggaaagacttaacctaaaattaaaccagcaagaaagcattagtaaaaatctaacaatatgaagggctcttatgagtcatttttttcaaaagatgaaaactccagaaacgcacaggaacgaaatacctcccagaaacatgaagcaatcatcgaagactcactggtaatatttttaaaaagtatacagatcaaagcaaaaagaagccatgtgtaacaaagagaaatgtgcaaatattttttaaggcagtattaagtgcaagaggagtaacatgaaataaacattctttcacatggctactgggaatataaatttcgctccagaaaggccgtagcagtttgacgataggtggcaaaaccttaagattgtgtactggggcccagaatttttatttctaggaatgtatcctgaggaaattatccgagatccccacaaactgcaatgtttaggaattgtccttatagcattgcatacacaagaaaaacagagaaaagcctgatccctgtcagtggaaaaggggttcaatgaattacggtgtgtctgcatgaggcttttatgacattaaaaattgttgaacaacggccaggcacagtggctcatgcctgtaatcctaacactttgggaggccaaggtgggaagattgcctgagctcaggagtttgagaccagcctgggcaacacggtgaaaccccgtctctactaaaatacaaaaaattagccgggcgtcgcagcatgcgcctgtagtcccagctgctcaggaggctgaggcaggagaattgattgaacccgggaggcagaggttgcactgagctgagattaagccaccgcactccagcctgggcgacagagcaagattccgttcccaagaaaaaaaaattgttcaacaataagggcaaagggagagaatcataacatctgattaaacagaaaaagcaagatttttaaaactaactatataaggatggtcccagctgtgtcaaaaggaagcttgtttgtaatacgtgtgcataaaaattaaatagaggtgaacacaattattttaaggcagttaaattatctctgtattgtgaactaagactttctagaattttacttattcattctgtacttaaattttttctaatgaacacatatacttttgtaatcagaaaatattaaatgcatgtatttttcaaaatcaattggt

SEQ ID NO: 302575 - DNA, 603 bp, Homo sapiens
gcctggccctggagacacgtctggagagctgttctcctaatatgggtagggtcgggcgtggagctggcagcggcgctgtgtgcgcctgcgcggggcgccgagacagggcgtgttcgctgttcagtgccggtgttgcagggagtgagggcagctggagtgcgttctgccgaagcttgtggttgcacgcccatcgtcttaggggctaccttccgtgaccatgtccaagtctctgaagaagttggtggaggagagccgggagaagaaccagcccgaggtggacatgagtgaccggggcatctccaacatgctggatgtcaacggcctctgaaccagagatcatgggataaatggctgattccaggactgtggcagaaaaaatacaagatgaacctgaatatcttgtgtcagaaggcaagaaagtgctgcaagaatgagggcgtgtgtcgaaaggactaataagccagcttggatggactcatactggccaaatcaggggcaatttaaccatcactgtaaataataatgatagattataacccgtcagctaaaatagcaagctgcaaagccatgcaagtataactaaataaaccatgatctcccagc

SEQ ID NO: 302576 - DNA, 3726 bp, Homo sapiens
gcctggccctggagacacgtctggagagctgttctcctaatatgggtagggtcgggcgtggagctggcagcggcgctgtgtgcgcctgcgcggggcgccgagacagggcgtgttcgctgttcagtgccggtgttgcagggagtgagggcagctggagtgcgttctgccgaagcttgtggttgcacgcccatcgtcttaggggctaccttccgtgttaccttatcccatatcacacaactggtcctcagccataacaagctaacaatggtgccaccgaacatcgcagaactgaagaatttggaggtgctcaacttttttaataaccaaatcgaggagctgcccacacagatcagtagccttcagaaactcaaacacctgaaccttggcatgaacaggctgaacactttgccacgaggcttcggctccctgccagctcttgaggttctggacttgacgtacaacaacttgagcgaaaattctcttcctggaaacttcttctacctgaccaccctgcgtgcactctatctaagtgacaacgattttgaaatcctgccgccagatattgggaagctcacaaagttgcagatactcagccttagggataacgacctgatctcgctgcctaaggaaatcggggagcttacccagcttaaagagctccacattcaggggaaccgcctcaccgttctgcccccagaactaggaaacttggatttaactggccagaagcaggtattcaaagcagagaacaatccctgggtgacccccattgcagaccagttccagcttggcgtgtcccatgtttttgagtatatccgttctgagacatacaaatacctctacggcagacacatgcaggccaacccagaaccaccgaagaagaataatgacaaatcgaaaaagatcagccggaaacccctggcagccaagaacagataaggaagggattggcatcggctggccttccagcaccttctctctccaacacttcattctctcttgccctgtctctcaaataaacccaatgctgcgtgtgaggccttttttatttttcttttcactctctttctaatgcttcccaccttaccttttagattcttttgctaggtgggagattgttataaggtctttaaaccatttccatttgtttctttaacattaccaaaagcagggaacaaagctcttattcaactgcgaattccatagtgggctctggcttttcttgaatagatatcacaaggttgcttattatcaaaagaataattaaaatcatgtaaccatttaaatgtcactgttaacacttttcactctttctgttgattcacctaactcattattttgctttattaaaagtcttccttcaccaccgagatatgctaatttaacttacaaatgattttaataaaatcttgagtttgtatcacatgttacttattgactcagaataaaagaacagtctgatcttggggtataacacattttcatttacttttctcccccaaaatcatcttatccaattttattggttatacatgataaacttttcatgaaagaaatgcaaaattaaatcacagttcgtttcttctcacattaatttgtcaagttttttttttctttgaagactttctaaattaggaagcagaaaaacaaatctctaggagattctgccaaaggattttggaaagtagcattccttcgccgaagaaatggtgatttctgccaggggctggtagacaagaactgtgaaagagagagagaaaaaacctcaactgtgtattttgtcacggcggaaaatctgctcgcatcgaagcattcttctaagcgacttcgatgccaaggaagttgtgtaaatgtgcacgcgctacaccacacccagggtggaaaccacagttgcagagtcattaaacaatcaattgtttgtttaacatctgtgataggcagctttccttcttttcaacagtgatacctacgaaaatcaaaataaatgcaagctgaggttttgtgctcactgaaagggctgtcaaccccagaaggccgacacaaaaaaaatggtatgtgaagatgcaccgtcttttcaaatggcctgggagagtcaaatggcctgggagagggggcctgcccttctctgctgtgtcctttcggcttcccagttgagctcccaagaccaggacccactggggcatataaaatctctgctgtatcctttcggcttcccagttgagctcccaagaccaggacccactggggcatataaaaaagtcaaaaatcaaaatcaaacaacaagttctgagttacttaggaaacagacttcgcatttcaatcagagaggccacagagcaaggtctaaacttctggcttctagacaaattcctgatagaacatttaaatgtgggaagtggcttccccaggtcccatcccctgtttagggatagagttgatatcatttttataggtgccatgtatgcctctgcctgaatttttttaattgacttttgagcttttgagattgcacgagggagaacaaggcctttgctgttgtggataggaaagacttaacctaaaattaaaccagcaagaaagcattagtaaaaatctaacaatatgaagggctcttatgagtcatttttttcaaaagatgaaaactccagaaacgcacaggaacgaaatacctcccagaaacatgaagcaatcatcgaagactcactggtaatatttttaaaaagtatacagatcaaagcaaaaagaagccatgtgtaacaaagagaaatgtgcaaatattttttaaggcagtattaagtgcaagaggagtaacatgaaataaacattctttcacatggctactgggaatataaatttcgctccagaaaggccgtagcagtttgacgataggtggcaaaaccttaagattgtgtactggggcccagaatttttatttctaggaatgtatcctgaggaaattatccgagatccccacaaactgcaatgtttaggaattgtccttatagcattgcatacacaagaaaaacagagaaaagcctgatccctgtcagtggaaaaggggttcaatgaattacggtgtgtctgcatgaggcttttatgacattaaaaattgttgaacaacggccaggcacagtggctcatgcctgtaatcctaacactttgggaggccaaggtgggaagattgcctgagctcaggagtttgagaccagcctgggcaacacggtgaaaccccgtctctactaaaatacaaaaaattagccgggcgtcgcagcatgcgcctgtagtcccagctgctcaggaggctgaggcaggagaattgattgaacccgggaggcagaggttgcactgagctgagattaagccaccgcactccagcctgggcgacagagcaagattccgttcccaagaaaaaaaaattgttcaacaataagggcaaagggagagaatcataacatctgattaaacagaaaaagcaagatttttaaaactaactatataaggatggtcccagctgtgtcaaaaggaagcttgtttgtaatacgtgtgcataaaaattaaatagaggtgaacacaattattttaaggcagttaaattatctctgtattgtgaactaagactttctagaattttacttattcattctgtacttaaattttttctaatgaacacatatacttttgtaatcagaaaatattaaatgcatgtatttttcaaaatcaattggt

SEQ ID NO: 302577 - DNA, 1215 bp, Homo sapiens
gcctggccctggagacacgtctggagagctgttctcctaatatgggtagggtcgggcgtggagctggcagcggcgctgtgtgcgcctgcgcggggcgccgagacagggcgtgttcgctgttcagtgccggtgttgcagggagtgagggcagctggagtgcgttctgccgaagcttgtggttgcacgcccatcgtcttaggggctaccttccgtgaccatgtccaagtctctgaagaagttggtggaggagagccgggagaagaaccagcccgaggtggacatgagtgaccggggcatctccaacatgctggatgtcaacggcctctttaccttatcccatatcacacaactggtcctcagccataacaagctaacaatggtgccaccgaacatcgcagaactgaagaatttggaggtgctcaacttttttaataaccaaatcgaggagctgcccacacagatcagtagccttcagaaactcaaacacctgaaccttggcatgaacaggctgaacactttgccacgaggcttcggctccctgccagctcttgaggttctggacttgacgtacaacaacttgagcgaaaattctcttcctggaaacttcttctacctgaccaccctgcgtgcactctatctaagtgacaacgattttgaaatcctgccgccagatattgggaagctcacaaagttgcagatactcagccttagggataacgacctgatctcgctgcctaaggaaatcggggagcttacccagcttaaagagctccacattcaggggaaccgcctcaccgttctgcccccagaactaggaaacttggatttaactggccagaagcaggtattcaaagcagagaacaatccctgggtgacccccattgcagaccagttccagcttggcgtgtcccatgtttttgagtatatccgttctgagacatacaaatagtaagtagactctgattttctgaaatagtagactgtgattttatagtatttataattacgcctttaaaaatattatgtgacagtatcctattgatggcagttagcacttagcattttaagatgttttattaaaaactgcatgtcggccaggtgtggtgtggctcacagctgtaatcctagcatttggggaagtcgagactagaggattgcttgagcccaggagtttgagaccagcctgggcaacatagcaagaccccgtctctacaa

SEQ ID NO: 302578 - DNA, 1887 bp, Homo sapiens
gcctggccctggagacacgtctggagagctgttctcctaatatgggtagggtcgggcgtggagctggcagcggcgctgtgtgcgcctgcgcggggcgccgagacagggcgtgttcgctgttcagtgccggtgttgcagggagtgagggcagctggagtgcgttctgccgaagcttgtggttgcacgcccatcgtcttaggggctaccttccgtgaccatgtccaagtctctgaagaagttggtggaggagagccgggagaagaaccagcccgaggtggacatgagtgaccggggcatctccaacatgctggatgtcaacggcctctttaccttatcccatatcacacaactggtcctcagccataacaagctaacaatggtgccaccgaacatcgcagaactgaagaatttggaggtgctcaacttttttaataaccaaatcgaggagctgcccacacagatcagtagccttcagaaactcaaacacctgaaccttggcatgaacaggctgaacactttgccacgaggcttcggctccctgccagctcttgaggttctggacttgacgtacaacaacttgagcgaaaattctcttcctggaaacttcttctacctgaccaccctgcgtgcactctatctaagtgacaacgattttgaaatcctgccgccagatattgggaagctcacaaagttgcagatactcagccttagggataacgacctgatctcgctgcctaaggaaatcggggagcttacccagcttaaagagctccacattcaggggaaccgcctcaccgttctgcccccagaactaggaaacttggatttaactggccagaagcagcctctacggcagacacatgcaggccaacccagaaccaccgaagaagaataatgacaaatcgaaaaagatcagccggaaacccctggcagccaagaacagataaggaagggattggcatcggctggccttccagcaccttctctctccaacacttcattctctcttgccctgtctctcaaataaacccaatgctgcgtgtgaggccttttttatttttcttttcactctctttctaatgcttcccaccttaccttttagattcttttgctaggtgggagattgttataaggtctttaaaccatttccatttgtttctttaacattaccaaaagcagggaacaaagctcttattcaactgcgaattccatagtgggctctggcttttcttgaatagatatcacaaggttgcttattatcaaaagaataattaaaatcatgtaaccatttaaatgtcactgttaacacttttcactctttctgttgattcacctaactcattattttgctttattaaaagtcttccttcaccaccgagatatgctaatttaacttacaaatgattttaataaaatcttgagtttgaaaaaaaaaaacaaaaaaaaaaaacaaaaaaaaaaaaaaacaaaacaaaacaaaaaaacaaaaaaaaaagggggggggcgcgcggggcggcccacagaagaaaagagttctaaacagaccaccggcgggggaggcgcgcgcggggagaccacagtgagaaagagaggaacaccgagggcacacagaagaggtgtatacaagagaggaagaaccggcgggcaagaacaacaagggggggaggggaaattcccacacacaagagaaaaaaaaaccgccccgcggcggggagagaaacacgagagcgatggtcagacaaaaaaaaaacaacaaaacaaacgagggagtacctcaggaggagcacgtccatcagcggagaggagcaatacaccaacggagaggggcagccaccaaaggaacaggacgccggcgaaagcatacgaataatacacccccccggagtg

SEQ ID NO: 302579 - DNA, 1610 bp, Homo sapiens
gcctggccctggagacacgtctggagagctgttctcctaatatgggtagggtcgggcgtggagctggcagcggcgctgtgtgcgcctgcgcggggcgccgagacagggcgtgttcgctgttcagtgccggtgttgcagggagtgagggcagctggagtgcgttctgccgaagcttgtggttgcacgcccatcgtcttaggggctaccttccgtgaccatgtccaagtctctgaagaagttggtggaggagagccgggagaagaaccagcccgaggtggacatgagtgaccggggcatctccaacatgctggatgtcaacggcctctttaccttatcccatatcacacaactggtcctcagccataacaagctaacaatggtgccaccgaacatcgcagaactgaagaatttggaggtgctcaacttttttaataaccaaatcgaggagctgcccacacagatcagtagccttcagaaactcaaacacctgaaccttggcatgaacaggctgaacactttgccacgaggcttcggctccctgccagctcttgaggttctggacttgacgtacaacaacttgagcgaaaattctcttcctggaaacttcttctacctgaccaccctgcgtgcactctatctaagtgacaacgattttgaaatcctgccgccagatattgggaagctcacaaagttgcagatactcagccttagggataacgacctgatctcgctgcctaaggaaatcggggagcttacccagcttaaagagctccacattcaggggaaccgcctcaccgttctgcccccagaactaggtaaggttgctgatgaatgaacttagttctgggtttcatgaataacaattatcctaatgtagcaattctgaacaacctctgtcctcttcttggcaactactctccacctaggcacacgatgctgatcatttgagaaccatttgtcattgaccagagttagctgttacaggtttgaccttcccggatcctgtgttctgcagctgtagtgtcccctgtcttagaaactgctgatgaaagatgaccccgctcagctccctgcgtgatgtagtgggaaaagcatgggattagtagtaagagccttatccctggctcctcattgactagctgggtaagctttctgggtcttggttggttattaataactttaagtatcactcttactttttaaccccttaaatttttattgacctggaaaaacttttaccaaatagttaaagtagttgttatggctacttgaacatgttgatacctctgcgggtcgtgaatttgcctctctcctgatcccatctctagtaggaattgttaaatatgttcttgctgggaatggatcctactcctggccgctgaatcctaatcctgtttctctgccaggtcgttcctatttccagggtgggtttatgtcccccgccagaaataacctccaagccagtaattctgttactgcttcgttccactgcaaaaggttcacgagttcccttatcttttcttgtgcagaccctccatagcctctcatttcttcagggacatcagtctccatatttttaaatatcatgctcatgatatatttgtattgtt

SEQ ID NO: 302580 - DNA, 2310 bp, Homo sapiens
gattctgtgtgtgtcctcagatgctcagccgcagacctttgggagagtaaagggggcacacccacccaccttgcctccaggctctttccttcctattcctgttctatggtggggctccattgcgagacttcagattgagaaatcagatgaagtttcaagaaaaggaaactggcaggtgacagagatgggtggagggactggggaaaggctgtttactccctcctgtctagtcggcttggtccctttagggctccggatatctttggtgacttgtccactccagtgtggcatcatgtggcagctgctcctcccaactgctctgctacttctagtttcagctggcatgcggactgaagatctcccaaaggctgtggtgttcctggagcctcaatggtacagcgtgcttgagaaggacagtgtgactctgaagtgccagggagcctactcccctgaggacaattccacacagtggtttcacaatgagagcctcatctcaagccaggcctcgagctacttcattgacgctgccacagtcaacgacagtggagagtacaggtgccagacaaacctctccaccctcagtgacccggtgcagctagaagtccatatcggctggctgttgctccaggcccctcggtgggtgttcaaggaggaagaccctattcacctgaggtgtcacagctggaagaacactgctctgcataaggtcacatatttacagaatggcaaagacaggaagtattttcatcataattctgacttccacattccaaaagccacactcaaagatagcggctcctacttctgcagggggcttgttgggagtaaaaatgtgtcttcagagactgtgaacatcaccatcactcaaggtttggcagtgtcaaccatctcatcattctctccacctgggtaccaagtctctttctgcttggtgatggtactcctttttgcagtggacacaggactatatttctctgtgaagacaaacattcgaagctcaacaagagactggaaggaccataaatttaaatggagaaaggaccctcaagacaaatgacccccatcccatgggggtaataagagcagtagcagcagcatctctgaacatttctctggatttgcaaccccatcatcctcaggcctctctacaagcagcaggaaacatagaactcagagccagatcctttatccaactctcaatttttccttggtctccagtggaagggaaaagcccatgatcttcaagcagggaagccccagtgagtagctgcattcctagaaattgaagtttcagagctacacaaacactttttctgtcccaaccattccctcacagcaaagcaacaatacaggctagggatggtaatcctttaaacatacaaaaattgctcgtattataaattacccagtttagaggggaaaaaaagaaaataattattcctaaacaaatggataagtagaattaatggttgaggcaggaccctacagagtgtgggaactgctggggatctagagaattcagtgggaccaatgaaagcatggctgagaaatagcaggtagtccaggatagtctaagggaggtgttcccatctgagcccagagataagggtgtcttcctagaacattagccgtagtggaattaacaggaaatcatgagggtgacgtagaattgagtcttccaggggactctatcagaactggaccatctccaagtatataacgatgagtcctcttaatgctaggagtagaaaatggtcctaggaaggggactgaggattgcggtggggggtggggtggaaaagaaagtacagaacaaaccctgtgtcactgtcccaagttgctaagtgaacagaactatctcagcatcagaatgagaaagcctgagaagaaagaaccaaccacaagcacacaggaaggaaagcgcaggaggtgaaaatgctttcttggccagggtagtaagaattagaggttaatgcagggactgtaaaaccaccttttctgcttcaatatctaattcctgtgtagctttgttcattgcatttattaaacaaatgttgtataaccaatactaaatgtactactgagcttcgctgagttaagttatgaaactttcaaatccttcatcatgtcagttccaatgaggtggggatggagaagacaattgttgcttatgaaagaaagctttagctgtctctgttttgtaagctttaagcgcaacatttcttggttccaataaagcattttacaagatcttgcatgctactcttagatagaagatgggaaaaccatggtaataaaatatgaatgata

SEQ ID NO: 302581 - DNA, 1983 bp, Homo sapiens
gattctgtgtgtgtcctcagatgctcagccgcagacctttgggagagtaaagggggcacacccacccaccttgcctccaggctctttccttcctattcctgttctatggtggggctccattgcgagacttcagattgagaaatcagatgaagtttcaagaaaaggaaactggcaggtgacagagatgggtggagggactggggaaaggctgtttactccctcctgtctagtcggcttggtccctttagggctccggatatctttggtgacttgtccactccagtgtggcatcatgtggcagctgctcctcccaactgctctgctacttctagtttcagctggcatgcggactgaagatctcccaaaggctgtggtgttcctggagcctcaatggtacagcgtgcttgagaaggacagtgtgactctgaagtgccagggagcctactcccctgaggacaattccacacagtggtttcacaatgagagcctcatctcaagccaggcctcgagctacttcattgacgctgccacagtcaacgacagtggagagtacaggtgccagacaaacctctccaccctcagtgacccggtgcagctagaagtccatatcggctggctgttgctccaggcccctcggtgggtgttcaaggaggaagaccctattcacctgaggtgtcacagctggaagaacactgctctgcataaggtcacatatttacagaatggcaaagacaggaagtattttcatcataattctgacttccacattccaaaagccacactcaaagatagcggctcctacttctgcagggggcttgttgggagtaaaaatgtgtcttcagagactgtgaacatcaccatcactcaaggtttggcagtgtcaaccatctcatcattctctccacctgggtaccaagtctctttctgcttggtgatggtactcctttttgcagtggacacaggactatatttctctgtgaagacaaacattcgaagctcaacaagagactggaaggaccataaatttaaatggagaaaggaccctcaagacaaatgacccccatcccatgggggtaataagagcagtagcagcagcatctctgaacatttctctggatttgcaaccccatcatcctcaggcctctctacaagcagcaggaaacatagaactcagagccagatcctttatccaactctcaatttttccttggtctccagtggaagggaaaagcccatgatcttcaagcagggaagccccagtgagtagctgcattcctagaaattgaagtttcagagctacacaaacactttttctgtcccaaccattccctcacagcaaagcaacaatacaggctagggatggtaatcctttaaacatacaaaaattgctcgtattataaattacccagtttagaggggaaaaaaagaaaataattattcctaaacaaatggataagtagaattaatggttgaggcaggaccctacagagtgtgggaactgctggggatctagagaattcagtgggaccaatgaaagcatggctgagaaatagcaggtagtccaggatagtctaagggaggtgttcccatctgagcccagagataagggtgtcttcctagaacattagccgtagtggaattaacaggaaatcatgagggtgacgtagaattgagtcttccaggggactctatcagaactggaccatctccaagtatataacgatgagtcctcttaatgctaggagtagaaaatggtcctaggaaggggactgaggattgcggtggggggtggggtggaaaagaaagtacagaacaaaccctgtgtcactgtcccaagttgctaagtgaacagaactatctcagcatcagaatgagaaagcctgagaagaaagaaccaaccacaagcacacaggaaggaaagcgcaggaggtgaaaatgctttcttggccagggtagggtcccgaagatcctgagagtcacctc

SEQ ID NO: 302582 - DNA, 2115 bp, Homo sapiens
gtggcccggaggggcctgagctaaatccgcaggacctgggtaacacgaggaagggctccggatatctttggtgacttgtccactccagtgtggcatcatgtggcagctgctcctcccaactgctctgctacttctagtttcagctggcatgcggactgaagatctcccaaaggctgtggtgttcctggagcctcaatggtacagcgtgcttgagaaggacagtgtgactctgaagtgccagggagcctactcccctgaggacaattccacacagtggtttcacaatgagagcctcatctcaagccaggcctcgagctacttcattgacgctgccacagtcaacgacagtggagagtacaggtgccagacaaacctctccaccctcagtgacccggtgcagctagaagtccatatcggctggctgttgctccaggcccctcggtgggtgttcaaggaggaagaccctattcacctgaggtgtcacagctggaagaacactgctctgcataaggtcacatatttacagaatggcaaagacaggaagtattttcatcataattctgacttccacattccaaaagccacactcaaagatagcggctcctacttctgcagggggcttgttgggagtaaaaatgtgtcttcagagactgtgaacatcaccatcactcaaggtttggcagtgtcaaccatctcatcattctctccacctgggtaccaagtctctttctgcttggtgatggtactcctttttgcagtggacacaggactatatttctctgtgaagacaaacattcgaagctcaacaagagactggaaggaccataaatttaaatggagaaaggaccctcaagacaaatgacccccatcccatgggggtaataagagcagtagcagcagcatctctgaacatttctctggatttgcaaccccatcatcctcaggcctctctacaagcagcaggaaacatagaactcagagccagatcctttatccaactctcaatttttccttggtctccagtggaagggaaaagcccatgatcttcaagcagggaagccccagtgagtagctgcattcctagaaattgaagtttcagagctacacaaacactttttctgtcccaaccattccctcacagcaaagcaacaatacaggctagggatggtaatcctttaaacatacaaaaattgctcgtattataaattacccagtttagaggggaaaaaaagaaaataattattcctaaacaaatggataagtagaattaatggttgaggcaggaccctacagagtgtgggaactgctggggatctagagaattcagtgggaccaatgaaagcatggctgagaaatagcaggtagtccaggatagtctaagggaggtgttcccatctgagcccagagataagggtgtcttcctagaacattagccgtagtggaattaacaggaaatcatgagggtgacgtagaattgagtcttccaggggactctatcagaactggaccatctccaagtatataacgatgagtcctcttaatgctaggagtagaaaatggtcctaggaaggggactgaggattgcggtggggggtggggtggaaaagaaagtacagaacaaaccctgtgtcactgtcccaagttgctaagtgaacagaactatctcagcatcagaatgagaaagcctgagaagaaagaaccaaccacaagcacacaggaaggaaagcgcaggaggtgaaaatgctttcttggccagggtagtaagaattagaggttaatgcagggactgtaaaaccaccttttctgcttcaatatctaattcctgtgtagctttgttcattgcatttattaaacaaatgttgtataaccaatactaaatgtactactgagcttcgctgagttaagttatgaaactttcaaatccttcatcatgtcagttccaatgaggtggggatggagaagacaattgttgcttatgaaagaaagctttagctgtctctgttttgtaagctttaagcgcaacatttcttggttccaataaagcattttacaagatcttgcatgctactcttagatagaagatgggaaaaccatggtaataaaatatgaatgata

SEQ ID NO: 302583 - DNA, 604 bp, Homo sapiens
aagcagtggtatcaacgcagagtgcccattacggccgggggtggcatcatgtggcagctgctcctcccaactgctctgctacttctagtttcagctggcatgcggactgaagatctcccaaaggctgtggtgttcctggagcctcaatggtacagcgtgcttgagaaggacagtgtgactctgaagtgccagggagcctactcccctgaggacaattccacacagtggtttcacaatgagagcctcatctcaagccaggcctcgagctacttcattgacgctgccacagtcaacgacagtggagagtacaggtgccagacaaacctctccaccctcagtgacccggtgcagctagaagtccatatcggtgagttgatgaaggggaagaggaaaatcaccaataaagggtgaaacaaagggtcctgaaatacttggtaagagccagagatgatattcttagagataaaagctaagatgagatgatgtgtggtcccactgaatggtatcagagttgtagtcctagctctaagtaggtcttgggcaaaatgtcaaagcctgtcagaccagtagatataggactgctgcatgcacaattccagaacgg

SEQ ID NO: 302584 - DNA, 151 bp, Homo sapiens
actctctactggtgacctcactgtttgttccaaatatctgccttagtgactgtcattttttttcatctctccacttctcctaataggtttggcagtgtcaaccatctcatcattctctccacctgggtaccaagtctctttctgcttggtg

SEQ ID NO: 302585 - DNA, 1978 bp, Homo sapiens
gattctgtgtgtgtcctcagatgctcagccgcagacctttgggagagtaaagggggcacacccacccaccttgcctccaggctctttccttcctattcctgttctatggtggggctccattgcgagacttcagattgagaaatcagatgaagtttcaagaaaaggaaactggcaggtgacagagatgggtggagggactggggaaaggctgtttactccctcctgtctagtcggcttggtccctttagggctccggatatctttggtgacttgtccactccagtgtggcatcatgtggcagctgctcctcccaactgctctgctacttctagtttcagctggcatgcggactgaagatctcccaaaggctgtggtgttcctggagcctcaatggtacagcgtgcttgagaaggacagtgtgactctgaagtgccagggagcctactcccctgaggacaattccacacagtggtttcacaatgagagcctcatctcaagccaggcctcgagctacttcattgacgctgccacagtcaacgacagtggagagtacaggtgccagacaaacctctccaccctcagtgacccggtgcagctagaagtccatatcggctggctgttgctccaggcccctcggtgggtgttcaaggaggaagaccctattcacctgaggtgtcacagctggaagaacactgctctgcataaggtcacatatttacagaatggcaaagacaggaagtattttcatcataattctgacttccacattccaaaagccacactcaaagatagcggctcctacttctgcagggggcttgttgggagtaaaaatgtgtcttcagagactgtgaacatcaccatcactcaaggtttggcagtgtcaaccatctcatcattctctccacctgggtaccaagtctctttctgcttggtgatggtactcctttttgcagtggacacaggactatatttctctgtgaagacaaacattcgaagctcaacaagagactggaaggaccataaatttaaatggagaaaggaccctcaagacaaatgacccccatcccatgggggtaataagagcagtagcagcagcatctctgaacatttctctggatttgcaaccccatcatcctcaggcctctctacaagcagcaggaaacatagaactcagagccagatcctttatccaactctcaatttttccttggtctccagtggaagggaaaagcccatgatcttcaagcagggaagccccagtgagtagctgcattcctagaaattgaagtttcagagctacacaaacactttttctgtcccaaccattccctcacagcaaagcaacaatacaggctagggatggtaatcctttaaacatacaaaaattgctcgtattataaattacccagtttagaggggaaaaaaagaaaataattattcctaaacaaatggataagtagaattaatggttgaggcaggaccctacagagtgtgggaactgctggggatctagagaattcagtgggaccaatgaaagcatggctgagaaatagcaggtagtccaggatagtctaagggaggtgttcccatctgagcccagagataagggtgtcttcctagaacattagccgtagtggaattaacaggaaatcatgagggtgacgtagaattgagtcttccaggggactctatcagaactggaccatctccaagtatataacgatgagtcctcttaatgctaggagtagaaaatggtcctaggaaggggactgaggattgcggtggggggtggggtggaaaagaaagtacagaacaaaccctgtgtcactgtcccaagttgctaagtgaacagaactatctcagcatcagaatgagaaagcctgagaagaaagaaccaaccacaagcacacaggaaggaaagcgcaggaggtgaaaatgctttcttggccagggttaaggctaaacgggggatcctcta

SEQ ID NO: 302586 - DNA, 1587 bp, Homo sapiens
gattctgtgtgtgtcctcagatgctcagccgcagacctttgggagagtaaagggggcacacccacccaccttgcctccaggctctttccttcctattcctgttctatggtggggctccattgcgagacttcagattgagaaatcagatgaagtttcaagaaaaggaaactggcaggtgacagagatgggtggagggactggggaaaggctgtttactccctcctgtctagtcggcttggtccctttagggctccggatatctttggtgacttgtccactccagtgtggcatcatgtggcagctgctcctcccaactgctctgctacttctagtttcagctggcatgcggactgaagatctcccaaaggctgtggtgttcctggagcctcaatggtacagcgtgcttgagaaggacagtgtgactctgaagtgccagggagcctactcccctgaggacaattccacacagtggtttcacaatgagagcctcatctcaagccaggcctcgagctacttcattgacgctgccacagtcaacgacagtggagagtacaggtgccagacaaacctctccaccctcagtgacccggtgcagctagaagtccatatcggctggctgttgctccaggcccctcggtgggtgttcaaggaggaagaccctattcacctgaggtgtcacagctggaagaacactgctctgcataaggtcacatatttacagaatggcaaagacaggaagtattttcatcataattctgacttccacattccaaaagccacactcaaagatagcggctcctacttctgcagggggcttgttgggagtaaaaatgtgtcttcagagactgtgaacatcaccatcactcaaggtttggcagtgtcaaccatctcatcattctctccacctgggtaccaagtctctttctgcttggtgatggtactcctttttgcagtggacacaggactatatttctctgtgaagacaaacattcgaagctcaacaagagactggaaggaccataaatttaaatggagaaaggaccctcaagacaaatgacccccatcccatgggggtaataagagcagtagcagcagcatctctgaacatttctctggatttgcaaccccatcatcctcaggcctctctacaagcagcaggaaacatagaactcagagccagatcctttatccaactctcaatttttccttggtctccagtggaagggaaaagcccatgatcttcaagcagggaagccccagtgagtagctgcattcctagaaattgaagtttcagagctacacaaacactttttctgtcccaaccattccctcacagcaaagcaacaatacaggctagggatggtaatcctttaaacatacaaaaattgctcgtattataaattacccagtttagaggggaaaaaaagaaaataattattcctaaacaaatggataagtagaattaatggttgaggcaggaccctacagagtgtgggaactgctggggatctagagaattcagtgggaccaatgaaagcatggctgagaaatagcaggtagcccttaacttcgggatcctctagatca

SEQ ID NO: 302587 - DNA, 2066 bp, Homo sapiens
aagcagtggtatcaacgcagagtgcccattacggccgggggtggcatcatgtggcagctgctcctcccaactgctctgctacttctagtttcagctggcatgcggactgaagatctcccaaaggctgtggtgttcctggagcctcaatggtacagcgtgcttgagaaggacagtgtgactctgaagtgccagggagcctactcccctgaggacaattccacacagtggtttcacaatgagagcctcatctcaagccaggcctcgagctacttcattgacgctgccacagtcaacgacagtggagagtacaggtgccagacaaacctctccaccctcagtgacccggtgcagctagaagtccatatcggctggctgttgctccaggcccctcggtgggtgttcaaggaggaagaccctattcacctgaggtgtcacagctggaagaacactgctctgcataaggtcacatatttacagaatggcaaagacaggaagtattttcatcataattctgacttccacattccaaaagccacactcaaagatagcggctcctacttctgcagggggcttgttgggagtaaaaatgtgtcttcagagactgtgaacatcaccatcactcaaggtttggcagtgtcaaccatctcatcattctctccacctgggtaccaagtctctttctgcttggtgatggtactcctttttgcagtggacacaggactatatttctctgtgaagacaaacattcgaagctcaacaagagactggaaggaccataaatttaaatggagaaaggaccctcaagacaaatgacccccatcccatgggggtaataagagcagtagcagcagcatctctgaacatttctctggatttgcaaccccatcatcctcaggcctctctacaagcagcaggaaacatagaactcagagccagatcctttatccaactctcaatttttccttggtctccagtggaagggaaaagcccatgatcttcaagcagggaagccccagtgagtagctgcattcctagaaattgaagtttcagagctacacaaacactttttctgtcccaaccattccctcacagcaaagcaacaatacaggctagggatggtaatcctttaaacatacaaaaattgctcgtattataaattacccagtttagaggggaaaaaaagaaaataattattcctaaacaaatggataagtagaattaatggttgaggcaggaccctacagagtgtgggaactgctggggatctagagaattcagtgggaccaatgaaagcatggctgagaaatagcaggtagtccaggatagtctaagggaggtgttcccatctgagcccagagataagggtgtcttcctagaacattagccgtagtggaattaacaggaaatcatgagggtgacgtagaattgagtcttccaggggactctatcagaactggaccatctccaagtatataacgatgagtcctcttaatgctaggagtagaaaatggtcctaggaaggggactgaggattgcggtggggggtggggtggaaaagaaagtacagaacaaaccctgtgtcactgtcccaagttgctaagtgaacagaactatctcagcatcagaatgagaaagcctgagaagaaagaaccaaccacaagcacacaggaaggaaagcgcaggaggtgaaaatgctttcttggccagggtagtaagaattagaggttaatgcagggactgtaaaaccaccttttctgcttcaatatctaattcctgtgtagctttgttcattgcatttattaaacaaatgttgtataaccaatactaaatgtactactgagcttcgctgagttaagttatgaaactttcaaatccttcatcatgtcagttccaatgaggtggggatggagaagacaattgttgcttatgaaagaaagctttagctgtctctgttttgtaagctttaagcgcaacatttcttggttccaataaagcattttacaagatcttgcatgctactcttagatagaagatgggaaaaccatggtaataaaatatgaatgata

SEQ ID NO: 302588 - DNA, 614 bp, Homo sapiens
  misc_feature (577)..(577): n is a, c, g, or t
gtggcccggaggggcctgagctaaatccgcaggacctgggtaacacgaggaagggctccggatatctttggtgacttgtccactccagtgtggcatcatgtggcagctgctcctcccaactgctctgctacttctagtttcagctggcatgcggactgaagatctcccaaaggctgtggtgttcctggagcctcaatggtacagcgtgcttgagaaggacagtgtgactctgaagtgccagggagcctactcccctgaggacaattccacacagtggtttcacaatgagagcctcatctcaagccaggcctcgagctacttcattgacgctgccacagtcaacgacagtggagagtacaggtgccagacaaacctctccaccctcagtgacccggtgcagctagaagtccatatcggccatttcccgaccatgacctcatgttctctctttgtgaagtctgattacttggtgacatgattgtgagaataagctctggcgatataagaatttcctctcttgaaggccatgctcagtaaattacttggtgacatgatcgtgagaataagctctggcgantacaagaatttcctctcttgaaggccatgctcagtaa

SEQ ID NO: 302589 - DNA, 765 bp, Homo sapiens
ccccctttacctctcttttgtttttattatttttatctttcctttccttgtcttttctcatttcccactctatgaattccttagcatgccagccatagctgtgaacacttgtttactcccttgagttgcttttgaacagatgaaaagtcattcttgctgttgtagcaggttgctgtgcactgcagatttcgttttatgaaatgggaacatgccgcctacttggtagcccttaagaatcaggccagtctaactactgcctctcccgtgtgaaccacagccccactgtccatagtgtctttgtgcaaactgtaatgaatgtccctgcctccagaggagtgcagtaccacacctagccagcagagtgcaggtgggattccaaccccacttccaatccctcagccagacaccctagcatcttgcacacagctctctgtggcagtctcgtgtgggcacgcttaaatctcgcttgttacctcataacatacttacaatgactgcttcccattaactcctctatgcatctttctgtaaacttttgtcctccaaatttcatcaaataattggcagggggaggaggtggcaaaagagagaaacatgccttgctgtgaagaaacatcagagctctttgaaggccattgcagttaactagacctatgtctgagcttgaagcagatattgaccgtgaaaatggcagtgctgggaataatgaggcctggaagctacgaagatgaggttgtaggggaagatttgttgatgtggaactat

SEQ ID NO: 302590 - DNA, 4929 bp, Homo sapiens
  misc_feature (1560)..(1560): n is a, c, g, or t
  misc_feature (1562)..(1562): n is a, c, g, or t
  misc_feature (1640)..(1640): n is a, c, g, or t
ttttataagatgtactgtatctatgagcctgcctaagcagctcaaattaacttgcaatgaacatttgcaatctgggagaaacctgggagtttctgcccctcaaatgcaaaaggaatctgttataaaagaggaaaattctctacgaattgtccccaaaaaacctcaaagacatagcttgcctgctacaggagtgcttaaaaaggctgcctccgaggagcttttggaaaaaagttcttatccttcaagtgaagaaaaaagttcagagaagagtctagaaagaaatcaccttcagcatttgtgtgcccaaaaccgtggtgtgtcatcctcctttgatatgcctaaacgggcttcagaaaagccagtgtggaagttacctcatcctattttacccttttcagggaacccagaattcttaaagtctgtcaccgtatcgtcaaacagtgagccttcaacagccctaaccaagcccagagcaaaatcgttatctgctatggatgtggaaaagtgcactaagccttgcaaagactctacaaagaaaaactcttttaaaaagttgctcagcatgaaactgtccatctgtttcatgaagagtgactttcaaaaattttggtccaagagtagccaactcggagacaccaccacaggccacctctccagtggggagcagaaggggattgaaagtgattggcaaggcttgttggtaggagaggagaagagaagtaaacccatcaaggcatattccacagaaaactatagcctggaatctcaaaagaagaggaagaagtctcggggccagaccagtgcagctaatggtctgagagctgagtctttggatgaccaaatgctctcccgggagtcatcatctcaggcaccttacaagtctgttacaagcctctgtgcaccggagtatgaaaatatacgccattatgaggaaataccagagtacgagaacttgccatttattatggctatacggaaaactcaagagttggaatggcagaattccagcagcatggaggacgctgatgcaaatgtgtatgaggtagaagagccgtatgaagctccagatggccagctgcagcttggacccagacatcagcattccagttcaggagcatcccaggaggaacagaatgatcttggtcttggtgaccttccctctgatgaggaggaaatcatcaacagttctgatgaagatgatgtcagctctgagtcaagtaaaggagagcctgacccactggaagataaacaggatgaagataatggaatgaaaagtaaagttcatcatattgccaaggagatcatgagctcagagaaagtgtttgtggatgtgttaaaacttttgcatattgatttccgggatgcagtagctcatgcttccaggcaacttgggaaaccagtgattgaggaccggattctaaatcagatcctatactacttgcctcagctgtatgagctcaaccgggatctcttgaaggaactggaggaaagaatgttgcactggactgaacaacaaagaattgctgatatctttgtaaagaagggaccatatctaaaaangnattccacatacatcaaagaatttgataagaatatagccttgctggatgaacagtgcaagaaaaatccaggttttgctnctgttgttagagaatttgagatgagccctcgctgtgctaatctggccctcaagcactacctgctcaagccggttcagaggatcccccagtacaggctgttgctgacagattatttgaagaatctcatagaagatgctggagattacagagacactcaagatgcccttgctgttgttatagaggtagccaaccacgccaatgacaccatgaagcaaggagacaactttcagaaacttatgcaaattcagtacagcttaaatggacaccatgaaattgtgcagcctggtcgggtttttctcaaagaaggaattctgatgaagctgtctcggaaagtgatgcaacctcgaatgtttttcctgtttaatgatgccctgctgtatacaacaccagtgcagtctgggatgtataaactgaacaacatgctctcactggctggaatgaaggtcagaaaacctacccaagaagcctatcagaatgaattaaagattgaaagtgtagaacgttccttcattctctcagccagttctgccacagaaagggatgaatggctagaagcgatttccagggcaatagaagagtatgccaagaaaagaatcaccttctgtcctagtaggagtcttgatgaggcagactcagaaaataaagaagaagttagtcctcttggatcgaaggctcccatctggattcctgataccagagccacaatgtgtatgatctgcacaagcgaattcactctcacctggagacgacaccactgccgggcctgtggaaagattgtatgccaagcttgttcgtctaataagtatggcttagattacctgaaaaatcaaccagcaagagtatgtgaacattgtttccaagaactgcagaaattagatcaccagcactcccctaggattggatctcctggaaatcacaaatctccttcaagtgccttatcatcagtcttacatagcattccatcagggaggaaacagaaaaaaatcccagctgctctcaaagaagtatcagcaaacacagaggattcttctatgagtggctacttgtacagatcaaagggcaataaaaaaccctggaaacacttttggtttgtcataaaaaataaagtactatatacatatgctgcaagtgaggacgtggccgctttggagagtcagcctttattaggattcactgttattcaagttaaagatgagaattccgagtctaaagtatttcagttactgcacaaaaacatgttattttatgtattcaaagcagaggatgctcattcggctcagaagtggatagaagcatttcaggaaggcacaatattgtagcagtattggtttcatctcttctgtgattccaaagaggtggaatttcatcagaatggagtaaatgcaattcaaaaattgtataaaaatgaacactgccaagataaagccaaccagacccttcatcaaagaaattgttttgttaggtataagcaatttttaaaaggtgtttgttttttcatttatgttatttattaaaattttgatgtttacttaatggtcagaattatttctgagacacactgaattctaaagtaccatttctttagagaccagaaaaactatcttaatactgtatactgtattaactattcgtgacatagttcacactgttttcttaccttacattgtaacaatcttactggtggaaagtctttgtaaggaaaaaacacatagcaaggagcaaatttccacaaagtgcttggtttaggaattgtgattattataaaactgctgatgaaaaaaatgcatgtctttgaatcaataaacttgggtgaatatttgtatcttttagtggaaaaacatggccagcttctacctcagtaactgtgaactgaaatttcagtaaattatctaaagtatttctgttgttaggtacctctttggcaggagttaatattacatcatcaaagaattatagcaaagagatagaatctgaattttttaaaactgtgagtaggaatgaagatgtttttatttgcagaataccacaaataaccaactcttccggcttttaagtccaatcttttaaaaaatctaccacttcgaaacaaacataaatgtatcattttttaaaatagcaaaatatagcaagcattatgtcacataatattccctgctattataagagttctgagcccaagtcaatgatgatatttgtatctataagtaatgttacatttccaaaaatattgtgcattacaaatggaactggaattactatatcagaaaagcataattataagccagtaataactgaaattctatagtattcattttcaaaaggtctttttctgccagtttgtgatatcctccctcctaattaaaaaaaaaaacaacaaatcctttctctataagcagctatcagcacacctccttaggaaagatttagattcataattctggtgcacttactgtttaacatatgaactaccttgcacatacaattgttgattagcagaagaaaatgaaataacactgtgataaaagccatccctgatgttcacaatacacaatttattaactaagtttaaactataaattatcttaactgccatgagcggtggctcacacctacaatctcagcattttgggaggccgaggccgttggaccacctgaggtcaggagatcgagaccagcctggccaatatggtgaaaccccatctctattaaaaatacaagaattagccggtcgtggtggtacatggctgtagtcctagctattcagcaggctgaggcaggagcatcgcttgaacccaggaggcagaggttgcagtgagccgagatggtgccactgcactccagcctgggatgacagagcgagactccatctcaaaaaaaaaaaaaaaaaaaaattgaacagcaaggttatccatataatatttctttaaagggtacaagaattttcctttctgcctctaaataaaggatttcctaattcagtgtgatccttaacagcaaccatgaggattactgagtgcctttctggggccttttgaatgctgtttggtacagcaccagagtccctactagatctagagttggctgctatagttttttgtggcgattttttgccatggagtcatttgaacctcatacacaatcctaacatgccatcccctttctgtcatagcaggtacactaaaatttctttgtagctcaattttatataatcaagatcacataaataaggcttccatgttagaatcgttgcagtttttagtgtattcctttttggaggctaaagttgtac

SEQ ID NO: 302591 - DNA, 3740 bp, Homo sapiens
  misc_feature (1560)..(1560): n is a, c, g, or t
  misc_feature (1562)..(1562): n is a, c, g, or t
  misc_feature (1640)..(1640): n is a, c, g, or t
ttttataagatgtactgtatctatgagcctgcctaagcagctcaaattaacttgcaatgaacatttgcaatctgggagaaacctgggagtttctgcccctcaaatgcaaaaggaatctgttataaaagaggaaaattctctacgaattgtccccaaaaaacctcaaagacatagcttgcctgctacaggagtgcttaaaaaggctgcctccgaggagcttttggaaaaaagttcttatccttcaagtgaagaaaaaagttcagagaagagtctagaaagaaatcaccttcagcatttgtgtgcccaaaaccgtggtgtgtcatcctcctttgatatgcctaaacgggcttcagaaaagccagtgtggaagttacctcatcctattttacccttttcagggaacccagaattcttaaagtctgtcaccgtatcgtcaaacagtgagccttcaacagccctaaccaagcccagagcaaaatcgttatctgctatggatgtggaaaagtgcactaagccttgcaaagactctacaaagaaaaactcttttaaaaagttgctcagcatgaaactgtccatctgtttcatgaagagtgactttcaaaaattttggtccaagagtagccaactcggagacaccaccacaggccacctctccagtggggagcagaaggggattgaaagtgattggcaaggcttgttggtaggagaggagaagagaagtaaacccatcaaggcatattccacagaaaactatagcctggaatctcaaaagaagaggaagaagtctcggggccagaccagtgcagctaatggtctgagagctgagtctttggatgaccaaatgctctcccgggagtcatcatctcaggcaccttacaagtctgttacaagcctctgtgcaccggagtatgaaaatatacgccattatgaggaaataccagagtacgagaacttgccatttattatggctatacggaaaactcaagagttggaatggcagaattccagcagcatggaggacgctgatgcaaatgtgtatgaggtagaagagccgtatgaagctccagatggccagctgcagcttggacccagacatcagcattccagttcaggagcatcccaggaggaacagaatgatcttggtcttggtgaccttccctctgatgaggaggaaatcatcaacagttctgatgaagatgatgtcagctctgagtcaagtaaaggagagcctgacccactggaagataaacaggatgaagataatggaatgaaaagtaaagttcatcatattgccaaggagatcatgagctcagagaaagtgtttgtggatgtgttaaaacttttgcatattgatttccgggatgcagtagctcatgcttccaggcaacttgggaaaccagtgattgaggaccggattctaaatcagatcctatactacttgcctcagctgtatgagctcaaccgggatctcttgaaggaactggaggaaagaatgttgcactggactgaacaacaaagaattgctgatatctttgtaaagaagggaccatatctaaaaangnattccacatacatcaaagaatttgataagaatatagccttgctggatgaacagtgcaagaaaaatccaggttttgctnctgttgttagagaatttgagatgagccctcgctgtgctaatctggccctcaagcactacctgctcaagccggttcagaggatcccccagtacaggctgttgctgacagattatttgaagaatctcatagaagatgctggagattacagagacactcaagatgcccttgctgttgttatagaggtagccaaccacgccaatgacaccatgaagcaaggagacaactttcagaaacttatgcaaattcagtacagcttaaatggacaccatgaaattgtgcagcctggtcgggtttttctcaaagaaggaattctgatgaagctgtctcggaaagtgatgcaacctcgaatgtttttcctgtttaatgatgccctgctgtatacaacaccagtgcagtctgggatgtataaactgaacaacatgctctcactggctggaatgaaggtcagaaaacctacccaagaagcctatcagaatgaattaaagattgaaagtgtagaacgttccttcattctctcagccagttctgccacagaaagggatgaatggctagaagcgatttccagggcaatagaagagtatgccaagaaaagaatcaccttctgtcctagtaggagtcttgatgaggcagactcagaaaataaagaagaagttagtcctcttggatcgaaggctcccatctggattcctgataccagagccacaatgtgtatgatctgcacaagcgaattcactctcacctggagacgacaccactgccgggcctgtggaaagattgtatgccaagcttgttcgtctaataagtatggcttagattacctgaaaaatcaaccagcaagagtatgtgaacattgtttccaagaactgcagaaattagatcaccagcactcccctaggattggatctcctggaaatcacaaatctccttcaagtgccttatcatcagtcttacatagcattccatcagggaggaaacagaaaaaaatcccagctgctctcaaagaagtatcagcaaacacagaggattcttctatgagtggctacttgtacagatcaaagggcaataaaaaaccctggaaacacttttggtttgtcataaaaaataaagtactatatacatatgctgcaagtgaggtaagatctgaaatctaaagatgagtaatttggggttttgtaatgccaactgcaagtaattacaatattttaaaaatccatttattttacataagattttttgctttgcttttggatgggggaggtgttgttgctgttatttttaatgtgaacagtgttcttgctttgtacctggagagctctttctcaaatgtgttaggaattttccatattattaaaatgcaatttttgtgtgtgtcgtgtgactactaattactttactaaaggcagagctgcccccaggtgcactggctcacacctgtaatcccagcactttgggaggctgagtgggggtggatcacctgaggtcaggagttcgagactagcctggccaacatggcgaaaccccgtctctactaagaatacaaatattagtggagtgcctgtaatcccagacacttgggagggtgaagcaggagaattgcttgaacccgggaggcagaggttgcagtgagccgagatggtgccactgcactccagcctgggatgacagagcgagactccatctcaaaaaaaaaaaaaaaaaaaaattgaacagcaaggttatccatataatatttctttaaagggtacaagaattttcctttctgcctctaaataaaggatttcctaattcagtgtgatccttaacagcaaccatgaggattactgagtgcctttctggggccttttgaatgctgtttggtacagcaccagagtccctactagatctagagttggctgctatagttttttgtggcgattttttgccatggagtcatttgaacctcatacacaatcctaacatgccatcccctttctgtcatagcaggtacactaaaatttctttgtagctcaattttatataatcaagatcacataaataaggcttccatgttagaatcgttgcagtttttagtgtattcctttttggaggctaaagttgtac

SEQ ID NO: 302592 - DNA, 446 bp, Homo sapiens
tcggtaaccccggagatttcgtagatccccaaaaaaaaaaaaaaaaaattgaacagcaaggttatccatataatatttctttaaagggtacaagaattttcctttctgcctctaaataaaggatttcctaattcagtgtgatccttaacagcaaccatgaggattactgagtgcctttctggggccttttgaatgctgtttggtacagcaccagagtccctactagatctagagttggctgctatagttttttgtggcgattttttgccatggagtcatttgaacctcatacacaatcctaacatgccatcccctttctgtcatagcaggtacactaaaatttctttgtagctcaattttatataatcaagatcacataaataaggcttccatgttagaatcgttgcagtttttagtgtattcctttttggaggctaaagttgtac

SEQ ID NO: 302593 - DNA, 1470 bp, Homo sapiens
ttttataagatgtactgtatctatgagcctgcctaagcagctcaaattaacttgcaatgaacatttgcaatctgggagaaacctgggagtttctgcccctcaaatgcaaaaggaatctgttataaaagaggaaaattctctacgaattgtccccaaaaaacctcaaagacatagcttgcctgctacaggagtgcttaaaaaggctgcctccgaggagcttttggaaaaaagttcttatccttcaagtgaagaaaaaagttcagagaagagtctagaaagaaatcaccttcagcatttgtgtgcccaaaaccgtggtgtgtcatcctcctttgatatgcctaaacgggcttcagaaaagccagtgtggaagttacctcatcctattttacccttttcagggaacccagaattcttaaagtctgtcaccgtatcgtcaaacagtgagccttcaacagccctaaccaagcccagagcaaaatcgttatctgctatggatgtggaaaagtgcactaagccttgcaaagactctacaaagaaaaactcttttaaaaagttgctcagcatgaaactgtccatctgtttcatgaagagtgactttcaaaaattttggtccaagagtagccaactcggagacaccaccacaggccacctctccagtggggagcagaaggggattgaaagtgattggcaaggcttgttggtaggagaggagaagagaagtaaacccatcaaggcatattccacagaaaactatagcctggaatctcaaaagaagaggaagaagtctcggggccagaccagtgcagctaatggtctgagagctgagtctttggatgaccaaatgctctcccgggagtcatcatctcaggcaccttacaagtctgttacaagcctctgtgcaccggagtatgaaaatatacgccattatgaggaaataccagagtacgagaacttgccatttattatggctatacggaaaactcaagagttggaatggcagaattccagcagcatggaggacgctgatgcaaatgtgtatgaggtagaagagccgtatgaagctccagatggccagctgcagcttggacccagacatcagcattccaggtctcgctctgtcaacccaggttggagtgcagtggcaagatcacagctcactgcagcctcaacctcccagacttagagatggggcttcaccatgttgccaaggctggtctcgaactctgggctgaagcgatcctccctcatcggcttcccaaagtgctgggattacagacgtgagccactgcacccagctagattgactcttgatagcagtgattctaagcagctttaattcttattgagccctcacagtgttaagaagcaaaaacattttttgtgtgctcttttgtactctacaaattaatgtcttctctgcctggtctttgaaatcttggccccagtaaatatctgtgctgctatgcagct

SEQ ID NO: 302594 - DNA, 3012 bp, Homo sapiens
  misc_feature (1560)..(1560): n is a, c, g, or t
  misc_feature (1562)..(1562): n is a, c, g, or t
  misc_feature (1640)..(1640): n is a, c, g, or t
ttttataagatgtactgtatctatgagcctgcctaagcagctcaaattaacttgcaatgaacatttgcaatctgggagaaacctgggagtttctgcccctcaaatgcaaaaggaatctgttataaaagaggaaaattctctacgaattgtccccaaaaaacctcaaagacatagcttgcctgctacaggagtgcttaaaaaggctgcctccgaggagcttttggaaaaaagttcttatccttcaagtgaagaaaaaagttcagagaagagtctagaaagaaatcaccttcagcatttgtgtgcccaaaaccgtggtgtgtcatcctcctttgatatgcctaaacgggcttcagaaaagccagtgtggaagttacctcatcctattttacccttttcagggaacccagaattcttaaagtctgtcaccgtatcgtcaaacagtgagccttcaacagccctaaccaagcccagagcaaaatcgttatctgctatggatgtggaaaagtgcactaagccttgcaaagactctacaaagaaaaactcttttaaaaagttgctcagcatgaaactgtccatctgtttcatgaagagtgactttcaaaaattttggtccaagagtagccaactcggagacaccaccacaggccacctctccagtggggagcagaaggggattgaaagtgattggcaaggcttgttggtaggagaggagaagagaagtaaacccatcaaggcatattccacagaaaactatagcctggaatctcaaaagaagaggaagaagtctcggggccagaccagtgcagctaatggtctgagagctgagtctttggatgaccaaatgctctcccgggagtcatcatctcaggcaccttacaagtctgttacaagcctctgtgcaccggagtatgaaaatatacgccattatgaggaaataccagagtacgagaacttgccatttattatggctatacggaaaactcaagagttggaatggcagaattccagcagcatggaggacgctgatgcaaatgtgtatgaggtagaagagccgtatgaagctccagatggccagctgcagcttggacccagacatcagcattccagttcaggagcatcccaggaggaacagaatgatcttggtcttggtgaccttccctctgatgaggaggaaatcatcaacagttctgatgaagatgatgtcagctctgagtcaagtaaaggagagcctgacccactggaagataaacaggatgaagataatggaatgaaaagtaaagttcatcatattgccaaggagatcatgagctcagagaaagtgtttgtggatgtgttaaaacttttgcatattgatttccgggatgcagtagctcatgcttccaggcaacttgggaaaccagtgattgaggaccggattctaaatcagatcctatactacttgcctcagctgtatgagctcaaccgggatctcttgaaggaactggaggaaagaatgttgcactggactgaacaacaaagaattgctgatatctttgtaaagaagggaccatatctaaaaangnattccacatacatcaaagaatttgataagaatatagccttgctggatgaacagtgcaagaaaaatccaggttttgctnctgttgttagagaatttgagatgagccctcgctgtgctaatctggccctcaagcactacctgctcaagccggttcagaggatcccccagtacaggctgttgctgacagattatttgaagaatctcatagaagatgctggagattacagagacactcaagatgcccttgctgttgttatagaggtagccaaccacgccaatgacaccatgaagcaaggagacaactttcagaaacttatgcaaattcagtacagcttaaatggacaccatgaaattgtgcagcctggtcgggtttttctcaaagaaggaattctgatgaagctgtctcggaaagtgatgcaacctcgaatgtttttcctgtttaatgatgccctgctgtatacaacaccagtgcagtctgggatgtataaactgaacaacatgctctcactggctggaatgaaggtcagaaaacctacccaagaagcctatcagaatgaattaaagattgaaagtgtagaacgttccttcattctctcagccagttctgccacagaaagggatgaatggctagaagcgatttccagggcaatagaagagtatgccaagaaaagaatcaccttctgtcctagtaggagtcttgatgaggcagactcagaaaataaagaagaagttagtcctcttggatcgaaggctcccatctggattcctgataccagagccacaatgtgtatgatctgcacaagcgaattcactctcacctggagacgacaccactgccgggcctgtggaaagattgtatgccaagcttgttcgtctaataagtatggcttagattacctgaaaaatcaaccagcaagagtatgtgaacattgtttccaagaactgcagaaattagatcaccagcactcccctaggattggatctcctggaaatcacaaatctccttcaagtgccttatcatcagtcttacatagcattccatcagggaggaaacagaaaaaaatcccagctgctctcaaagaagtatcagcaaacacagaggattcttctatgagtggctacttgtacagatcaaagggcaataaaaaaccctggaaacacttttggtttgtcataaaaaataaagtactatatacatatgctgcaagtgaggtaagatctgaaatctaaagatgagtaatttggggttttgtaatgccaactgcaagtaattacaatattttaaaaatccatttattttacataagattttttgctttgcttttggatgggggaggtgttgttgctgttatttttaatgtgaacagtgttcttgctttgtacctggagagctctttctcaaatgtgttaggaattttccatattattaaaatgcaatttttgtgtgtgtc

SEQ ID NO: 302595 - DNA, 1236 bp, Homo sapiens
tgctgggattacaagcttaagccaccgcgcctggcctagatggatttcttgtaccagactataccctagacatgaaaacaagactgttaaacaaaatcctgtgctacctaaagtttgagccttctgtgtgtcagtttctgccataataaataactcttaactatgattattaagtatattaagaactttgagtaggggaggcacgtttaatcattcgtttttacggcatatgtactataatacctgtgtgttgcaaatcctggtatttaaaagtctttttgtgtatttgagcatgtaagtttatttggtccaaactgctggtactagtaaagacaagtccagggcataagtaggacttacagcaccaagttcgtcttttttttttgagacagagtctcagtcggtcacccaggctggagtgcattggtacagtctgggctcactgcaccctccacctcccgagttcaagcgattctcctgcctcagcctcccaagtagctgggattacaagtgtgtgccgccacgcccggttaatttttgtattttttagtagagatggagttttcactatgttgggccaggctgatcccgacctcaggtgatgtgcccaccttggtctccgaaagtgctgggattataggcgtgagccactgcgcctgacctccaagtccatctttcaaaggctctgttgataattgactcttgagagtcattacagtccatcaacagcctgtattctgaatatttgtttttaattctaagacaatgctaaatagccattccaaataaggtgagaactgagactttagggcctgtattatcagctgtacactgacaagctctgaactctattgctttttcaaatcagagaagaaaaatgagtaagaaaagaaaaatatggatcacttaggctttgatgcctcctctgagtttatagtgtttaccttctgtattacttaggtgatcctctctaatggcattttaaatctctgttgatacttgtcttacttatgtatctgtttttttttcctctatagtagatagaatttatagatatatatgtattttaaagtaagatacaatttacgtaccttacaatttacccatttaatctaattcagggttatgcaaccctatgaatttagtagtttattcatagagttatgcaaccatcactgtaatcaattttcaacaccctcaaaagaaaccccatatccattagcagtcacttcccat

SEQ ID NO: 302596 - DNA, 823 bp, Homo sapiens
gttcatattctaaagagagcaggcactgagcaaatgtttgttgaactgaaccaatctgctagttatggggacatgacctccacttcatggtgttgaactaaacaaacacatacttctccagacaaatattaaaactggtgaacttcaaaataacgtgaaaagctcctatgtttccatgcctcattatatgccacaaaaaatcaaatgataacgagaacaaattccctaggtccagcacaaatagaggagggttcactcgtaggcagcatctgagcaacaggctcaccagacttcagcctcttcactccgactcttccacgctccagctctcttcattaagatattctagaagcaactgaggagtttctacaaacattttggaaattacagcaggtcaagtggaagtttgttttcatttcagttaaggtacgagttgttctgactgctgtgcagacattcacacgcccgctgctagaaagctggagctggaaggagcatcggggcccgctgagtcctcctttctcatgtatggatgtggatgtggaggcaggccctaagtcttagtgtaggtgccgatggtgcaggttgactcacttaaagaagaatttgaatcattatctaacagaaaaagatcaataacaagcattattgctggaacattctatggatagactgctttctatacatgattggtgaatattgtatttcaattaattatatatcctgataatatatgaattaatactgtgatatcctgcatataataacaataatcaatggaaatatagtaaaacagaaatgaaaataaaactggatgcgtccg

SEQ ID NO: 302597 - DNA, 356 bp, Homo sapiens
gaagcttcagggcatcatggcaggagcttgggctgtggaggctggggtgggtctgcgtttgaacccagctcctcctgggggagtgactgcagccaagtgcctcggaattcctcttgatgtgagggttgggacctccatcccccaggagttttggggatggggaagttgggtgagatattctaagtgaacgcactctgaatgtcagctatcacttttttctcagcaggtcaagtggaagtttgttttcatttcagttaaggtacgagttgttctgactgctgtgcagacattcacacgcccgctgctagaaagctggagctggaaggagcatcggggcccgctgagtcctcctttct

SEQ ID NO: 302598 - DNA, 335 bp, Homo sapiens
aaaaaaaaaagattaggactgaaaaatggttaggcagtgtcagaactcagagactgacagcttgagaatgagaaacactgtcctgcctggtggttaagagcatgagcccccaccggggacccagctctgccaggtgtgcttgtgggagcgtgagccaccactggaatctctgaatgtctgtgtcctcatctctaatgccagagctcacaatacctcccttgcagggctattgtgagaataaaataagatgcaggtaaatcttagctcagtgcctgccatgaaggaggtgggtgttgaaatcatgaataaaagaataaagattaaggatgtgaata

SEQ ID NO: 302599 - DNA, 552 bp, Homo sapiens
aaaaaaaaaagattaggactgaaaaatggttaggcagtgtcagaactcagagactgacagcttgagaatgagaaacactgtcctgcctggtggttaagagcatgagcccccaccggggacccagctctgccaggtgtgcttgtgggagcgtgagccaccactggaatctctgaatgtctgtgtcctcatctctaatgccagagctcacaatacctcccttgcagggctattgtgagaataaaataagatgcaggtaaatcttagctcagtgcctgccatgaaggaggtgggtgttgaaatcatgaataaaagaataaagattaaggatgtgaataatataattgtctttaagtgggttctggatagttttttcccccatgggtgctgaagaagtcctgaataaaagaaagatcaaggctgggcgtggtggctcatgcctgtaatcccagcattctgggaggccgaggcgggtggattacttgaggtcaggagttcgagaccagcctggccaacatagtaaaaccctgtctctactaaaaattcaaaaattag

SEQ ID NO: 302600 - DNA, 342 bp, Homo sapiens
gggatgccccagcagcgtgctgcttacagagccccagggtccaaggctcagctctcccccttagaagggtagggcaggagcactagccccggttagatgacagctgggaccaggagctgctggtggagacacgagatggtctcctgctgtgaggggcttccccggactccaccaggcccttcctttcccagagcctccacgtgggtcagggagtcaaggacggcagccacctcctcagtgtggacacaggccccgcccccacgccctgcagccaggtgaactgacagacaccaggggtagatctggggctgctgataaaaaggaatgagcccccacggcctg

SEQ ID NO: 302601 - DNA, 1557 bp, Homo sapiens
gggaatttccccagcatcccaaagcttgagtttcctgccagtcgggagggatgaatgcagataaagggagtgcagaaggcacgaggaaaccaaagtgctctgtatcctccagtctccgcgcctccacccagctcaggaacccgcgaaccctctcttgaccactatgagcctcccgtccagccgcgcggcccgtgtcccgggtccttcgggctccttgtgcgcgctgctcgcgctgctgctcctgctgacgccgccggggcccctcgccagcgctggtcctgtctctgctgtgctgacagagctgcgttgcacttgtttacgcgttacgctgagagtaaaccccaaaacgattggtaaactgcaggtgttccccgcaggcccgcagtgctccaaggtggaagtggtagcctccctgaagaacgggaagcaagtttgtctggacccggaagccccttttctaaagaaagtcatccagaaaattttggacagtggaaacaagaaaaactgagtaacaaaaaagaccatgcatcataaaattgcccagtcttcagcggagcagttttctggagatccctggacccagtaagaataagaaggaagggttggtttttttccattttctacatggattccctactttgaagagtgtgggggaaagcctacgcttctccctgaagtttacagctcagctaatgaagtactaatatagtatttccactatttactgttattttacctgataagttattgaaccctttggcaattgaccatattgtgagcaaagaatcactggttattagtctttcaatgaatattgaattgaagataactattgtatttctatcatacattccttaaagtcttaccgaaaaggctgtggatttcgtatggaaataatgttttattagtgtgctgttgagggaggtatcctgttgttcttactcactcttctcataaaataggaaatattttagttctgtttcttggggaatatgttactctttaccctaggatgctatttaagttgtactgtattagaacactgggtgtgtcataccgttatctgtgcagaatatatttccttattcagaatttctaaaaatttaagttctgtaagggctaatatattctcttcctatggttttagatgtttgatgtcttcttagtatggcataatgtcatgatttactcattaaactttgattttgtatgctattttttcactataggatgactataattctggtcactaaatatacactttagatagatgaagaagcccaaaaacagataaattcctgattgctaatttacatagaaatgtattctcttggttttttaaataaaagcaaaattaacaatgatctgtgctctgaaagttttgaaaatatatttgaacaatttgaatataaattcatcatttagtcctcaaaatatatacagcattgctaagattttcagatatctattgtggatcttttaaaggttttgaccattttgttatgaggaattatacatgtatcacattcactatattaaaattgcacttttattttt

SEQ ID NO: 302602 - DNA, 1631 bp, Homo sapiens
gggaatttccccagcatcccaaagcttgagtttcctgccagtcgggagggatgaatgcagataaagggagtgcagaaggcacgaggaaaccaaagtgctctgtatcctccagtctccgcgcctccacccagctcaggaacccgcgaaccctctcttgaccactatgagcctcccgtccagccgcgcggcccgtgtcccgggtccttcgggctccttgtgcgcgctgctcgcgctgctgctcctgctgacgccgccggggcccctcgccagcgctggtcctgtctctgctgtgctgacagagctgcgttgcacttgtttacgcgttacgctgagagtaaaccccaaaacgattggtaaactgcaggtgttccccgcaggcccgcagtgctccaaggtggaagtggtagcctccctgaagaacgggaagcaagtttgtctggacccggaagccccttttctaaagaaagtcatccagaaaattttggacagtggaaacaagaaaaactgagtaacaaaaaagaccatgcatcataaaattgcccagtcttcagcggagcagttttctggagatccctggacccagtaagaataagaaggaagggttggtttttttccattttctacatggattccctactttgaagagtgtgggggaaagcctacgcttctccctgaagtttacagctcagctaatgaagtactaatatagtatttccactatttactgttattttacctgataagttattgaaccctttggcaattgaccatattgtgagcaaagaatcactggttattagtctttcaatgaatattgaattgaagataactattgtatttctatcatacattccttaaagtcttaccgaaaaggctgtggatttcgtatggaaataatgttttattagtgtgctgttgagggaggtatcctgttgttcttactcactcttctcataaaataggaaatattttagttctgtttcttggggaatatgttactctttaccctaggatgctatttaagttgtactgtattagaacactgggtgtgtcataccgttatctgtgcagaatatatttccttattcagaatttctaaaaatttaagttctgtaagggctaatatattctcttcctatggttttagatgtttgatgtcttcttagtatggcataatgtcatgatttactcattaaactttgattttgtatgctattttttcactataggatgactataattctggtcactaaatatacactttagatagatgaagaagcccaaaaacagataaattcctgattgctaatttacatagaaatgtattctcttggttttttaaataaaagcaaaattaacaatgatctgtgctctgaaagttttgaaaatatatttgaacaatttgaatataaattcatcatttagtcctcaaaatatatacagcattgctaagattttcagatatctattgtggatcttttaaaggttttgaccattttgttatgaggaattatacatgtatcacattcactatattaaaattgcacttttattttttcctgtgtgtcatgttggtttttggtacttgtattgtcatttggagaaacaataaaagatttctaaaccactga

SEQ ID NO: 302603 - DNA, 1926 bp, Homo sapiens
gggaatttccccagcatcccaaagcttgagtttcctgccagtcgggagggatgaatgcagataaagggagtgcagaaggcacgaggaaaccaaagtgctctgtatcctccagtctccgcgcctccacccagctcaggaacccgcgaaccctctcttgaccactatgagcctcccgtccagccgcgcggcccgtgtcccgggtccttcgggctccttgtgcgcgctgctcgcgctgctgctcctgctgacgccgccggggcccctcgccagcgctggtcctgtctctgctgtgctgacagagctgcgttgcacttgtttacgcgttacgctgagagtaaaccccaaaacgattggtaaactgcaggtgttccccgcaggcccgcagtgctccaaggtggaagtggtagcctccctgaagaacgggaagcaagtttgtctggacccggaagccccttttctaaagaaagtcatccagaaaattttggacagtggaaacaagaaaaactgagtaacaaaaaagaccatgcatcataaaattgcccagtcttcagcggagcagttttctggagatccctggacccagtaagaataagaaggaagggttggtttttttccattttctacatggattccctactttgaagagtgtgggggaaagcctacgcttctccctgaagtttacagctcagctaatgaagtactaatatagtatttccactatttactgttattttacctgataagttattgaaccctttggcaattgaccatattgtgagcaaagaatcactggttattagtctttcaatgaatattgaattgaagataactattgtatttctatcatacattccttaaagtcttaccgaaaaggctgtggatttcgtatggaaataatgttttattagtgtgctgttgagggaggtatcctgttgttcttactcactcttctcataaaataggaaatattttagttctgtttcttggggaatatgttactctttaccctaggatgctatttaagttgtactgtattagaacactgggtgtgtcataccgttatctgtgcagaatatatttccttattcagaatttctaaaaatttaagttctgtaagggctaatatattctcttcctatggttttagatgtttgatgtcttcttagtatggcataatgtcatgatttactcattaaactttgattttgtatgctattttttcactataggatgactataattctggtcactaaatatacactttagatagatgaagaagcccaaaaacagataaattcctgattgctaatttacatagaaatgtattctcttggttttttaaataaaagcaaaattaacaatgatctgtgctctgaaagttttgaaaatatatttgaacaatttgaatataaattcatcatttagtcctcaaaatatatacagcattgctaagattttcagatatctattgtggatcttttaaaggttttgaccattttgttatgaggaattatacatgtatcacattcactatattaaaattgcacttttattttttcctgtgtgtcatgttggtttttggtacttgtattgtcatttggagaaacaataaaagatttctaaaccactgaaaaaaaacaaacacccccccccaaccccacacccccaactcacacccgcacactaccccccaccccaccacagacacgcacgcacacgaaaccagccacgcacagccgcccctagccaatacccctctccagacacaccccgccccaccacacgcacacatacccgccccgaccccactagtacctcaccaccacccaccccccccacgaacacccaccacgcaacccctaccgcccccctcacgaacccgaccgcacccgacacacacccaccccacactcgccactacccccg

SEQ ID NO: 302604 - DNA, 327 bp, Homo sapiens
ctgaaggcctgaatagaacaaaaaggctcaccgtcccatgaatagagagaactcctcctgcctgactggtgtgagctgggacatccattgttttctgttttttggatttgaactgaaacatcagctcttccttgatcctgaacctgctggctttctgaccggaacttgcaccaacagctctcctagttctcaggcctttggacttggactggaattacaccatcaaatctcctgggtctccagcttgccatctgcagatcttggaacttcttaacctccacatcctgtgagccaattccttataataaatctctttataaatatata

SEQ ID NO: 302605 - DNA, 4969 bp, Homo sapiens
  misc_feature (727)..(727): n is a, c, g, or t
ggaaggtcctagtagaaggcattcccaagtgaggggagccctggacctggctcccctcacttgggaaggtcctagtagaaggcattccttctgagtctcctggccctacagcttctcacccctgctgctccccaagacctgacccggaccaatcagctgcatctctgcaccaagtgccacccccaccgtgcactgctcgcacctcacgctccccatgggctggcccggaccccagtgaggtctgcacctctcggaccagccaggacctcggaagccatgacctgggtgttcagggcttggcggaggagacgctgctccgcgggggatggagaagccccgcccctccacaactcccttaatctggatgcaattagaggaaaccagccaaaaaccccgcggcagctgttgccccgggattattcccagccagcgagaggcattagggcgataattcagtcattagacttctagccttcccaccgccagaacgtgcaaataggggataatcagccctgcacggccatcctcagcaatgctgcttatttaacccattttttaaaatgacacttaatgttattggctggcgtacgtgtgtgcgcatacttaaaagttgatgcgtggtgcagctctgctgctaatgtctgctgacagcgtcgcccgatgttgctcagggcctctgggaagaggggacacctttgatgtgggcgtgctggcacccaagaggcancgtggtcaggctcgatgcttgccagccctggaaggtcccgccagggttggggggtcgggtgagcactcagagatctggggaggaagcgaggagcctggtgtcctcaccaggtgcagaggggaaatgcgtactgctccagaaggttctgactcaagtctcggccctgaggactcagaactcacaagtcatggatcaagtacagagggagggagggccccagcccacccctgcgggggaggaggagggtctgaaggtgggagggcagctccatgagcagccactgttcctgaccagccgaagtgccaggcagggggaggtttccatgtccaggagggagaggacctccaccctctgacctttcagttttccatagcagcccagtgtgaagctcggcgggggtgggcagggcatcaggacaagatgaagatgctggctctggaatgaggactccccttgggctaaggggtagtggctggcagaggttgcccagctcttttggaggccacagggaatagaggtggggtggtgcttccgttcctgtgaggcccgcccccctgagccccctcgtctgcttcttgtttggcagaaatagatgtggggcacagcccctagatgatgggaatctgcccaagctgtgccctctggggaatgaaatcttgctcctcgtgcagcttcccctttcccttgcggggtgggggctgggggtgccaaggctccacccttggagggggttgctgggggtgccaaggctccaccctttgctcgctgggcagagggaaggaagcacctccctgtatgctctgcaggggcccctgcaggccactttgcctcagaggaaggaggagaggtcccctgggaaaatgcgcacacacacacacacacacacacacacacacacacgcacatgcacacacgcacgcatgcacacacacacacacatatgtgcaggggtgcagcctaagtcagtggagccaggactggctgcgcagctgggcctgccccattcttggagtccccagggaatgagcctcaggatccacttcgtcccttgtttctaagccaggctgcacggccgttcctgggtgtgaaagcattctgtcctgtctccagtcagagggaaccgcccccaaactagaaagctaatttcccccgaaggttcatgaagccagaggcatgcccttgggggttggtcgggagaagggtgagaggcagtgctgtggaaggggcctggcccctgctgcctgcgattctccccgggtatgtggccttctgcctccttcagcctcagtttcctcacctgtaacatgagaataatgatgcctgcctgcccaggccacctcctgggactgcagtggggactctaagtgtaaaactgtcatgaggatggtttatgaagtcccagggaccacacctgccactcagggaagagaccgctgacctcagccatcagccgtgtgcatcgtgaggggcagcgagctcaggacggagagctctcccttggttcggagtcagcacacctgcactcccacacgcccacccagctgtgtgtcctccgccgagggcgagcctctctgtgactcttctgtaaaatgcaccccattctgcccactcctgccacgagacccatcctctgcgatcccgccaggcatgtgtgtgtgaatgcatgtgcaaagctctccatcagaagggtggtgtgggccctgcaggtcctacccctcggccttgaagctccctcgggctgcggactctgcctcctgggtctgagcattagaaccaggagaggggtgtccctgggcagagccaggggtgcaaacagcctgcagccatctggccttttaagtatagtgtgtcgcatttccgggtaggaaggtagcatttcaagttcaaagagaggtcaagtcatgcaaccatctttcctccagcacttttggggtaaggaggacagtttttgttatggtttaggggaaattttcatgaaatttccaccattaccaatagattactgatgtccatggcaagtgatctgttcttggtattttgttttgttttgttttggtttttaaatgtaatcacccattggtcaggcccaggactggtcaccatgagctctgctagccacggccccaacgatgcttccggctctcatggattccacagcaaataaaactgtactgacaacagatgcacgctgtacagtgcctctggaaggtgcggtgggacttgctgggtcaaagcacggcaggctctgtgctgggcaaacagggccccgcggcagcccaagggcagcctgcagacgccagtgtgcccggcttctcccatgttctgagatgggggaggggaaggtgtaaaagagagctggatgggggctgtggggactgagggtcctgggaggctggccaggggctcagcaagcgcccactttgggaggccttgccctctgggctgtggttggacagcactaggcctgcaggctgggctgccaggaggaagagcagctccggacctcaggcccccccagcaggcggcgatggagggtgatgggagaattgacgagtgctcgcggggtctcactcgggaaagggccggttaactctgagcaactgggagcctcgctcccaccccagtgcctggaaacacaaacagtattttattgagccttggctgccggggctctggtttcaggaaaagcctcagtcctgcatttgtgaatttttaaggaggcaaacaaggtgaatttgaccttcctaggagtgggagttagggaaaattcaggctgccctaccaagcccttggaaccgtgcagcaggggtcaggggagggatgggcaaaggcggtttggcccatggagcaggtctcctggtcctcccggagcacggggggcggggagctccagctcttcatcaagcgccctttggggtttccaactgttttctgttgttctctgtgtgtcttttccccttttgcctgggggcgggggctggaggggaacatacctcttatctacatcactcgggtctcatgtctgaagggcctgtctcacctgccacctacctggccttggcctcgacatctgagcgcctcatcacctcctctccacatgcccaggggtgcccctcccaaggctggctgggcaggtcccacggactaggccccaggaggagcagtgggcttcccccaggaaagagcagagccagcactgcctgcctggggagggcacccactaccaggcatggctggtggctccgtttaaagaaatctttgtccatgtgggagtgggaggtgcttccccatcctgcctggaagccacgtcctggctcttaccgtggactctgcaacagccgtggtggccacatgaagatggagaaacctggtggctcaggggcccctgatgtcaccgcctccaaggcaacgggactgggcagggcagctcctcaggaaggatgatcccacctgcacgggtcagccctgcagggggacaaggcccaccacaaccccacctcaggccaccaactggacctgtcctgccaagaaggtcccttccaatttgtccggcagctggttccctggatacagcccagacgcagcatcatcctcatgttcacctctgctgtgccctacttcccccgtaaatgacaactgtgtagtcacccacgccgggcaagagaacataggtgccacctggcgggccacacttttcaggggccgtgcctcgggcaggcccggctctctgttgtcccgcagccctcagggctggcggtggctgctcagtgcctagggagtgcccttgccacacagctgggcagcgagcatgactcagcgtttacactcaaccagccgcacaggctccagaggggaagttctctggggtccttctatgagagagcatcctgtctgcagccctgttctggctccttccacatcattcatgcattcatcccacgaggactatggtaccgtgggctcgctctagggaagcaaggcaggagcgcactggggctacttggattcccggggcagacacatatgtaccctgcacaccctcaaatgagcaaagccaccccactggcccctgggtgaggccatgtggacccccacacctttggggccggctgggcaaaccttgaacccccaatttctgcgtggcctttggctgccctccttctccaaggcgtgactcttactccagagactcaggcgagcacgtgtcccttaccttattttctctcaatcaaactgaaaccc

SEQ ID NO: 302606 - DNA, 2007 bp, Homo sapiens
ccagagcctgtgtcgcgcccgtgccggtagcgcccgtgccggtagcgccgctgccaccgctcaccatgggcccgggtcctcggctgctgctacctctcgtgctttgcgtggggctcggcgcacttgtgttttcttcgggggccgagggcttccgcaagcgaggcccctcggtgacggccaaggtcttctttgatgtgaggattggagacaaagatgttggcagaattgtgattggcctctttggaaaagttgtgcccaagacagtggaaaattttgttgctctagcaacaggagagaaaggatatggatataaaggaagcaagtttcatcgtgtcatcaaggatttcatgattcaaggaggtgacatcaccactggagatggcactgggggtgtgagcatctatggtgagacatttccagatgagaacttcaagctgaagcactatggcattgggtgggtcagcatggccaacgctgggcctgacaccaatggctctcagttctttatcaccttgaccaagcccacctggttggacggcaaacatgtggtgtttggaaaagtcattgatgggatgacagtggtgcactccatagagctccaagcaactgatgggcatgaccgtccactcaccagctgctcgatcattaacagtggcaagatagacgtgaaaacgccttttgtggttgagatcgctgattggtgacacaactggcacacacacacacacgcacatgcacacacgcacgcatgcacacacacacacacatatgtgcaggggtgcagcctaagtcagtggagccaggactggctgcgcagctgggcctgccccattcttggagtccccagggaatgagcctcaggatccacttcgtcccttgtttctaagccaggctgcacggccgttcctgggtgtgaaagcattctgtcctgtctccagtcagagggaaccgcccccaaactagaaagctaatttcccccgaaggttcatgaagccagaggcatgcccttgggggttggtcgggagaagggtgagaggcagtgctgtggaaggggcctggcccctgctgcctgcgattctccccgggtatgtggccttctgcctccttcagcctcagtttcctcacctgtaacatgagaataatgatgcctgcctgcccaggccacctcctgggactgcagtggggactctaagtgtaaaactgtcatgaggatggtttatgaagtcccagggaccacacctgccactcagggaagagaccgctgacctcagccatcagccgtgtgcatcgtgaggggcagcgagctcaggacggagagctctcccttggttcggagtcagcacacctgcactcccacacgcccacccagctgtgtgtcctccgccgagggcgagcctctctgtgactcttctgtaaaatgcaccccattctgcccactcctgccacgagacccatcctctgcgatcccgccaggcatgtgtgtgtgaatgcatgtgcaaagctctccatcagaagggtggtgtgggccctgcaggtcctacccctcggccttgaagctccctcgggctgcggactctgcctcctgggtctgagcattagaaccaggagaggggtgtccctgggcagagccaggggtgcaaacagcctgcagccatctggccttttaagtatagtgtgtcgcatttccgggtaggaaggtagcatttcaagttcaaagagaggtcaagtcatgcaaccatctttcctccagcacttttggggtaaggaggacagtttttgttatggtttaggggaaattttcatgaaatttccaccattaccaatagattactgatgtccatggcaagtgatctgttcttggtattttgttttgttttgttttggtttttaaatgtaatcacccattggtcaggcccaggactggtcaccatgagctctgctagccacggccccaacgatgcttccggctctcatggattccacagcaaataaaactgtactgacaac

SEQ ID NO: 302607 - DNA, 739 bp, Homo sapiens
ggggttggagagagtggggggcggcggcacagtgggccggggaggagagagccgcagagggaaaccgattttaagatgaaggtcgcccccgataagacatgcatgcagttctccatccgccgccccaagctgccgtcctccgagacgcaccccgaggagagcatgtacaagaggctcggcgtctccgcctggctcaaccacctgaatgagctgggccaggtggaggaggagtacaagctgcggaaggccattttctttggcggtattgatgtgtcaatccgcggggaggtctggcccttcctgctgcgctattacagccacgagtccacgtcggaggagcgggaggcgctgcggctgcagaagcgaaaggagtactctgagatccagcagaaaaggctctccatgactcccgaggagcacagagcgttctggcgtaatgtgcagttcactgtggacaaagacgtggtccggacagatcggaacaaccagttcttccggggggaagacaatcccaatgtggagagcatgaggaggatcctgctgaactacgccgtgtacaaccctgccgtcggctattcccaagggatgtcggacctggtggcgcccatcttggccgaggtcctggatgagtcagacaccttctggtgctttgtgggtttgatgcagaacacgatcttcgtcagctcaccccgggacgaggacatggagaaacaactggtgaggctcagggggatgggtg

SEQ ID NO: 302608 - DNA, 6525 bp, Homo sapiens
  misc_feature (4346)..(4346): n is a, c, g, or t
ggggttggagagagtggggggcggcggcacagtgggccggggaggagagagccgcagagggaaaccgattttaagatgaaggtcgcccccgataagacatgcatgcagttctccatccgccgccccaagctgccgtcctccgagacgcaccccgaggagagcatgtacaagaggctcggcgtctccgcctggctcaaccacctgaatgagctgggccaggtggaggaggagtacaagctgcggaaggccattttctttggcggtattgatgtgtcaatccgcggggaggtctggcccttcctgctgcgctattacagccacgagtccacgtcggaggagcgggaggcgctgcggctgcagaagcgaaaggagtactctgagatccagcagaaaaggctctccatgactcccgaggagcacagagcgttctggcgtaatgtgcagttcactgtggacaaagacgtggtccggacagatcggaacaaccagttcttccggggggaagacaatcccaatgtggagagcatgaggaggatcctgctgaactacgccgtgtacaaccctgccgtcggctattcccaagggatgtcggacctggtggcgcccatcttggccgaggtcctggatgagtcagacaccttctggtgctttgtgggtttgatgcagaacacgatcttcgtcagctcaccccgggacgaggacatggagaaacaactgctgtacctgcgcgagctgctgcggctgacgcacgtgcgcttctaccagcacctggtctcgctgggcgaggacggcctgcagatgctcttctgccaccgctggctccttctgtgcttcaagcgggagttccccgaggccgaagcgctgcggatctgggaggcctgctgggcccactaccagacggactacttccaccttttcatctgcgtggccatcgtggccatctacggggatgacgtcatcgagcagcagctggccacggaccagatgctcctgcacttcggaaacctggccatgcacatgaacggggagctcgttctccggaaggcgaggagtttgctgtaccagttccgcctcctgccccggatcccctgcagcctgcacgatctgtgtaagctgtgcgggtcaggcatgtgggacagcggctccatgcccgcggtggagtgcaccggccaccatcccggctcggagagctgtccctacgggggcacggtggagatgccttcccccaagtccctgagggaaggcaagaagggcccaaagacgccgcaggacggcttcggcttccgcagataggtcgggcccccgacaccggacaggggttgaggggacctcctcagaggccctgggcacgggagggggtggggctgggcgtgaaggggacaggggacggtagaaacctaaggaaaatgcttttgggcaacatgagaggaaccttttcatattaatgacaaaattagagtctggaagtgacagaagtcagatctacagccacccagaggaaagtcagctcctgaaacgctgcagtggaacgcgcagccaccgcacctgagacgcaggctggctgggctctcctgctggctgccctggaggatttcaacatgtcccaggatttgctccaccctcgagggcagccagacagcgtcgccaggcaatgaggaaagcagagacaggagaggaaggcctcactcacccactgcgtcgagggctgcagaacacagcggggtcctgtccaggcccagggacatctttgcaagccagacacacttcctcttgagacctcgttctctcggagtgagccaaacacacttcccaaaacgtccccagccacagctgggatgccgatggaaaggcatctgccataaaagaaaagcaaaagataaaaagcccaaccgatgtggggatagagaggcggaagagcagtcaggcttgaggagctggcgcttgtaatgtttatccgtttaaacatttcgtcctcctggtacacgaagggaactgtctgcccaggagcctgagcctcaggctgttggagaagcatctgatgcctttttctttgctgggggtcttctacgtgaggttccttggcgttgtttaaggtcaactccaccaaatacagcaaccagctggggcttgaatgggtcgatgtgtgcgtgtgtccctgcgtgcatgcatgcatgcacacgtgcgtgcgtgtttgtgtttgcaagatcctctgacaatgatctgctttgtcccagggacgtggtagtgtattagctgaccaaccaagacaaggacacctggaaatagttagactcttccacttcccttcaggacctgtgaactcagatatgtaagtcagcttctcaggtggtcggacgtgagagcgaccacagtgaaggagccagcactcagggctctctgccttctatgtgggaatgaggtcttcccaacagactctccctcttccaaaagattgtgtatcagttgctccttctgggatttagagatggacagaaaagggtgtgcgatctatgctgtgagaactcccagccagcttagaagtgtcgagccatttgcacagaaagccactccttgagcgaggagaccaaatccctcctgaaatcctccatcgcgtccttctggggagaaaaacccttgatgtgctgagaaccatcatggggaccaggatagaaggcttcttcccactcaaagcttttctccctggagggtgggcactgctgggccatgccacttcaaagcagtgttcctcagcaggaaagcggaggtcaccacttaccggcctcctccaccttctcggcttctcttttctccatgaacccaggtcgtccagcaggtacttccaagttcccaggtctgtctgcctaagagccttttgaggagaccgtcctggagccccatcagtgcccagatcctggggtaccgaccattgctgtctagcagtgggggatcctgtggtgggaatggggtgggcttctcatccatgttgcttctgggaagagagggttgcctttctgggctagggaggtggctggagcttctgccctgaccctccgctagaaaccagttatatccattgccacagcaatactgtgtaacaaatccgccaacactcggtggcctgcaacagtcagcactgatctagggcaggagtcagcagtctgggcagggtgattcttctggtctaggctgtgcttgtttgtttagggccagtgggttgttaagtcccaggggatgctcatggtgcagaggtcggacctggccctgctctgtggtctcttgcatccctcctgcaggccagccatggcacagccaaaggcacggagggagagacagcaagtgcctttccaagccttggtggacaccacacctgcagctctccccttggccacagcaagtcacgtggctgggctcagcattaaggggtgggggacaggcctgccactttattgtccgctctgcacagtcgggtggcagtaggctgagaatttggagggctaaacaactgggactctggagagtctgtgtcctaataatgcctgctttggagcactccttccccacccgcctgctccaggggaatagcgtccctggtcctagcatttcactagatacctcgtgcctttgaaccgctgtgtttgggagggaggaagaggatagacaggtccagggctcccctcacttgggaaggtcctagtagaaggcattccttctgagtctcctggccctacagcttctcacccctgctgctccccaagacctgacccggaccaatcagctgcatctctgcaccaagtgccacccccaccgtgcactgctcgcacctcacgctccccatgggctggcccggaccccagtgaggtctgcacctctcggaccagccaggacctcggaagccatgacctgggtgttcagggcttggcggaggagacgctgctccgcgggggatggagaagccccgcccctccacaactcccttaatctggatgcaattagaggaaaccagccaaaaaccccgcggcagctgttgccccgggattattcccagccagcgagaggcattagggcgataattcagtcattagacttctagccttcccaccgccagaacgtgcaaataggggataatcagccctgcacggccatcctcagcaatgctgcttatttaacccattttttaaaatgacacttaatgttattggctggcgtacgtgtgtgcgcatacttaaaagttgatgcgtggtgcagctctgctgctaatgtctgctgacagcgtcgcccgatgttgctcagggcctctgggaagaggggacacctttgatgtgggcgtgctggcacccaagaggcancgtggtcaggctcgatgcttgccagccctggaaggtcccgccagggttggggggtcgggtgagcactcagagatctggggaggaagcgaggagcctggtgtcctcaccaggtgcagaggggaaatgcgtactgctccagaaggttctgactcaagtctcggccctgaggactcagaactcacaagtcatggatcaagtacagagggagggagggccccagcccacccctgcgggggaggaggagggtctgaaggtgggagggcagctccatgagcagccactgttcctgaccagccgaagtgccaggcagggggaggtttccatgtccaggagggagaggacctccaccctctgacctttcagttttccatagcagcccagtgtgaagctcggcgggggtgggcagggcatcaggacaagatgaagatgctggctctggaatgaggactccccttgggctaaggggtagtggctggcagaggttgcccagctcttttggaggccacagggaatagaggtggggtggtgcttccgttcctgtgaggcccgcccccctgagccccctcgtctgcttcttgtttggcagaaatagatgtggggcacagcccctagatgatgggaatctgcccaagctgtgccctctggggaatgaaatcttgctcctcgtgcagcttcccctttcccttgcggggtgggggctgggggtgccaaggctccacccttggagggggttgctgggggtgccaaggctccaccctttgctcgctgggcagagggaaggaagcacctccctgtatgctctgcaggggcccctgcaggccactttgcctcagaggaaggaggagaggtcccctgggaaaatgcgcacacacacacacacacacacacacacacacacacgcacatgcacacacgcacgcatgcacacacacacacacatatgtgcaggggtgcagcctaagtcagtggagccaggactggctgcgcagctgggcctgccccattcttggagtccccagggaatgagcctcaggatccacttcgtcccttgtttctaagccaggctgcacggccgttcctgggtgtgaaagcattctgtcctgtctccagtcagagggaaccgcccccaaactagaaagctaatttcccccgaaggttcatgaagccagaggcatgcccttgggggttggtcgggagaagggtgagaggcagtgctgtggaaggggcctggcccctgctgcctgcgattctccccgggtatgtggccttctgcctccttcagcctcagtttcctcacctgtaacatgagaataatgatgcctgcctgcccaggccacctcctgggactgcagtggggactctaagtgtaaaactgtcatgaggatggtttatgaagtcccagggaccacacctgccactcagggaagagaccgctgacctcagccatcagccgtgtgcatcgtgaggggcagcgagctcaggacggagagctctcccttggttcggagtcagcacacctgcactcccacacgcccacccagctgtgtgtcctccgccgagggcgagcctctctgtgactcttctgtaaaatgcaccccattctgcccactcctgccacgagacccatcctctgcgatcccgccaggcatgtgtgtgtgaatgcatgtgcaaagctctccatcagaagggtggtgtgggccctgcaggtcctacccctcggccttgaagctccctcgggctgcggactctgcctcctgggtctgagcattagaaccaggagaggggtgtccctgggcagagccaggggtgcaaacagcctgcagccatctggccttttaagtatagtgtgtcgcatttccgggtaggaaggtagcatttcaagttcaaagagaggtcaagtcatgcaaccatctttcctccagcacttttggggtaaggaggacagtttttgttatggtttaggggaaattttcatgaaatttccaccattaccaatagattactgatgtccatggcaagtgatctgttcttggtattttgttttgttttgttttggtttttaaatgtaatcacccattggtcaggcccaggactggtcaccatgagctctgctagccacggccccaacgatgcttccggctctcatggattccacagcaaataaaactgtactgacaac

SEQ ID NO: 302609 - DNA, 6544 bp, Homo sapiens
  misc_feature (4365)..(4365): n is a, c, g, or t
ggggttggagagagtggggggcggcggcacagtgggccggggaggagagagccgcagagggaaaccgattttaagatgaagttttcctcccgtccagcaggtcgcccccgataagacatgcatgcagttctccatccgccgccccaagctgccgtcctccgagacgcaccccgaggagagcatgtacaagaggctcggcgtctccgcctggctcaaccacctgaatgagctgggccaggtggaggaggagtacaagctgcggaaggccattttctttggcggtattgatgtgtcaatccgcggggaggtctggcccttcctgctgcgctattacagccacgagtccacgtcggaggagcgggaggcgctgcggctgcagaagcgaaaggagtactctgagatccagcagaaaaggctctccatgactcccgaggagcacagagcgttctggcgtaatgtgcagttcactgtggacaaagacgtggtccggacagatcggaacaaccagttcttccggggggaagacaatcccaatgtggagagcatgaggaggatcctgctgaactacgccgtgtacaaccctgccgtcggctattcccaagggatgtcggacctggtggcgcccatcttggccgaggtcctggatgagtcagacaccttctggtgctttgtgggtttgatgcagaacacgatcttcgtcagctcaccccgggacgaggacatggagaaacaactgctgtacctgcgcgagctgctgcggctgacgcacgtgcgcttctaccagcacctggtctcgctgggcgaggacggcctgcagatgctcttctgccaccgctggctccttctgtgcttcaagcgggagttccccgaggccgaagcgctgcggatctgggaggcctgctgggcccactaccagacggactacttccaccttttcatctgcgtggccatcgtggccatctacggggatgacgtcatcgagcagcagctggccacggaccagatgctcctgcacttcggaaacctggccatgcacatgaacggggagctcgttctccggaaggcgaggagtttgctgtaccagttccgcctcctgccccggatcccctgcagcctgcacgatctgtgtaagctgtgcgggtcaggcatgtgggacagcggctccatgcccgcggtggagtgcaccggccaccatcccggctcggagagctgtccctacgggggcacggtggagatgccttcccccaagtccctgagggaaggcaagaagggcccaaagacgccgcaggacggcttcggcttccgcagataggtcgggcccccgacaccggacaggggttgaggggacctcctcagaggccctgggcacgggagggggtggggctgggcgtgaaggggacaggggacggtagaaacctaaggaaaatgcttttgggcaacatgagaggaaccttttcatattaatgacaaaattagagtctggaagtgacagaagtcagatctacagccacccagaggaaagtcagctcctgaaacgctgcagtggaacgcgcagccaccgcacctgagacgcaggctggctgggctctcctgctggctgccctggaggatttcaacatgtcccaggatttgctccaccctcgagggcagccagacagcgtcgccaggcaatgaggaaagcagagacaggagaggaaggcctcactcacccactgcgtcgagggctgcagaacacagcggggtcctgtccaggcccagggacatctttgcaagccagacacacttcctcttgagacctcgttctctcggagtgagccaaacacacttcccaaaacgtccccagccacagctgggatgccgatggaaaggcatctgccataaaagaaaagcaaaagataaaaagcccaaccgatgtggggatagagaggcggaagagcagtcaggcttgaggagctggcgcttgtaatgtttatccgtttaaacatttcgtcctcctggtacacgaagggaactgtctgcccaggagcctgagcctcaggctgttggagaagcatctgatgcctttttctttgctgggggtcttctacgtgaggttccttggcgttgtttaaggtcaactccaccaaatacagcaaccagctggggcttgaatgggtcgatgtgtgcgtgtgtccctgcgtgcatgcatgcatgcacacgtgcgtgcgtgtttgtgtttgcaagatcctctgacaatgatctgctttgtcccagggacgtggtagtgtattagctgaccaaccaagacaaggacacctggaaatagttagactcttccacttcccttcaggacctgtgaactcagatatgtaagtcagcttctcaggtggtcggacgtgagagcgaccacagtgaaggagccagcactcagggctctctgccttctatgtgggaatgaggtcttcccaacagactctccctcttccaaaagattgtgtatcagttgctccttctgggatttagagatggacagaaaagggtgtgcgatctatgctgtgagaactcccagccagcttagaagtgtcgagccatttgcacagaaagccactccttgagcgaggagaccaaatccctcctgaaatcctccatcgcgtccttctggggagaaaaacccttgatgtgctgagaaccatcatggggaccaggatagaaggcttcttcccactcaaagcttttctccctggagggtgggcactgctgggccatgccacttcaaagcagtgttcctcagcaggaaagcggaggtcaccacttaccggcctcctccaccttctcggcttctcttttctccatgaacccaggtcgtccagcaggtacttccaagttcccaggtctgtctgcctaagagccttttgaggagaccgtcctggagccccatcagtgcccagatcctggggtaccgaccattgctgtctagcagtgggggatcctgtggtgggaatggggtgggcttctcatccatgttgcttctgggaagagagggttgcctttctgggctagggaggtggctggagcttctgccctgaccctccgctagaaaccagttatatccattgccacagcaatactgtgtaacaaatccgccaacactcggtggcctgcaacagtcagcactgatctagggcaggagtcagcagtctgggcagggtgattcttctggtctaggctgtgcttgtttgtttagggccagtgggttgttaagtcccaggggatgctcatggtgcagaggtcggacctggccctgctctgtggtctcttgcatccctcctgcaggccagccatggcacagccaaaggcacggagggagagacagcaagtgcctttccaagccttggtggacaccacacctgcagctctccccttggccacagcaagtcacgtggctgggctcagcattaaggggtgggggacaggcctgccactttattgtccgctctgcacagtcgggtggcagtaggctgagaatttggagggctaaacaactgggactctggagagtctgtgtcctaataatgcctgctttggagcactccttccccacccgcctgctccaggggaatagcgtccctggtcctagcatttcactagatacctcgtgcctttgaaccgctgtgtttgggagggaggaagaggatagacaggtccagggctcccctcacttgggaaggtcctagtagaaggcattccttctgagtctcctggccctacagcttctcacccctgctgctccccaagacctgacccggaccaatcagctgcatctctgcaccaagtgccacccccaccgtgcactgctcgcacctcacgctccccatgggctggcccggaccccagtgaggtctgcacctctcggaccagccaggacctcggaagccatgacctgggtgttcagggcttggcggaggagacgctgctccgcgggggatggagaagccccgcccctccacaactcccttaatctggatgcaattagaggaaaccagccaaaaaccccgcggcagctgttgccccgggattattcccagccagcgagaggcattagggcgataattcagtcattagacttctagccttcccaccgccagaacgtgcaaataggggataatcagccctgcacggccatcctcagcaatgctgcttatttaacccattttttaaaatgacacttaatgttattggctggcgtacgtgtgtgcgcatacttaaaagttgatgcgtggtgcagctctgctgctaatgtctgctgacagcgtcgcccgatgttgctcagggcctctgggaagaggggacacctttgatgtgggcgtgctggcacccaagaggcancgtggtcaggctcgatgcttgccagccctggaaggtcccgccagggttggggggtcgggtgagcactcagagatctggggaggaagcgaggagcctggtgtcctcaccaggtgcagaggggaaatgcgtactgctccagaaggttctgactcaagtctcggccctgaggactcagaactcacaagtcatggatcaagtacagagggagggagggccccagcccacccctgcgggggaggaggagggtctgaaggtgggagggcagctccatgagcagccactgttcctgaccagccgaagtgccaggcagggggaggtttccatgtccaggagggagaggacctccaccctctgacctttcagttttccatagcagcccagtgtgaagctcggcgggggtgggcagggcatcaggacaagatgaagatgctggctctggaatgaggactccccttgggctaaggggtagtggctggcagaggttgcccagctcttttggaggccacagggaatagaggtggggtggtgcttccgttcctgtgaggcccgcccccctgagccccctcgtctgcttcttgtttggcagaaatagatgtggggcacagcccctagatgatgggaatctgcccaagctgtgccctctggggaatgaaatcttgctcctcgtgcagcttcccctttcccttgcggggtgggggctgggggtgccaaggctccacccttggagggggttgctgggggtgccaaggctccaccctttgctcgctgggcagagggaaggaagcacctccctgtatgctctgcaggggcccctgcaggccactttgcctcagaggaaggaggagaggtcccctgggaaaatgcgcacacacacacacacacacacacacacacacacacgcacatgcacacacgcacgcatgcacacacacacacacatatgtgcaggggtgcagcctaagtcagtggagccaggactggctgcgcagctgggcctgccccattcttggagtccccagggaatgagcctcaggatccacttcgtcccttgtttctaagccaggctgcacggccgttcctgggtgtgaaagcattctgtcctgtctccagtcagagggaaccgcccccaaactagaaagctaatttcccccgaaggttcatgaagccagaggcatgcccttgggggttggtcgggagaagggtgagaggcagtgctgtggaaggggcctggcccctgctgcctgcgattctccccgggtatgtggccttctgcctccttcagcctcagtttcctcacctgtaacatgagaataatgatgcctgcctgcccaggccacctcctgggactgcagtggggactctaagtgtaaaactgtcatgaggatggtttatgaagtcccagggaccacacctgccactcagggaagagaccgctgacctcagccatcagccgtgtgcatcgtgaggggcagcgagctcaggacggagagctctcccttggttcggagtcagcacacctgcactcccacacgcccacccagctgtgtgtcctccgccgagggcgagcctctctgtgactcttctgtaaaatgcaccccattctgcccactcctgccacgagacccatcctctgcgatcccgccaggcatgtgtgtgtgaatgcatgtgcaaagctctccatcagaagggtggtgtgggccctgcaggtcctacccctcggccttgaagctccctcgggctgcggactctgcctcctgggtctgagcattagaaccaggagaggggtgtccctgggcagagccaggggtgcaaacagcctgcagccatctggccttttaagtatagtgtgtcgcatttccgggtaggaaggtagcatttcaagttcaaagagaggtcaagtcatgcaaccatctttcctccagcacttttggggtaaggaggacagtttttgttatggtttaggggaaattttcatgaaatttccaccattaccaatagattactgatgtccatggcaagtgatctgttcttggtattttgttttgttttgttttggtttttaaatgtaatcacccattggtcaggcccaggactggtcaccatgagctctgctagccacggccccaacgatgcttccggctctcatggattccacagcaaataaaactgtactgacaac

SEQ ID NO: 302610 - DNA, 6496 bp, Homo sapiens
  misc_feature (4317)..(4317): n is a, c, g, or t
tgacgtgttccagcagtggaaatactgcaccgagatgcagctcaaagaccaggtcgcccccgataagacatgcatgcagttctccatccgccgccccaagctgccgtcctccgagacgcaccccgaggagagcatgtacaagaggctcggcgtctccgcctggctcaaccacctgaatgagctgggccaggtggaggaggagtacaagctgcggaaggccattttctttggcggtattgatgtgtcaatccgcggggaggtctggcccttcctgctgcgctattacagccacgagtccacgtcggaggagcgggaggcgctgcggctgcagaagcgaaaggagtactctgagatccagcagaaaaggctctccatgactcccgaggagcacagagcgttctggcgtaatgtgcagttcactgtggacaaagacgtggtccggacagatcggaacaaccagttcttccggggggaagacaatcccaatgtggagagcatgaggaggatcctgctgaactacgccgtgtacaaccctgccgtcggctattcccaagggatgtcggacctggtggcgcccatcttggccgaggtcctggatgagtcagacaccttctggtgctttgtgggtttgatgcagaacacgatcttcgtcagctcaccccgggacgaggacatggagaaacaactgctgtacctgcgcgagctgctgcggctgacgcacgtgcgcttctaccagcacctggtctcgctgggcgaggacggcctgcagatgctcttctgccaccgctggctccttctgtgcttcaagcgggagttccccgaggccgaagcgctgcggatctgggaggcctgctgggcccactaccagacggactacttccaccttttcatctgcgtggccatcgtggccatctacggggatgacgtcatcgagcagcagctggccacggaccagatgctcctgcacttcggaaacctggccatgcacatgaacggggagctcgttctccggaaggcgaggagtttgctgtaccagttccgcctcctgccccggatcccctgcagcctgcacgatctgtgtaagctgtgcgggtcaggcatgtgggacagcggctccatgcccgcggtggagtgcaccggccaccatcccggctcggagagctgtccctacgggggcacggtggagatgccttcccccaagtccctgagggaaggcaagaagggcccaaagacgccgcaggacggcttcggcttccgcagataggtcgggcccccgacaccggacaggggttgaggggacctcctcagaggccctgggcacgggagggggtggggctgggcgtgaaggggacaggggacggtagaaacctaaggaaaatgcttttgggcaacatgagaggaaccttttcatattaatgacaaaattagagtctggaagtgacagaagtcagatctacagccacccagaggaaagtcagctcctgaaacgctgcagtggaacgcgcagccaccgcacctgagacgcaggctggctgggctctcctgctggctgccctggaggatttcaacatgtcccaggatttgctccaccctcgagggcagccagacagcgtcgccaggcaatgaggaaagcagagacaggagaggaaggcctcactcacccactgcgtcgagggctgcagaacacagcggggtcctgtccaggcccagggacatctttgcaagccagacacacttcctcttgagacctcgttctctcggagtgagccaaacacacttcccaaaacgtccccagccacagctgggatgccgatggaaaggcatctgccataaaagaaaagcaaaagataaaaagcccaaccgatgtggggatagagaggcggaagagcagtcaggcttgaggagctggcgcttgtaatgtttatccgtttaaacatttcgtcctcctggtacacgaagggaactgtctgcccaggagcctgagcctcaggctgttggagaagcatctgatgcctttttctttgctgggggtcttctacgtgaggttccttggcgttgtttaaggtcaactccaccaaatacagcaaccagctggggcttgaatgggtcgatgtgtgcgtgtgtccctgcgtgcatgcatgcatgcacacgtgcgtgcgtgtttgtgtttgcaagatcctctgacaatgatctgctttgtcccagggacgtggtagtgtattagctgaccaaccaagacaaggacacctggaaatagttagactcttccacttcccttcaggacctgtgaactcagatatgtaagtcagcttctcaggtggtcggacgtgagagcgaccacagtgaaggagccagcactcagggctctctgccttctatgtgggaatgaggtcttcccaacagactctccctcttccaaaagattgtgtatcagttgctccttctgggatttagagatggacagaaaagggtgtgcgatctatgctgtgagaactcccagccagcttagaagtgtcgagccatttgcacagaaagccactccttgagcgaggagaccaaatccctcctgaaatcctccatcgcgtccttctggggagaaaaacccttgatgtgctgagaaccatcatggggaccaggatagaaggcttcttcccactcaaagcttttctccctggagggtgggcactgctgggccatgccacttcaaagcagtgttcctcagcaggaaagcggaggtcaccacttaccggcctcctccaccttctcggcttctcttttctccatgaacccaggtcgtccagcaggtacttccaagttcccaggtctgtctgcctaagagccttttgaggagaccgtcctggagccccatcagtgcccagatcctggggtaccgaccattgctgtctagcagtgggggatcctgtggtgggaatggggtgggcttctcatccatgttgcttctgggaagagagggttgcctttctgggctagggaggtggctggagcttctgccctgaccctccgctagaaaccagttatatccattgccacagcaatactgtgtaacaaatccgccaacactcggtggcctgcaacagtcagcactgatctagggcaggagtcagcagtctgggcagggtgattcttctggtctaggctgtgcttgtttgtttagggccagtgggttgttaagtcccaggggatgctcatggtgcagaggtcggacctggccctgctctgtggtctcttgcatccctcctgcaggccagccatggcacagccaaaggcacggagggagagacagcaagtgcctttccaagccttggtggacaccacacctgcagctctccccttggccacagcaagtcacgtggctgggctcagcattaaggggtgggggacaggcctgccactttattgtccgctctgcacagtcgggtggcagtaggctgagaatttggagggctaaacaactgggactctggagagtctgtgtcctaataatgcctgctttggagcactccttccccacccgcctgctccaggggaatagcgtccctggtcctagcatttcactagatacctcgtgcctttgaaccgctgtgtttgggagggaggaagaggatagacaggtccagggctcccctcacttgggaaggtcctagtagaaggcattccttctgagtctcctggccctacagcttctcacccctgctgctccccaagacctgacccggaccaatcagctgcatctctgcaccaagtgccacccccaccgtgcactgctcgcacctcacgctccccatgggctggcccggaccccagtgaggtctgcacctctcggaccagccaggacctcggaagccatgacctgggtgttcagggcttggcggaggagacgctgctccgcgggggatggagaagccccgcccctccacaactcccttaatctggatgcaattagaggaaaccagccaaaaaccccgcggcagctgttgccccgggattattcccagccagcgagaggcattagggcgataattcagtcattagacttctagccttcccaccgccagaacgtgcaaataggggataatcagccctgcacggccatcctcagcaatgctgcttatttaacccattttttaaaatgacacttaatgttattggctggcgtacgtgtgtgcgcatacttaaaagttgatgcgtggtgcagctctgctgctaatgtctgctgacagcgtcgcccgatgttgctcagggcctctgggaagaggggacacctttgatgtgggcgtgctggcacccaagaggcancgtggtcaggctcgatgcttgccagccctggaaggtcccgccagggttggggggtcgggtgagcactcagagatctggggaggaagcgaggagcctggtgtcctcaccaggtgcagaggggaaatgcgtactgctccagaaggttctgactcaagtctcggccctgaggactcagaactcacaagtcatggatcaagtacagagggagggagggccccagcccacccctgcgggggaggaggagggtctgaaggtgggagggcagctccatgagcagccactgttcctgaccagccgaagtgccaggcagggggaggtttccatgtccaggagggagaggacctccaccctctgacctttcagttttccatagcagcccagtgtgaagctcggcgggggtgggcagggcatcaggacaagatgaagatgctggctctggaatgaggactccccttgggctaaggggtagtggctggcagaggttgcccagctcttttggaggccacagggaatagaggtggggtggtgcttccgttcctgtgaggcccgcccccctgagccccctcgtctgcttcttgtttggcagaaatagatgtggggcacagcccctagatgatgggaatctgcccaagctgtgccctctggggaatgaaatcttgctcctcgtgcagcttcccctttcccttgcggggtgggggctgggggtgccaaggctccacccttggagggggttgctgggggtgccaaggctccaccctttgctcgctgggcagagggaaggaagcacctccctgtatgctctgcaggggcccctgcaggccactttgcctcagaggaaggaggagaggtcccctgggaaaatgcgcacacacacacacacacacacacacacacacacacgcacatgcacacacgcacgcatgcacacacacacacacatatgtgcaggggtgcagcctaagtcagtggagccaggactggctgcgcagctgggcctgccccattcttggagtccccagggaatgagcctcaggatccacttcgtcccttgtttctaagccaggctgcacggccgttcctgggtgtgaaagcattctgtcctgtctccagtcagagggaaccgcccccaaactagaaagctaatttcccccgaaggttcatgaagccagaggcatgcccttgggggttggtcgggagaagggtgagaggcagtgctgtggaaggggcctggcccctgctgcctgcgattctccccgggtatgtggccttctgcctccttcagcctcagtttcctcacctgtaacatgagaataatgatgcctgcctgcccaggccacctcctgggactgcagtggggactctaagtgtaaaactgtcatgaggatggtttatgaagtcccagggaccacacctgccactcagggaagagaccgctgacctcagccatcagccgtgtgcatcgtgaggggcagcgagctcaggacggagagctctcccttggttcggagtcagcacacctgcactcccacacgcccacccagctgtgtgtcctccgccgagggcgagcctctctgtgactcttctgtaaaatgcaccccattctgcccactcctgccacgagacccatcctctgcgatcccgccaggcatgtgtgtgtgaatgcatgtgcaaagctctccatcagaagggtggtgtgggccctgcaggtcctacccctcggccttgaagctccctcgggctgcggactctgcctcctgggtctgagcattagaaccaggagaggggtgtccctgggcagagccaggggtgcaaacagcctgcagccatctggccttttaagtatagtgtgtcgcatttccgggtaggaaggtagcatttcaagttcaaagagaggtcaagtcatgcaaccatctttcctccagcacttttggggtaaggaggacagtttttgttatggtttaggggaaattttcatgaaatttccaccattaccaatagattactgatgtccatggcaagtgatctgttcttggtattttgttttgttttgttttggtttttaaatgtaatcacccattggtcaggcccaggactggtcaccatgagctctgctagccacggccccaacgatgcttccggctctcatggattccacagcaaataaaactgtactgacaac

SEQ ID NO: 302611 - DNA, 6454 bp, Homo sapiens
  misc_feature (4275)..(4275): n is a, c, g, or t
tgacgtgttccagcagtggaaatactgcaccgagatgcagctcaaagaccaggtcgcccccgataagacatgcatgcagttctccatccgccgccccaagctgccgtcctccgagacgcaccccgaggagagcatgtacaagaggctcggcgtctccgcctggctcaaccacctgaatgagctgggccaggtggaggaggagtacaagctgcggaaggtctggcccttcctgctgcgctattacagccacgagtccacgtcggaggagcgggaggcgctgcggctgcagaagcgaaaggagtactctgagatccagcagaaaaggctctccatgactcccgaggagcacagagcgttctggcgtaatgtgcagttcactgtggacaaagacgtggtccggacagatcggaacaaccagttcttccggggggaagacaatcccaatgtggagagcatgaggaggatcctgctgaactacgccgtgtacaaccctgccgtcggctattcccaagggatgtcggacctggtggcgcccatcttggccgaggtcctggatgagtcagacaccttctggtgctttgtgggtttgatgcagaacacgatcttcgtcagctcaccccgggacgaggacatggagaaacaactgctgtacctgcgcgagctgctgcggctgacgcacgtgcgcttctaccagcacctggtctcgctgggcgaggacggcctgcagatgctcttctgccaccgctggctccttctgtgcttcaagcgggagttccccgaggccgaagcgctgcggatctgggaggcctgctgggcccactaccagacggactacttccaccttttcatctgcgtggccatcgtggccatctacggggatgacgtcatcgagcagcagctggccacggaccagatgctcctgcacttcggaaacctggccatgcacatgaacggggagctcgttctccggaaggcgaggagtttgctgtaccagttccgcctcctgccccggatcccctgcagcctgcacgatctgtgtaagctgtgcgggtcaggcatgtgggacagcggctccatgcccgcggtggagtgcaccggccaccatcccggctcggagagctgtccctacgggggcacggtggagatgccttcccccaagtccctgagggaaggcaagaagggcccaaagacgccgcaggacggcttcggcttccgcagataggtcgggcccccgacaccggacaggggttgaggggacctcctcagaggccctgggcacgggagggggtggggctgggcgtgaaggggacaggggacggtagaaacctaaggaaaatgcttttgggcaacatgagaggaaccttttcatattaatgacaaaattagagtctggaagtgacagaagtcagatctacagccacccagaggaaagtcagctcctgaaacgctgcagtggaacgcgcagccaccgcacctgagacgcaggctggctgggctctcctgctggctgccctggaggatttcaacatgtcccaggatttgctccaccctcgagggcagccagacagcgtcgccaggcaatgaggaaagcagagacaggagaggaaggcctcactcacccactgcgtcgagggctgcagaacacagcggggtcctgtccaggcccagggacatctttgcaagccagacacacttcctcttgagacctcgttctctcggagtgagccaaacacacttcccaaaacgtccccagccacagctgggatgccgatggaaaggcatctgccataaaagaaaagcaaaagataaaaagcccaaccgatgtggggatagagaggcggaagagcagtcaggcttgaggagctggcgcttgtaatgtttatccgtttaaacatttcgtcctcctggtacacgaagggaactgtctgcccaggagcctgagcctcaggctgttggagaagcatctgatgcctttttctttgctgggggtcttctacgtgaggttccttggcgttgtttaaggtcaactccaccaaatacagcaaccagctggggcttgaatgggtcgatgtgtgcgtgtgtccctgcgtgcatgcatgcatgcacacgtgcgtgcgtgtttgtgtttgcaagatcctctgacaatgatctgctttgtcccagggacgtggtagtgtattagctgaccaaccaagacaaggacacctggaaatagttagactcttccacttcccttcaggacctgtgaactcagatatgtaagtcagcttctcaggtggtcggacgtgagagcgaccacagtgaaggagccagcactcagggctctctgccttctatgtgggaatgaggtcttcccaacagactctccctcttccaaaagattgtgtatcagttgctccttctgggatttagagatggacagaaaagggtgtgcgatctatgctgtgagaactcccagccagcttagaagtgtcgagccatttgcacagaaagccactccttgagcgaggagaccaaatccctcctgaaatcctccatcgcgtccttctggggagaaaaacccttgatgtgctgagaaccatcatggggaccaggatagaaggcttcttcccactcaaagcttttctccctggagggtgggcactgctgggccatgccacttcaaagcagtgttcctcagcaggaaagcggaggtcaccacttaccggcctcctccaccttctcggcttctcttttctccatgaacccaggtcgtccagcaggtacttccaagttcccaggtctgtctgcctaagagccttttgaggagaccgtcctggagccccatcagtgcccagatcctggggtaccgaccattgctgtctagcagtgggggatcctgtggtgggaatggggtgggcttctcatccatgttgcttctgggaagagagggttgcctttctgggctagggaggtggctggagcttctgccctgaccctccgctagaaaccagttatatccattgccacagcaatactgtgtaacaaatccgccaacactcggtggcctgcaacagtcagcactgatctagggcaggagtcagcagtctgggcagggtgattcttctggtctaggctgtgcttgtttgtttagggccagtgggttgttaagtcccaggggatgctcatggtgcagaggtcggacctggccctgctctgtggtctcttgcatccctcctgcaggccagccatggcacagccaaaggcacggagggagagacagcaagtgcctttccaagccttggtggacaccacacctgcagctctccccttggccacagcaagtcacgtggctgggctcagcattaaggggtgggggacaggcctgccactttattgtccgctctgcacagtcgggtggcagtaggctgagaatttggagggctaaacaactgggactctggagagtctgtgtcctaataatgcctgctttggagcactccttccccacccgcctgctccaggggaatagcgtccctggtcctagcatttcactagatacctcgtgcctttgaaccgctgtgtttgggagggaggaagaggatagacaggtccagggctcccctcacttgggaaggtcctagtagaaggcattccttctgagtctcctggccctacagcttctcacccctgctgctccccaagacctgacccggaccaatcagctgcatctctgcaccaagtgccacccccaccgtgcactgctcgcacctcacgctccccatgggctggcccggaccccagtgaggtctgcacctctcggaccagccaggacctcggaagccatgacctgggtgttcagggcttggcggaggagacgctgctccgcgggggatggagaagccccgcccctccacaactcccttaatctggatgcaattagaggaaaccagccaaaaaccccgcggcagctgttgccccgggattattcccagccagcgagaggcattagggcgataattcagtcattagacttctagccttcccaccgccagaacgtgcaaataggggataatcagccctgcacggccatcctcagcaatgctgcttatttaacccattttttaaaatgacacttaatgttattggctggcgtacgtgtgtgcgcatacttaaaagttgatgcgtggtgcagctctgctgctaatgtctgctgacagcgtcgcccgatgttgctcagggcctctgggaagaggggacacctttgatgtgggcgtgctggcacccaagaggcancgtggtcaggctcgatgcttgccagccctggaaggtcccgccagggttggggggtcgggtgagcactcagagatctggggaggaagcgaggagcctggtgtcctcaccaggtgcagaggggaaatgcgtactgctccagaaggttctgactcaagtctcggccctgaggactcagaactcacaagtcatggatcaagtacagagggagggagggccccagcccacccctgcgggggaggaggagggtctgaaggtgggagggcagctccatgagcagccactgttcctgaccagccgaagtgccaggcagggggaggtttccatgtccaggagggagaggacctccaccctctgacctttcagttttccatagcagcccagtgtgaagctcggcgggggtgggcagggcatcaggacaagatgaagatgctggctctggaatgaggactccccttgggctaaggggtagtggctggcagaggttgcccagctcttttggaggccacagggaatagaggtggggtggtgcttccgttcctgtgaggcccgcccccctgagccccctcgtctgcttcttgtttggcagaaatagatgtggggcacagcccctagatgatgggaatctgcccaagctgtgccctctggggaatgaaatcttgctcctcgtgcagcttcccctttcccttgcggggtgggggctgggggtgccaaggctccacccttggagggggttgctgggggtgccaaggctccaccctttgctcgctgggcagagggaaggaagcacctccctgtatgctctgcaggggcccctgcaggccactttgcctcagaggaaggaggagaggtcccctgggaaaatgcgcacacacacacacacacacacacacacacacacacgcacatgcacacacgcacgcatgcacacacacacacacatatgtgcaggggtgcagcctaagtcagtggagccaggactggctgcgcagctgggcctgccccattcttggagtccccagggaatgagcctcaggatccacttcgtcccttgtttctaagccaggctgcacggccgttcctgggtgtgaaagcattctgtcctgtctccagtcagagggaaccgcccccaaactagaaagctaatttcccccgaaggttcatgaagccagaggcatgcccttgggggttggtcgggagaagggtgagaggcagtgctgtggaaggggcctggcccctgctgcctgcgattctccccgggtatgtggccttctgcctccttcagcctcagtttcctcacctgtaacatgagaataatgatgcctgcctgcccaggccacctcctgggactgcagtggggactctaagtgtaaaactgtcatgaggatggtttatgaagtcccagggaccacacctgccactcagggaagagaccgctgacctcagccatcagccgtgtgcatcgtgaggggcagcgagctcaggacggagagctctcccttggttcggagtcagcacacctgcactcccacacgcccacccagctgtgtgtcctccgccgagggcgagcctctctgtgactcttctgtaaaatgcaccccattctgcccactcctgccacgagacccatcctctgcgatcccgccaggcatgtgtgtgtgaatgcatgtgcaaagctctccatcagaagggtggtgtgggccctgcaggtcctacccctcggccttgaagctccctcgggctgcggactctgcctcctgggtctgagcattagaaccaggagaggggtgtccctgggcagagccaggggtgcaaacagcctgcagccatctggccttttaagtatagtgtgtcgcatttccgggtaggaaggtagcatttcaagttcaaagagaggtcaagtcatgcaaccatctttcctccagcacttttggggtaaggaggacagtttttgttatggtttaggggaaattttcatgaaatttccaccattaccaatagattactgatgtccatggcaagtgatctgttcttggtattttgttttgttttgttttggtttttaaatgtaatcacccattggtcaggcccaggactggtcaccatgagctctgctagccacggccccaacgatgcttccggctctcatggattccacagcaaataaaactgtactgacaac

SEQ ID NO: 302612 - DNA, 9879 bp, Homo sapiens
  misc_feature (4346)..(4346): n is a, c, g, or t
ggggttggagagagtggggggcggcggcacagtgggccggggaggagagagccgcagagggaaaccgattttaagatgaaggtcgcccccgataagacatgcatgcagttctccatccgccgccccaagctgccgtcctccgagacgcaccccgaggagagcatgtacaagaggctcggcgtctccgcctggctcaaccacctgaatgagctgggccaggtggaggaggagtacaagctgcggaaggccattttctttggcggtattgatgtgtcaatccgcggggaggtctggcccttcctgctgcgctattacagccacgagtccacgtcggaggagcgggaggcgctgcggctgcagaagcgaaaggagtactctgagatccagcagaaaaggctctccatgactcccgaggagcacagagcgttctggcgtaatgtgcagttcactgtggacaaagacgtggtccggacagatcggaacaaccagttcttccggggggaagacaatcccaatgtggagagcatgaggaggatcctgctgaactacgccgtgtacaaccctgccgtcggctattcccaagggatgtcggacctggtggcgcccatcttggccgaggtcctggatgagtcagacaccttctggtgctttgtgggtttgatgcagaacacgatcttcgtcagctcaccccgggacgaggacatggagaaacaactgctgtacctgcgcgagctgctgcggctgacgcacgtgcgcttctaccagcacctggtctcgctgggcgaggacggcctgcagatgctcttctgccaccgctggctccttctgtgcttcaagcgggagttccccgaggccgaagcgctgcggatctgggaggcctgctgggcccactaccagacggactacttccaccttttcatctgcgtggccatcgtggccatctacggggatgacgtcatcgagcagcagctggccacggaccagatgctcctgcacttcggaaacctggccatgcacatgaacggggagctcgttctccggaaggcgaggagtttgctgtaccagttccgcctcctgccccggatcccctgcagcctgcacgatctgtgtaagctgtgcgggtcaggcatgtgggacagcggctccatgcccgcggtggagtgcaccggccaccatcccggctcggagagctgtccctacgggggcacggtggagatgccttcccccaagtccctgagggaaggcaagaagggcccaaagacgccgcaggacggcttcggcttccgcagataggtcgggcccccgacaccggacaggggttgaggggacctcctcagaggccctgggcacgggagggggtggggctgggcgtgaaggggacaggggacggtagaaacctaaggaaaatgcttttgggcaacatgagaggaaccttttcatattaatgacaaaattagagtctggaagtgacagaagtcagatctacagccacccagaggaaagtcagctcctgaaacgctgcagtggaacgcgcagccaccgcacctgagacgcaggctggctgggctctcctgctggctgccctggaggatttcaacatgtcccaggatttgctccaccctcgagggcagccagacagcgtcgccaggcaatgaggaaagcagagacaggagaggaaggcctcactcacccactgcgtcgagggctgcagaacacagcggggtcctgtccaggcccagggacatctttgcaagccagacacacttcctcttgagacctcgttctctcggagtgagccaaacacacttcccaaaacgtccccagccacagctgggatgccgatggaaaggcatctgccataaaagaaaagcaaaagataaaaagcccaaccgatgtggggatagagaggcggaagagcagtcaggcttgaggagctggcgcttgtaatgtttatccgtttaaacatttcgtcctcctggtacacgaagggaactgtctgcccaggagcctgagcctcaggctgttggagaagcatctgatgcctttttctttgctgggggtcttctacgtgaggttccttggcgttgtttaaggtcaactccaccaaatacagcaaccagctggggcttgaatgggtcgatgtgtgcgtgtgtccctgcgtgcatgcatgcatgcacacgtgcgtgcgtgtttgtgtttgcaagatcctctgacaatgatctgctttgtcccagggacgtggtagtgtattagctgaccaaccaagacaaggacacctggaaatagttagactcttccacttcccttcaggacctgtgaactcagatatgtaagtcagcttctcaggtggtcggacgtgagagcgaccacagtgaaggagccagcactcagggctctctgccttctatgtgggaatgaggtcttcccaacagactctccctcttccaaaagattgtgtatcagttgctccttctgggatttagagatggacagaaaagggtgtgcgatctatgctgtgagaactcccagccagcttagaagtgtcgagccatttgcacagaaagccactccttgagcgaggagaccaaatccctcctgaaatcctccatcgcgtccttctggggagaaaaacccttgatgtgctgagaaccatcatggggaccaggatagaaggcttcttcccactcaaagcttttctccctggagggtgggcactgctgggccatgccacttcaaagcagtgttcctcagcaggaaagcggaggtcaccacttaccggcctcctccaccttctcggcttctcttttctccatgaacccaggtcgtccagcaggtacttccaagttcccaggtctgtctgcctaagagccttttgaggagaccgtcctggagccccatcagtgcccagatcctggggtaccgaccattgctgtctagcagtgggggatcctgtggtgggaatggggtgggcttctcatccatgttgcttctgggaagagagggttgcctttctgggctagggaggtggctggagcttctgccctgaccctccgctagaaaccagttatatccattgccacagcaatactgtgtaacaaatccgccaacactcggtggcctgcaacagtcagcactgatctagggcaggagtcagcagtctgggcagggtgattcttctggtctaggctgtgcttgtttgtttagggccagtgggttgttaagtcccaggggatgctcatggtgcagaggtcggacctggccctgctctgtggtctcttgcatccctcctgcaggccagccatggcacagccaaaggcacggagggagagacagcaagtgcctttccaagccttggtggacaccacacctgcagctctccccttggccacagcaagtcacgtggctgggctcagcattaaggggtgggggacaggcctgccactttattgtccgctctgcacagtcgggtggcagtaggctgagaatttggagggctaaacaactgggactctggagagtctgtgtcctaataatgcctgctttggagcactccttccccacccgcctgctccaggggaatagcgtccctggtcctagcatttcactagatacctcgtgcctttgaaccgctgtgtttgggagggaggaagaggatagacaggtccagggctcccctcacttgggaaggtcctagtagaaggcattccttctgagtctcctggccctacagcttctcacccctgctgctccccaagacctgacccggaccaatcagctgcatctctgcaccaagtgccacccccaccgtgcactgctcgcacctcacgctccccatgggctggcccggaccccagtgaggtctgcacctctcggaccagccaggacctcggaagccatgacctgggtgttcagggcttggcggaggagacgctgctccgcgggggatggagaagccccgcccctccacaactcccttaatctggatgcaattagaggaaaccagccaaaaaccccgcggcagctgttgccccgggattattcccagccagcgagaggcattagggcgataattcagtcattagacttctagccttcccaccgccagaacgtgcaaataggggataatcagccctgcacggccatcctcagcaatgctgcttatttaacccattttttaaaatgacacttaatgttattggctggcgtacgtgtgtgcgcatacttaaaagttgatgcgtggtgcagctctgctgctaatgtctgctgacagcgtcgcccgatgttgctcagggcctctgggaagaggggacacctttgatgtgggcgtgctggcacccaagaggcancgtggtcaggctcgatgcttgccagccctggaaggtcccgccagggttggggggtcgggtgagcactcagagatctggggaggaagcgaggagcctggtgtcctcaccaggtgcagaggggaaatgcgtactgctccagaaggttctgactcaagtctcggccctgaggactcagaactcacaagtcatggatcaagtacagagggagggagggccccagcccacccctgcgggggaggaggagggtctgaaggtgggagggcagctccatgagcagccactgttcctgaccagccgaagtgccaggcagggggaggtttccatgtccaggagggagaggacctccaccctctgacctttcagttttccatagcagcccagtgtgaagctcggcgggggtgggcagggcatcaggacaagatgaagatgctggctctggaatgaggactccccttgggctaaggggtagtggctggcagaggttgcccagctcttttggaggccacagggaatagaggtggggtggtgcttccgttcctgtgaggcccgcccccctgagccccctcgtctgcttcttgtttggcagaaatagatgtggggcacagcccctagatgatgggaatctgcccaagctgtgccctctggggaatgaaatcttgctcctcgtgcagcttcccctttcccttgcggggtgggggctgggggtgccaaggctccacccttggagggggttgctgggggtgccaaggctccaccctttgctcgctgggcagagggaaggaagcacctccctgtatgctctgcaggggcccctgcaggccactttgcctcagaggaaggaggagaggtcccctgggaaaatgcgcacacacacacacacacacacacacacacacacacgcacatgcacacacgcacgcatgcacacacacacacacatatgtgcaggggtgcagcctaagtcagtggagccaggactggctgcgcagctgggcctgccccattcttggagtccccagggaatgagcctcaggatccacttcgtcccttgtttctaagccaggctgcacggccgttcctgggtgtgaaagcattctgtcctgtctccagtcagagggaaccgcccccaaactagaaagctaatttcccccgaaggttcatgaagccagaggcatgcccttgggggttggtcgggagaagggtgagaggcagtgctgtggaaggggcctggcccctgctgcctgcgattctccccgggtatgtggccttctgcctccttcagcctcagtttcctcacctgtaacatgagaataatgatgcctgcctgcccaggccacctcctgggactgcagtggggactctaagtgtaaaactgtcatgaggatggtttatgaagtcccagggaccacacctgccactcagggaagagaccgctgacctcagccatcagccgtgtgcatcgtgaggggcagcgagctcaggacggagagctctcccttggttcggagtcagcacacctgcactcccacacgcccacccagctgtgtgtcctccgccgagggcgagcctctctgtgactcttctgtaaaatgcaccccattctgcccactcctgccacgagacccatcctctgcgatcccgccaggcatgtgtgtgtgaatgcatgtgcaaagctctccatcagaagggtggtgtgggccctgcaggtcctacccctcggccttgaagctccctcgggctgcggactctgcctcctgggtctgagcattagaaccaggagaggggtgtccctgggcagagccaggggtgcaaacagcctgcagccatctggccttttaagtatagtgtgtcgcatttccgggtaggaaggtagcatttcaagttcaaagagaggtcaagtcatgcaaccatctttcctccagcacttttggggtaaggaggacagtttttgttatggtttaggggaaattttcatgaaatttccaccattaccaatagattactgatgtccatggcaagtgatctgttcttggtattttgttttgttttgttttggtttttaaatgtaatcacccattggtcaggcccaggactggtcaccatgagctctgctagccacggccccaacgatgcttccggctctcatggattccacagcaaataaaactgtactgacaacagatgcacgctgtacagtgcctctggaaggtgcggtgggacttgctgggtcaaagcacggcaggctctgtgctgggcaaacagggccccgcggcagcccaagggcagcctgcagacgccagtgtgcccggcttctcccatgttctgagatgggggaggggaaggtgtaaaagagagctggatgggggctgtggggactgagggtcctgggaggctggccaggggctcagcaagcgcccactttgggaggccttgccctctgggctgtggttggacagcactaggcctgcaggctgggctgccaggaggaagagcagctccggacctcaggcccccccagcaggcggcgatggagggtgatgggagaattgacgagtgctcgcggggtctcactcgggaaagggccggttaactctgagcaactgggagcctcgctcccaccccagtgcctggaaacacaaacagtattttattgagccttggctgccggggctctggtttcaggaaaagcctcagtcctgcatttgtgaatttttaaggaggcaaacaaggtgaatttgaccttcctaggagtgggagttagggaaaattcaggctgccctaccaagcccttggaaccgtgcagcaggggtcaggggagggatgggcaaaggcggtttggcccatggagcaggtctcctggtcctcccggagcacggggggcggggagctccagctcttcatcaagcgccctttggggtttccaactgttttctgttgttctctgtgtgtcttttccccttttgcctgggggcgggggctggaggggaacatacctcttatctacatcactcgggtctcatgtctgaagggcctgtctcacctgccacctacctggccttggcctcgacatctgagcgcctcatcacctcctctccacatgcccaggggtgcccctcccaaggctggctgggcaggtcccacggactaggccccaggaggagcagtgggcttcccccaggaaagagcagagccagcactgcctgcctggggagggcacccactaccaggcatggctggtggctccgtttaaagaaatctttgtccatgtgggagtgggaggtgcttccccatcctgcctggaagccacgtcctggctcttaccgtggactctgcaacagccgtggtggccacatgaagatggagaaacctggtggctcaggggcccctgatgtcaccgcctccaaggcaacgggactgggcagggcagctcctcaggaaggatgatcccacctgcacgggtcagccctgcagggggacaaggcccaccacaaccccacctcaggccaccaactggacctgtcctgccaagaaggtcccttccaatttgtccggcagctggttccctggatacagcccagacgcagcatcatcctcatgttcacctctgctgtgccctacttcccccgtaaatgacaactgtgtagtcacccacgccgggcaagagaacataggtgccacctggcgggccacacttttcaggggccgtgcctcgggcaggcccggctctctgttgtcccgcagccctcagggctggcggtggctgctcagtgcctagggagtgcccttgccacacagctgggcagcgagcatgactcagcgtttacactcaaccagccgcacaggctccagaggggaagttctctggggtccttctatgagagagcatcctgtctgcagccctgttctggctccttccacatcattcatgcattcatcccacgaggactatggtaccgtgggctcgctctagggaagcaaggcaggagcgcactggggctacttggattcccggggcagacacatatgtaccctgcacaccctcaaatgagcaaagccaccccactggcccctgggtgaggccatgtggacccccacacctttggggccggctgggcaaaccttgaacccccaatttctgcgtggcctttggctgccctccttctccaaggcgtgactcttactccagagactcaggcgagcacgtgtcccttaccttattttctctcaatcaaactgaaacccattgtgatcccccatagtccagtgcggtctctgttattattacgggtgtctcccttcctccccgtgcccaggacaggccatgagccagagatacaaggggccccaggcaagatgcagggctctctgctcctggctctttatcgtcgtcgggacaccctttgtccaaactcaaggaatcccgggaggtctggctttgccgctttggctgggactcaggtacctgggcatacctgcatctgtgccccctcttcgtcccagtgagacggaccctcagtatcccccccaacatagaacaggaaggtctcaagccagccccctcctccagttcaatcaccctccctcacatccacccagagaagtccagacctgtggccacttccatgccctctccagaccaggagacacctgctgctgacctcgtggaaaacttagattttgacattctgatgcttcggaagtggtggctcctcctccttcacccctccgccacctgtgggcctcctctctgcatctcaagagaacaaccagatctttgggctcctggggtgtgtgccatgcaatttagacgaagtgctttgaaaatatgccattcagtctctgactaggaaaataagtctgacctgataggtccgatgtcatcagctcttcaacatgagacaaaagaggggattttatgttttgagtcattagaatgatataataattttctgaattgacatctggatgttgaaattaggatggtgcaaaaggggtccagggcctcaggctgggcgcagcagccagctcccaatgacgcagaagctgcttcaaaaccccctcaacaaagaggggcacatgcaagtcaccaaagtgggaagccttcaccaaggccacacccaaagtctactgattgtctgtccaaagttcgttgattcctggccatgaacaagcacaatagaaaaagacacagggtcctagtggctacaagtcaatgtgaattggcacatggtctagcagttttaaaatctgacagtagagtatggcaatgggcaagggccaagaagtcctgagatgggaggtcagcgctctaactgggctcagtggaggtctgtgaccagtgtctggacactagctacaggggaccgggcagaggattctgggcagaaggaaaatgtctaaaagtactttgggagggtaaaggacaggggccttatttaaaataaagactgaaggataataagtgtcacccaggtttgtggattattggagggggcaccatctagccattctccacttttccagtgtggagaac

SEQ ID NO: 302613 - DNA, 9726 bp, Homo sapiens
  misc_feature (4346)..(4346): n is a, c, g, or t
ggggttggagagagtggggggcggcggcacagtgggccggggaggagagagccgcagagggaaaccgattttaagatgaaggtcgcccccgataagacatgcatgcagttctccatccgccgccccaagctgccgtcctccgagacgcaccccgaggagagcatgtacaagaggctcggcgtctccgcctggctcaaccacctgaatgagctgggccaggtggaggaggagtacaagctgcggaaggccattttctttggcggtattgatgtgtcaatccgcggggaggtctggcccttcctgctgcgctattacagccacgagtccacgtcggaggagcgggaggcgctgcggctgcagaagcgaaaggagtactctgagatccagcagaaaaggctctccatgactcccgaggagcacagagcgttctggcgtaatgtgcagttcactgtggacaaagacgtggtccggacagatcggaacaaccagttcttccggggggaagacaatcccaatgtggagagcatgaggaggatcctgctgaactacgccgtgtacaaccctgccgtcggctattcccaagggatgtcggacctggtggcgcccatcttggccgaggtcctggatgagtcagacaccttctggtgctttgtgggtttgatgcagaacacgatcttcgtcagctcaccccgggacgaggacatggagaaacaactgctgtacctgcgcgagctgctgcggctgacgcacgtgcgcttctaccagcacctggtctcgctgggcgaggacggcctgcagatgctcttctgccaccgctggctccttctgtgcttcaagcgggagttccccgaggccgaagcgctgcggatctgggaggcctgctgggcccactaccagacggactacttccaccttttcatctgcgtggccatcgtggccatctacggggatgacgtcatcgagcagcagctggccacggaccagatgctcctgcacttcggaaacctggccatgcacatgaacggggagctcgttctccggaaggcgaggagtttgctgtaccagttccgcctcctgccccggatcccctgcagcctgcacgatctgtgtaagctgtgcgggtcaggcatgtgggacagcggctccatgcccgcggtggagtgcaccggccaccatcccggctcggagagctgtccctacgggggcacggtggagatgccttcccccaagtccctgagggaaggcaagaagggcccaaagacgccgcaggacggcttcggcttccgcagataggtcgggcccccgacaccggacaggggttgaggggacctcctcagaggccctgggcacgggagggggtggggctgggcgtgaaggggacaggggacggtagaaacctaaggaaaatgcttttgggcaacatgagaggaaccttttcatattaatgacaaaattagagtctggaagtgacagaagtcagatctacagccacccagaggaaagtcagctcctgaaacgctgcagtggaacgcgcagccaccgcacctgagacgcaggctggctgggctctcctgctggctgccctggaggatttcaacatgtcccaggatttgctccaccctcgagggcagccagacagcgtcgccaggcaatgaggaaagcagagacaggagaggaaggcctcactcacccactgcgtcgagggctgcagaacacagcggggtcctgtccaggcccagggacatctttgcaagccagacacacttcctcttgagacctcgttctctcggagtgagccaaacacacttcccaaaacgtccccagccacagctgggatgccgatggaaaggcatctgccataaaagaaaagcaaaagataaaaagcccaaccgatgtggggatagagaggcggaagagcagtcaggcttgaggagctggcgcttgtaatgtttatccgtttaaacatttcgtcctcctggtacacgaagggaactgtctgcccaggagcctgagcctcaggctgttggagaagcatctgatgcctttttctttgctgggggtcttctacgtgaggttccttggcgttgtttaaggtcaactccaccaaatacagcaaccagctggggcttgaatgggtcgatgtgtgcgtgtgtccctgcgtgcatgcatgcatgcacacgtgcgtgcgtgtttgtgtttgcaagatcctctgacaatgatctgctttgtcccagggacgtggtagtgtattagctgaccaaccaagacaaggacacctggaaatagttagactcttccacttcccttcaggacctgtgaactcagatatgtaagtcagcttctcaggtggtcggacgtgagagcgaccacagtgaaggagccagcactcagggctctctgccttctatgtgggaatgaggtcttcccaacagactctccctcttccaaaagattgtgtatcagttgctccttctgggatttagagatggacagaaaagggtgtgcgatctatgctgtgagaactcccagccagcttagaagtgtcgagccatttgcacagaaagccactccttgagcgaggagaccaaatccctcctgaaatcctccatcgcgtccttctggggagaaaaacccttgatgtgctgagaaccatcatggggaccaggatagaaggcttcttcccactcaaagcttttctccctggagggtgggcactgctgggccatgccacttcaaagcagtgttcctcagcaggaaagcggaggtcaccacttaccggcctcctccaccttctcggcttctcttttctccatgaacccaggtcgtccagcaggtacttccaagttcccaggtctgtctgcctaagagccttttgaggagaccgtcctggagccccatcagtgcccagatcctggggtaccgaccattgctgtctagcagtgggggatcctgtggtgggaatggggtgggcttctcatccatgttgcttctgggaagagagggttgcctttctgggctagggaggtggctggagcttctgccctgaccctccgctagaaaccagttatatccattgccacagcaatactgtgtaacaaatccgccaacactcggtggcctgcaacagtcagcactgatctagggcaggagtcagcagtctgggcagggtgattcttctggtctaggctgtgcttgtttgtttagggccagtgggttgttaagtcccaggggatgctcatggtgcagaggtcggacctggccctgctctgtggtctcttgcatccctcctgcaggccagccatggcacagccaaaggcacggagggagagacagcaagtgcctttccaagccttggtggacaccacacctgcagctctccccttggccacagcaagtcacgtggctgggctcagcattaaggggtgggggacaggcctgccactttattgtccgctctgcacagtcgggtggcagtaggctgagaatttggagggctaaacaactgggactctggagagtctgtgtcctaataatgcctgctttggagcactccttccccacccgcctgctccaggggaatagcgtccctggtcctagcatttcactagatacctcgtgcctttgaaccgctgtgtttgggagggaggaagaggatagacaggtccagggctcccctcacttgggaaggtcctagtagaaggcattccttctgagtctcctggccctacagcttctcacccctgctgctccccaagacctgacccggaccaatcagctgcatctctgcaccaagtgccacccccaccgtgcactgctcgcacctcacgctccccatgggctggcccggaccccagtgaggtctgcacctctcggaccagccaggacctcggaagccatgacctgggtgttcagggcttggcggaggagacgctgctccgcgggggatggagaagccccgcccctccacaactcccttaatctggatgcaattagaggaaaccagccaaaaaccccgcggcagctgttgccccgggattattcccagccagcgagaggcattagggcgataattcagtcattagacttctagccttcccaccgccagaacgtgcaaataggggataatcagccctgcacggccatcctcagcaatgctgcttatttaacccattttttaaaatgacacttaatgttattggctggcgtacgtgtgtgcgcatacttaaaagttgatgcgtggtgcagctctgctgctaatgtctgctgacagcgtcgcccgatgttgctcagggcctctgggaagaggggacacctttgatgtgggcgtgctggcacccaagaggcancgtggtcaggctcgatgcttgccagccctggaaggtcccgccagggttggggggtcgggtgagcactcagagatctggggaggaagcgaggagcctggtgtcctcaccaggtgcagaggggaaatgcgtactgctccagaaggttctgactcaagtctcggccctgaggactcagaactcacaagtcatggatcaagtacagagggagggagggccccagcccacccctgcgggggaggaggagggtctgaaggtgggagggcagctccatgagcagccactgttcctgaccagccgaagtgccaggcagggggaggtttccatgtccaggagggagaggacctccaccctctgacctttcagttttccatagcagcccagtgtgaagctcggcgggggtgggcagggcatcaggacaagatgaagatgctggctctggaatgaggactccccttgggctaaggggtagtggctggcagaggttgcccagctcttttggaggccacagggaatagaggtggggtggtgcttccgttcctgtgaggcccgcccccctgagccccctcgtctgcttcttgtttggcagaaatagatgtggggcacagcccctagatgatgggaatctgcccaagctgtgccctctggggaatgaaatcttgctcctcgtgcagcttcccctttcccttgcggggtgggggctgggggtgccaaggctccacccttggagggggttgctgggggtgccaaggctccaccctttgctcgctgggcagagggaaggaagcacctccctgtatgctctgcaggggcccctgcaggccactttgcctcagaggaaggaggagaggtcccctgggaaaatgcgcacacacacacacacacacacacacacacacacacgcacatgcacacacgcacgcatgcacacacacacacacatatgtgcaggggtgcagcctaagtcagtggagccaggactggctgcgcagctgggcctgccccattcttggagtccccagggaatgagcctcaggatccacttcgtcccttgtttctaagccaggctgcacggccgttcctgggtgtgaaagcattctgtcctgtctccagtcagagggaaccgcccccaaactagaaagctaatttcccccgaaggttcatgaagccagaggcatgcccttgggggttggtcgggagaagggtgagaggcagtgctgtggaaggggcctggcccctgctgcctgcgattctccccgggtatgtggccttctgcctccttcagcctcagtttcctcacctgtaacatgagaataatgatgcctgcctgcccaggccacctcctgggactgcagtggggactctaagtgtaaaactgtcatgaggatggtttatgaagtcccagggaccacacctcctctctgtgactcttctgtaaaatgcaccccattctgcccactcctgccacgagacccatcctctgcgatcccgccaggcatgtgtgtgtgaatgcatgtgcaaagctctccatcagaagggtggtgtgggccctgcaggtcctacccctcggccttgaagctccctcgggctgcggactctgcctcctgggtctgagcattagaaccaggagaggggtgtccctgggcagagccaggggtgcaaacagcctgcagccatctggccttttaagtatagtgtgtcgcatttccgggtaggaaggtagcatttcaagttcaaagagaggtcaagtcatgcaaccatctttcctccagcacttttggggtaaggaggacagtttttgttatggtttaggggaaattttcatgaaatttccaccattaccaatagattactgatgtccatggcaagtgatctgttcttggtattttgttttgttttgttttggtttttaaatgtaatcacccattggtcaggcccaggactggtcaccatgagctctgctagccacggccccaacgatgcttccggctctcatggattccacagcaaataaaactgtactgacaacagatgcacgctgtacagtgcctctggaaggtgcggtgggacttgctgggtcaaagcacggcaggctctgtgctgggcaaacagggccccgcggcagcccaagggcagcctgcagacgccagtgtgcccggcttctcccatgttctgagatgggggaggggaaggtgtaaaagagagctggatgggggctgtggggactgagggtcctgggaggctggccaggggctcagcaagcgcccactttgggaggccttgccctctgggctgtggttggacagcactaggcctgcaggctgggctgccaggaggaagagcagctccggacctcaggcccccccagcaggcggcgatggagggtgatgggagaattgacgagtgctcgcggggtctcactcgggaaagggccggttaactctgagcaactgggagcctcgctcccaccccagtgcctggaaacacaaacagtattttattgagccttggctgccggggctctggtttcaggaaaagcctcagtcctgcatttgtgaatttttaaggaggcaaacaaggtgaatttgaccttcctaggagtgggagttagggaaaattcaggctgccctaccaagcccttggaaccgtgcagcaggggtcaggggagggatgggcaaaggcggtttggcccatggagcaggtctcctggtcctcccggagcacggggggcggggagctccagctcttcatcaagcgccctttggggtttccaactgttttctgttgttctctgtgtgtcttttccccttttgcctgggggcgggggctggaggggaacatacctcttatctacatcactcgggtctcatgtctgaagggcctgtctcacctgccacctacctggccttggcctcgacatctgagcgcctcatcacctcctctccacatgcccaggggtgcccctcccaaggctggctgggcaggtcccacggactaggccccaggaggagcagtgggcttcccccaggaaagagcagagccagcactgcctgcctggggagggcacccactaccaggcatggctggtggctccgtttaaagaaatctttgtccatgtgggagtgggaggtgcttccccatcctgcctggaagccacgtcctggctcttaccgtggactctgcaacagccgtggtggccacatgaagatggagaaacctggtggctcaggggcccctgatgtcaccgcctccaaggcaacgggactgggcagggcagctcctcaggaaggatgatcccacctgcacgggtcagccctgcagggggacaaggcccaccacaaccccacctcaggccaccaactggacctgtcctgccaagaaggtcccttccaatttgtccggcagctggttccctggatacagcccagacgcagcatcatcctcatgttcacctctgctgtgccctacttcccccgtaaatgacaactgtgtagtcacccacgccgggcaagagaacataggtgccacctggcgggccacacttttcaggggccgtgcctcgggcaggcccggctctctgttgtcccgcagccctcagggctggcggtggctgctcagtgcctagggagtgcccttgccacacagctgggcagcgagcatgactcagcgtttacactcaaccagccgcacaggctccagaggggaagttctctggggtccttctatgagagagcatcctgtctgcagccctgttctggctccttccacatcattcatgcattcatcccacgaggactatggtaccgtgggctcgctctagggaagcaaggcaggagcgcactggggctacttggattcccggggcagacacatatgtaccctgcacaccctcaaatgagcaaagccaccccactggcccctgggtgaggccatgtggacccccacacctttggggccggctgggcaaaccttgaacccccaatttctgcgtggcctttggctgccctccttctccaaggcgtgactcttactccagagactcaggcgagcacgtgtcccttaccttattttctctcaatcaaactgaaacccattgtgatcccccatagtccagtgcggtctctgttattattacgggtgtctcccttcctccccgtgcccaggacaggccatgagccagagatacaaggggccccaggcaagatgcagggctctctgctcctggctctttatcgtcgtcgggacaccctttgtccaaactcaaggaatcccgggaggtctggctttgccgctttggctgggactcaggtacctgggcatacctgcatctgtgccccctcttcgtcccagtgagacggaccctcagtatcccccccaacatagaacaggaaggtctcaagccagccccctcctccagttcaatcaccctccctcacatccacccagagaagtccagacctgtggccacttccatgccctctccagaccaggagacacctgctgctgacctcgtggaaaacttagattttgacattctgatgcttcggaagtggtggctcctcctccttcacccctccgccacctgtgggcctcctctctgcatctcaagagaacaaccagatctttgggctcctggggtgtgtgccatgcaatttagacgaagtgctttgaaaatatgccattcagtctctgactaggaaaataagtctgacctgataggtccgatgtcatcagctcttcaacatgagacaaaagaggggattttatgttttgagtcattagaatgatataataattttctgaattgacatctggatgttgaaattaggatggtgcaaaaggggtccagggcctcaggctgggcgcagcagccagctcccaatgacgcagaagctgcttcaaaaccccctcaacaaagaggggcacatgcaagtcaccaaagtgggaagccttcaccaaggccacacccaaagtctactgattgtctgtccaaagttcgttgattcctggccatgaacaagcacaatagaaaaagacacagggtcctagtggctacaagtcaatgtgaattggcacatggtctagcagttttaaaatctgacagtagagtatggcaatgggcaagggccaagaagtcctgagatgggaggtcagcgctctaactgggctcagtggaggtctgtgaccagtgtctggacactagctacaggggaccgggcagaggattctgggcagaaggaaaatgtctaaaagtactttgggagggtaaaggacaggggccttatttaaaataaagactgaaggataataagtgtcacccaggtttgtggattattggagggggcaccatctagccattctccacttttccagtgtggagaac

SEQ ID NO: 302614 - DNA, 9879 bp, Homo sapiens
  misc_feature (4346)..(4346): n is a, c, g, or t
  misc_feature (9360)..(9360): n is a, c, g, or t
  misc_feature (9362)..(9362): n is a, c, g, or t
  misc_feature (9365)..(9365): n is a, c, g, or t
  misc_feature (9368)..(9369): n is a, c, g, or t
  misc_feature (9372)..(9372): n is a, c, g, or t
  misc_feature (9375)..(9376): n is a, c, g, or t
  misc_feature (9382)..(9382): n is a, c, g, or t
  misc_feature (9384)..(9384): n is a, c, g, or t
  misc_feature (9390)..(9390): n is a, c, g, or t
  misc_feature (9393)..(9393): n is a, c, g, or t
  misc_feature (9401)..(9401): n is a, c, g, or t
  misc_feature (9403)..(9403): n is a, c, g, or t
  misc_feature (9420)..(9421): n is a, c, g, or t
  misc_feature (9427)..(9427): n is a, c, g, or t
  misc_feature (9431)..(9432): n is a, c, g, or t
  misc_feature (9434)..(9435): n is a, c, g, or t
  misc_feature (9441)..(9441): n is a, c, g, or t
  misc_feature (9446)..(9447): n is a, c, g, or t
  misc_feature (9450)..(9450): n is a, c, g, or t
  misc_feature (9452)..(9452): n is a, c, g, or t
  misc_feature (9458)..(9458): n is a, c, g, or t
  misc_feature (9461)..(9461): n is a, c, g, or t
  misc_feature (9463)..(9464): n is a, c, g, or t
  misc_feature (9486)..(9487): n is a, c, g, or t
ggggttggagagagtggggggcggcggcacagtgggccggggaggagagagccgcagagggaaaccgattttaagatgaaggtcgcccccgataagacatgcatgcagttctccatccgccgccccaagctgccgtcctccgagacgcaccccgaggagagcatgtacaagaggctcggcgtctccgcctggctcaaccacctgaatgagctgggccaggtggaggaggagtacaagctgcggaaggccattttctttggcggtattgatgtgtcaatccgcggggaggtctggcccttcctgctgcgctattacagccacgagtccacgtcggaggagcgggaggcgctgcggctgcagaagcgaaaggagtactctgagatccagcagaaaaggctctccatgactcccgaggagcacagagcgttctggcgtaatgtgcagttcactgtggacaaagacgtggtccggacagatcggaacaaccagttcttccggggggaagacaatcccaatgtggagagcatgaggaggatcctgctgaactacgccgtgtacaaccctgccgtcggctattcccaagggatgtcggacctggtggcgcccatcttggccgaggtcctggatgagtcagacaccttctggtgctttgtgggtttgatgcagaacacgatcttcgtcagctcaccccgggacgaggacatggagaaacaactgctgtacctgcgcgagctgctgcggctgacgcacgtgcgcttctaccagcacctggtctcgctgggcgaggacggcctgcagatgctcttctgccaccgctggctccttctgtgcttcaagcgggagttccccgaggccgaagcgctgcggatctgggaggcctgctgggcccactaccagacggactacttccaccttttcatctgcgtggccatcgtggccatctacggggatgacgtcatcgagcagcagctggccacggaccagatgctcctgcacttcggaaacctggccatgcacatgaacggggagctcgttctccggaaggcgaggagtttgctgtaccagttccgcctcctgccccggatcccctgcagcctgcacgatctgtgtaagctgtgcgggtcaggcatgtgggacagcggctccatgcccgcggtggagtgcaccggccaccatcccggctcggagagctgtccctacgggggcacggtggagatgccttcccccaagtccctgagggaaggcaagaagggcccaaagacgccgcaggacggcttcggcttccgcagataggtcgggcccccgacaccggacaggggttgaggggacctcctcagaggccctgggcacgggagggggtggggctgggcgtgaaggggacaggggacggtagaaacctaaggaaaatgcttttgggcaacatgagaggaaccttttcatattaatgacaaaattagagtctggaagtgacagaagtcagatctacagccacccagaggaaagtcagctcctgaaacgctgcagtggaacgcgcagccaccgcacctgagacgcaggctggctgggctctcctgctggctgccctggaggatttcaacatgtcccaggatttgctccaccctcgagggcagccagacagcgtcgccaggcaatgaggaaagcagagacaggagaggaaggcctcactcacccactgcgtcgagggctgcagaacacagcggggtcctgtccaggcccagggacatctttgcaagccagacacacttcctcttgagacctcgttctctcggagtgagccaaacacacttcccaaaacgtccccagccacagctgggatgccgatggaaaggcatctgccataaaagaaaagcaaaagataaaaagcccaaccgatgtggggatagagaggcggaagagcagtcaggcttgaggagctggcgcttgtaatgtttatccgtttaaacatttcgtcctcctggtacacgaagggaactgtctgcccaggagcctgagcctcaggctgttggagaagcatctgatgcctttttctttgctgggggtcttctacgtgaggttccttggcgttgtttaaggtcaactccaccaaatacagcaaccagctggggcttgaatgggtcgatgtgtgcgtgtgtccctgcgtgcatgcatgcatgcacacgtgcgtgcgtgtttgtgtttgcaagatcctctgacaatgatctgctttgtcccagggacgtggtagtgtattagctgaccaaccaagacaaggacacctggaaatagttagactcttccacttcccttcaggacctgtgaactcagatatgtaagtcagcttctcaggtggtcggacgtgagagcgaccacagtgaaggagccagcactcagggctctctgccttctatgtgggaatgaggtcttcccaacagactctccctcttccaaaagattgtgtatcagttgctccttctgggatttagagatggacagaaaagggtgtgcgatctatgctgtgagaactcccagccagcttagaagtgtcgagccatttgcacagaaagccactccttgagcgaggagaccaaatccctcctgaaatcctccatcgcgtccttctggggagaaaaacccttgatgtgctgagaaccatcatggggaccaggatagaaggcttcttcccactcaaagcttttctccctggagggtgggcactgctgggccatgccacttcaaagcagtgttcctcagcaggaaagcggaggtcaccacttaccggcctcctccaccttctcggcttctcttttctccatgaacccaggtcgtccagcaggtacttccaagttcccaggtctgtctgcctaagagccttttgaggagaccgtcctggagccccatcagtgcccagatcctggggtaccgaccattgctgtctagcagtgggggatcctgtggtgggaatggggtgggcttctcatccatgttgcttctgggaagagagggttgcctttctgggctagggaggtggctggagcttctgccctgaccctccgctagaaaccagttatatccattgccacagcaatactgtgtaacaaatccgccaacactcggtggcctgcaacagtcagcactgatctagggcaggagtcagcagtctgggcagggtgattcttctggtctaggctgtgcttgtttgtttagggccagtgggttgttaagtcccaggggatgctcatggtgcagaggtcggacctggccctgctctgtggtctcttgcatccctcctgcaggccagccatggcacagccaaaggcacggagggagagacagcaagtgcctttccaagccttggtggacaccacacctgcagctctccccttggccacagcaagtcacgtggctgggctcagcattaaggggtgggggacaggcctgccactttattgtccgctctgcacagtcgggtggcagtaggctgagaatttggagggctaaacaactgggactctggagagtctgtgtcctaataatgcctgctttggagcactccttccccacccgcctgctccaggggaatagcgtccctggtcctagcatttcactagatacctcgtgcctttgaaccgctgtgtttgggagggaggaagaggatagacaggtccagggctcccctcacttgggaaggtcctagtagaaggcattccttctgagtctcctggccctacagcttctcacccctgctgctccccaagacctgacccggaccaatcagctgcatctctgcaccaagtgccacccccaccgtgcactgctcgcacctcacgctccccatgggctggcccggaccccagtgaggtctgcacctctcggaccagccaggacctcggaagccatgacctgggtgttcagggcttggcggaggagacgctgctccgcgggggatggagaagccccgcccctccacaactcccttaatctggatgcaattagaggaaaccagccaaaaaccccgcggcagctgttgccccgggattattcccagccagcgagaggcattagggcgataattcagtcattagacttctagccttcccaccgccagaacgtgcaaataggggataatcagccctgcacggccatcctcagcaatgctgcttatttaacccattttttaaaatgacacttaatgttattggctggcgtacgtgtgtgcgcatacttaaaagttgatgcgtggtgcagctctgctgctaatgtctgctgacagcgtcgcccgatgttgctcagggcctctgggaagaggggacacctttgatgtgggcgtgctggcacccaagaggcancgtggtcaggctcgatgcttgccagccctggaaggtcccgccagggttggggggtcgggtgagcactcagagatctggggaggaagcgaggagcctggtgtcctcaccaggtgcagaggggaaatgcgtactgctccagaaggttctgactcaagtctcggccctgaggactcagaactcacaagtcatggatcaagtacagagggagggagggccccagcccacccctgcgggggaggaggagggtctgaaggtgggagggcagctccatgagcagccactgttcctgaccagccgaagtgccaggcagggggaggtttccatgtccaggagggagaggacctccaccctctgacctttcagttttccatagcagcccagtgtgaagctcggcgggggtgggcagggcatcaggacaagatgaagatgctggctctggaatgaggactccccttgggctaaggggtagtggctggcagaggttgcccagctcttttggaggccacagggaatagaggtggggtggtgcttccgttcctgtgaggcccgcccccctgagccccctcgtctgcttcttgtttggcagaaatagatgtggggcacagcccctagatgatgggaatctgcccaagctgtgccctctggggaatgaaatcttgctcctcgtgcagcttcccctttcccttgcggggtgggggctgggggtgccaaggctccacccttggagggggttgctgggggtgccaaggctccaccctttgctcgctgggcagagggaaggaagcacctccctgtatgctctgcaggggcccctgcaggccactttgcctcagaggaaggaggagaggtcccctgggaaaatgcgcacacacacacacacacacacacacacacacacacgcacatgcacacacgcacgcatgcacacacacacacacatatgtgcaggggtgcagcctaagtcagtggagccaggactggctgcgcagctgggcctgccccattcttggagtccccagggaatgagcctcaggatccacttcgtcccttgtttctaagccaggctgcacggccgttcctgggtgtgaaagcattctgtcctgtctccagtcagagggaaccgcccccaaactagaaagctaatttcccccgaaggttcatgaagccagaggcatgcccttgggggttggtcgggagaagggtgagaggcagtgctgtggaaggggcctggcccctgctgcctgcgattctccccgggtatgtggccttctgcctccttcagcctcagtttcctcacctgtaacatgagaataatgatgcctgcctgcccaggccacctcctgggactgcagtggggactctaagtgtaaaactgtcatgaggatggtttatgaagtcccagggaccacacctgccactcagggaagagaccgctgacctcagccatcagccgtgtgcatcgtgaggggcagcgagctcaggacggagagctctcccttggttcggagtcagcacacctgcactcccacacgcccacccagctgtgtgtcctccgccgagggcgagcctctctgtgactcttctgtaaaatgcaccccattctgcccactcctgccacgagacccatcctctgcgatcccgccaggcatgtgtgtgtgaatgcatgtgcaaagctctccatcagaagggtggtgtgggccctgcaggtcctacccctcggccttgaagctccctcgggctgcggactctgcctcctgggtctgagcattagaaccaggagaggggtgtccctgggcagagccaggggtgcaaacagcctgcagccatctggccttttaagtatagtgtgtcgcatttccgggtaggaaggtagcatttcaagttcaaagagaggtcaagtcatgcaaccatctttcctccagcacttttggggtaaggaggacagtttttgttatggtttaggggaaattttcatgaaatttccaccattaccaatagattactgatgtccatggcaagtgatctgttcttggtattttgttttgttttgttttggtttttaaatgtaatcacccattggtcaggcccaggactggtcaccatgagctctgctagccacggccccaacgatgcttccggctctcatggattccacagcaaataaaactgtactgacaacagatgcacgctgtacagtgcctctggaaggtgcggtgggacttgctgggtcaaagcacggcaggctctgtgctgggcaaacagggccccgcggcagcccaagggcagcctgcagacgccagtgtgcccggcttctcccatgttctgagatgggggaggggaaggtgtaaaagagagctggatgggggctgtggggactgagggtcctgggaggctggccaggggctcagcaagcgcccactttgggaggccttgccctctgggctgtggttggacagcactaggcctgcaggctgggctgccaggaggaagagcagctccggacctcaggcccccccagcaggcggcgatggagggtgatgggagaattgacgagtgctcgcggggtctcactcgggaaagggccggttaactctgagcaactgggagcctcgctcccaccccagtgcctggaaacacaaacagtattttattgagccttggctgccggggctctggtttcaggaaaagcctcagtcctgcatttgtgaatttttaaggaggcaaacaaggtgaatttgaccttcctaggagtgggagttagggaaaattcaggctgccctaccaagcccttggaaccgtgcagcaggggtcaggggagggatgggcaaaggcggtttggcccatggagcaggtctcctggtcctcccggagcacggggggcggggagctccagctcttcatcaagcgccctttggggtttccaactgttttctgttgttctctgtgtgtcttttccccttttgcctgggggcgggggctggaggggaacatacctcttatctacatcactcgggtctcatgtctgaagggcctgtctcacctgccacctacctggccttggcctcgacatctgagcgcctcatcacctcctctccacatgcccaggggtgcccctcccaaggctggctgggcaggtcccacggactaggccccaggaggagcagtgggcttcccccaggaaagagcagagccagcactgcctgcctggggagggcacccactaccaggcatggctggtggctccgtttaaagaaatctttgtccatgtgggagtgggaggtgcttccccatcctgcctggaagccacgtcctggctcttaccgtggactctgcaacagccgtggtggccacatgaagatggagaaacctggtggctcaggggcccctgatgtcaccgcctccaaggcaacgggactgggcagggcagctcctcaggaaggatgatcccacctgcacgggtcagccctgcagggggacaaggcccaccacaaccccacctcaggccaccaactggacctgtcctgccaagaaggtcccttccaatttgtccggcagctggttccctggatacagcccagacgcagcatcatcctcatgttcacctctgctgtgccctacttcccccgtaaatgacaactgtgtagtcacccacgccgggcaagagaacataggtgccacctggcgggccacacttttcaggggccgtgcctcgggcaggcccggctctctgttgtcccgcagccctcagggctggcggtggctgctcagtgcctagggagtgcccttgccacacagctgggcagcgagcatgactcagcgtttacactcaaccagccgcacaggctccagaggggaagttctctggggtccttctatgagagagcatcctgtctgcagccctgttctggctccttccacatcattcatgcattcatcccacgaggactatggtaccgtgggctcgctctagggaagcaaggcaggagcgcactggggctacttggattcccggggcagacacatatgtaccctgcacaccctcaaatgagcaaagccaccccactggcccctgggtgaggccatgtggacccccacacctttggggccggctgggcaaaccttgaacccccaatttctgcgtggcctttggctgccctccttctccaaggcgtgactcttactccagagactcaggcgagcacgtgtcccttaccttattttctctcaatcaaactgaaacccattgtgatcccccatagtccagtgcggtctctgttattattacgggtgtctcccttcctccccgtgcccaggacaggccatgagccagagatacaaggggccccaggcaagatgcagggctctctgctcctggctctttatcgtcgtcgggacaccctttgtccaaactcaaggaatcccgggaggtctggctttgccgctttggctgggactcaggtacctgggcatacctgcatctgtgccccctcttcgtcccagtgagacggaccctcagtatcccccccaacatagaacaggaaggtctcaagccagccccctcctccagttcaatcaccctccctcacatccacccagagaagtccagacctgtggccacttccatgccctctccagaccaggagacacctgctgctgacctcgtggaaaacttagattttgacattctgatgcttcggaagtggtggctcctcctccttcacccctccgccacctgtgggcctcctctctgcatctcaagagaacaaccagatctttgggctcctggggtgtgtgccatgcaatttagacgaagtgctttgaaaatatgccattcagtctctgactaggaaaataagtctgacctgataggtccgatgtcatcagctcttcaacatgagacaaaagaggggattttatgttttgagtcattagaatgatataataattttctgaattgacatctggatgttgaaattaggatggtgcaaaaggggtccagggcctcaggctgggntntgnttnnttnttnntatttntntgatgnttntttttttncncctccaccaagaggggnncattcnattnncnnaatttngtttnnttntntttttnttntnnttttttcttctttttttttttnntaagttcgttgattcctggccatgaacaagcacaatagaaaaagacacagggtcctagtggctacaagtcaatgtgaattggcacatggtctagcagttttaaaatctgacagtagagtatggcaatgggcaagggccaagaagtcctgagatgggaggtcagcgctctaactgggctcagtggaggtctgtgaccagtgtctggacactagctacaggggaccgggcagaggattctgggcagaaggaaaatgtctaaaagtactttgggagggtaaaggacaggggccttatttaaaataaagactgaaggataataagtgtcacccaggtttgtggattattggagggggcaccatctagccattctccacttttccagtgtggagaac

SEQ ID NO: 302615 - DNA, 866 bp, Homo sapiens
ggtctcccaggaacgtgagtgatagggtgggataagtgcagtcattaaaccaagcactcgggcctcggagctgcggggctcgttagctcacatgtcaaggttttagaattctcgttcaacagacttaactaggcgctgacgtcccacagctgaaggctggggctgggagcagggcctggaggggtgaaggcatccggagactgtgtcccacttgggatctgctaacccgggactgggctcagctctctctccaggaggctgggactgggtgaagcccctgggctgtgctcagctcccctccagaacgctgggccagggccaaggcctcattacccactgggctgcaacttgctctccttcctgggacgctggagcctgtgaggctgagttaatatcaaggagagccttggatacacgccacccatccgccgcatccggggagggtctgcagccggcagcagccgcccagctcccgtccagggaacgggggttgggaggaagggtggcttcctgcagtgtgtgcgccacacgatgcctctgggtgccacccgctgaccccggctgggtgctcggctccacacaggctctccatgactcccgaggagcacagagcgttctggcgtaatgtgcagttcactgtggacaaagacgtggtccggacagatcggaacaaccagttcttccggggggaagacaatcccaatgtggagagcatgaggtactccctccccagccagctcctttcccatctgcaagtctgcaagcctcacctgaccgctctgggaagtggatgagcccccagcgagtttctgcaggggctctcttccaggttcatacatcaaagccccagaagtgaaggatacgct

SEQ ID NO: 302616 - DNA, 1155 bp, Homo sapiens
ggggttggagagagtggggggcggcggcacagtgggccggggaggagagagccgcagagggaaaccgattttaagatgaaggtcgcccccgataagacatgcatgcagttctccatccgccgccccaagctgccgtcctccgagacgcaccccgaggagagcatgtacaagaggctcggcgtctccgcctggctcaaccacctgaatgagctgggccaggtggaggaggagtacaagctgcggaaggccattttctttggcggtattgatgtgtcaatccgcggggaggtctggcccttcctgctgcgctattacagccacgagtccacgtcggaggagcgggaggcgctgcggctgcagaagcgaaaggagtactctgagatccagcagaaaaggctctccatgactcccgaggagcacagagcgttctggcgtaatgtgcagttcactgtggacaaagacgtggtccggacagatcggaacaaccagttcttccggggggaagacaatcccaatgtggagagcatgaggaggatcctgctgaactacgccgtgtacaaccctgccgtcggctattcccaagggatgtcggacctggtggcgcccatcttggccgaggtcctggatgagtcagacaccttctggtgctttgtgggtttgatgcagaacacgatcttcgtcagctcaccccgggacgaggacatggagaaacaactgctgtacctgcgcgagctgctgcggctgacgcacgtgcgcttctaccagcacctggtctcgctgggcgaggacggcctgcagatgctcttctgccaccgctggctccttctgtgcttcaagcgggagttccccgaggccgaagcgctgcggatctgggaggcctgctgggcccactaccagggggctgatgtctgatgaaagcgagtctgaagccaccgagtgccggtaccacacgccgcctttgcatgcggtcatcggctcgcccctggcccgggtctaggtttccctcctggctcagcctgctggacgtggacgtgcagggtggacgatctgcattaacgaagggaagcacggcatggacggtctgagaggcttcattcccaccactcccgaattaaaaaaaatcgtgcctcattgcacgttttcccagtggcagat

SEQ ID NO: 302617 - DNA, 416 bp, Homo sapiens
tcgacgcatccaggagggctggacccttttgcaggagctggctctatccaccacggcagctccagcagcctccgtcagagaaccctgaagatggaggcaaacacccatctgctggaagacatttgcgtcagcgtctcctgtcctcactcacaccgcagggggctgatgtctgatgaaagcgagtctgaagccaccgagtgccggtaccacacgccgcctttgcatgcggtcatcggctcgcccctggcccgggtctaggtttccctcctggctcagcctgctggacgtggacgtgcagggtggacgatctgcattaacgaagggaagcacggcatggacggtctgagaggcttcattcccaccactcccgaattaaaaaaaatcgtgcctcattgcacgttttcccagtggcagat

SEQ ID NO: 302618 - DNA, 6466 bp, Homo sapiens
  misc_feature (4287)..(4287): n is a, c, g, or t
ggggttggagagagtggggggcggcggcacagtgggccggggaggagagagccgcagagggaaaccgattttaagatgaaggtcgcccccgataagacatgcatgcagttctccatccgccgccccaagctgccgtcctccgagacgcaccccgaggagagcatgtacaagaggctcggcgtctccgcctggctcaaccacctgaatgagctgggccaggtggaggaggagtacaagctgcggaaggccattttctttggcggtattgatgtgtcaatccgcggggaggtctggcccttcctgctgcgctattacagccacgagtccacgtcggaggagcgggaggcgctgcggctgcagaagcgaaaggagtactctgagatccagcagaaaaggctctccatgactcccgaggagcacagagcgttctggcgtaatgtgcagttcactgtggacaaagacgtggtccggacagatcggaacaaccagttcttccggggggaagacaatcccaatgtggagagcatgaggaggatcctgctgaactacgccgtgtacaaccctgccgtcggctattcccaagggatgtcggacctggtggcgcccatcttggccgaggtcctggatgagtcagacaccttctggtgctttgtgggtttgatgcagaacacgatcttcgtcagctcaccccgggacgaggacatggagaaacaactgctgtacctgcgcgagctgctgcggctgacgcacgtgcgcttctaccagcacctggtctcgctgggcgaggacggcctgcagatgctcttctgccaccgctggctccttctgtgcttcaagcgggagttccccgaggccgaagcgctgcggatctgggaggcctgctgggcccactaccagacggactacttccaccttttcatctgcgtggccatcgtggccatctacggggatgacgtcatcgagcagcagctggccacggaccagatgctcctgcacttcggaaacctggccatgcacatgaacggggagctcgttctccggaaggcgaggagtttgctgtaccagttccgcctcctgccccggatcccctgcagcctgcacgatctgtgtaagctgtgcgggtcaggcatgtgggacagcggctccatgcccgcggtggagtgcaccggccaccatcccggctcggagagctgtccctacgggggcacggtggagatgccttcccccaagtccctgagggaaggcaagaagggcccaaagacgccgcaggacggcttcggcttccgcagataggtcgggcccccgacaccggacaggggttgaggggacctcctcagaggccctgggcacgggagggggtggggctgggcgtgaaggggacaggggacggtagaaacctaaggaaaatgcttttgggcaacatgagaggaaccttttcatattaatgacaaaattagagtctggaagtgacagaagtcagatctacagccacccagaggaaagtcagctcctgaaacgctgcagtggaacgcgcagccaccgcacctgagacgcaggctggctgggctctcctgctggctgccctggaggatttcaacatgtcccaggatttgctccaccctcgagggcagccagacagcgtcgccaggcaatgaggaaagcagagacaggagaggaaggcctcactcacccactgcgtcgagggctgcagaacacagcggggtcctgtccaggcccagggacatctttgcaagccagacacacttcctcttgagacctcgttctctcggagtgagccaaacacacttcccaaaacgtccccagccacagctgggatgccgatggaaaggcatctgccataaaagaaaagcaaaagataaaaagcccaaccgatgtggggatagagaggcggaagagcagtcaggcttgaggagctggcgcttgtaatgtttatccgtttaaacatttcgtcctcctggtacacgaagggaactgtctgcccaggagcctgagcctcaggctgttggagaagcatctgatgcctttttctttgctgggggtcttctacgtgaggttccttggcgttgtttaaggtcaactccaccaaatacagcaaccagctggggcttgaatgggtcgatgtgtgcgtgtgtccctgcgtgcatgcatgcatgcacacgtgcgtgcgtgtttgtgtttgcaagatcctctgacaatgatctgctttgtcccagggacgtggtagtgtattagctgaccaaccaagacaaggacacctggaaatagttagactcttccacttcccttcaggacctgtgaactcagatatgtaagtcagcttctcaggtggtcggacgtgagagcgaccacagtgaaggagccagcactcagggctctctgccttctatgtgggaatgaggtcttcccaacagactctccctcttccaaaagattgtgtatcagttgctccttctgggatttagagatggacagaaaagggtgtgcgatctatgctgtgagaactcccagccagcttagaagtgtcgagccatttgcacagaaagccactccttgagcgaggagaccaaatccctcctgaaatcctccatcgcgtccttctggggagaaaaacccttgatgtgctgagaaccatcatggggaccaggatagaaggcttcttcccactcaaagcttttctccctggagggtgggcactgctgggccatgccacttcaaagcagtgttcctcagcaggaaagcggaggtcaccacttaccggcctcctccaccttctcggcttctcttttctccatgaacccaggtcgtccagcaggtacttccaagttcccaggtctgtctgcctaagagccttttgaggagaccgtcctggagccccatcagtgcccagatcctggggtaccgaccattgctgtctagcagtgggggatcctgtggtgggaatggggtgggcttctcatccatgttgcttctgggaagagagggttgcctttctgggctagggaggtggctggagcttctgccctgaccctccgctagaaaccagttatatccattgccacagcaatactgtgtaacaaatccgccaacactcggtggcctgcaacagtcagcactgatctagggcaggagtcagcagtctgggcagggtgattcttctggtctaggctgtgcttgtttgtttagggccagtgggttgttaagtcccaggggatgctcatggtgcagaggtcggacctggccctgctctgtggtctcttgcatccctcctgcaggccagccatggcacagccaaaggcacggagggagagacagcaatcacgtggctgggctcagcattaaggggtgggggacaggcctgccactttattgtccgctctgcacagtcgggtggcagtaggctgagaatttggagggctaaacaactgggactctggagagtctgtgtcctaataatgcctgctttggagcactccttccccacccgcctgctccaggggaatagcgtccctggtcctagcatttcactagatacctcgtgcctttgaaccgctgtgtttgggagggaggaagaggatagacaggtccagggctcccctcacttgggaaggtcctagtagaaggcattccttctgagtctcctggccctacagcttctcacccctgctgctccccaagacctgacccggaccaatcagctgcatctctgcaccaagtgccacccccaccgtgcactgctcgcacctcacgctccccatgggctggcccggaccccagtgaggtctgcacctctcggaccagccaggacctcggaagccatgacctgggtgttcagggcttggcggaggagacgctgctccgcgggggatggagaagccccgcccctccacaactcccttaatctggatgcaattagaggaaaccagccaaaaaccccgcggcagctgttgccccgggattattcccagccagcgagaggcattagggcgataattcagtcattagacttctagccttcccaccgccagaacgtgcaaataggggataatcagccctgcacggccatcctcagcaatgctgcttatttaacccattttttaaaatgacacttaatgttattggctggcgtacgtgtgtgcgcatacttaaaagttgatgcgtggtgcagctctgctgctaatgtctgctgacagcgtcgcccgatgttgctcagggcctctgggaagaggggacacctttgatgtgggcgtgctggcacccaagaggcancgtggtcaggctcgatgcttgccagccctggaaggtcccgccagggttggggggtcgggtgagcactcagagatctggggaggaagcgaggagcctggtgtcctcaccaggtgcagaggggaaatgcgtactgctccagaaggttctgactcaagtctcggccctgaggactcagaactcacaagtcatggatcaagtacagagggagggagggccccagcccacccctgcgggggaggaggagggtctgaaggtgggagggcagctccatgagcagccactgttcctgaccagccgaagtgccaggcagggggaggtttccatgtccaggagggagaggacctccaccctctgacctttcagttttccatagcagcccagtgtgaagctcggcgggggtgggcagggcatcaggacaagatgaagatgctggctctggaatgaggactccccttgggctaaggggtagtggctggcagaggttgcccagctcttttggaggccacagggaatagaggtggggtggtgcttccgttcctgtgaggcccgcccccctgagccccctcgtctgcttcttgtttggcagaaatagatgtggggcacagcccctagatgatgggaatctgcccaagctgtgccctctggggaatgaaatcttgctcctcgtgcagcttcccctttcccttgcggggtgggggctgggggtgccaaggctccacccttggagggggttgctgggggtgccaaggctccaccctttgctcgctgggcagagggaaggaagcacctccctgtatgctctgcaggggcccctgcaggccactttgcctcagaggaaggaggagaggtcccctgggaaaatgcgcacacacacacacacacacacacacacacacacacgcacatgcacacacgcacgcatgcacacacacacacacatatgtgcaggggtgcagcctaagtcagtggagccaggactggctgcgcagctgggcctgccccattcttggagtccccagggaatgagcctcaggatccacttcgtcccttgtttctaagccaggctgcacggccgttcctgggtgtgaaagcattctgtcctgtctccagtcagagggaaccgcccccaaactagaaagctaatttcccccgaaggttcatgaagccagaggcatgcccttgggggttggtcgggagaagggtgagaggcagtgctgtggaaggggcctggcccctgctgcctgcgattctccccgggtatgtggccttctgcctccttcagcctcagtttcctcacctgtaacatgagaataatgatgcctgcctgcccaggccacctcctgggactgcagtggggactctaagtgtaaaactgtcatgaggatggtttatgaagtcccagggaccacacctgccactcagggaagagaccgctgacctcagccatcagccgtgtgcatcgtgaggggcagcgagctcaggacggagagctctcccttggttcggagtcagcacacctgcactcccacacgcccacccagctgtgtgtcctccgccgagggcgagcctctctgtgactcttctgtaaaatgcaccccattctgcccactcctgccacgagacccatcctctgcgatcccgccaggcatgtgtgtgtgaatgcatgtgcaaagctctccatcagaagggtggtgtgggccctgcaggtcctacccctcggccttgaagctccctcgggctgcggactctgcctcctgggtctgagcattagaaccaggagaggggtgtccctgggcagagccaggggtgcaaacagcctgcagccatctggccttttaagtatagtgtgtcgcatttccgggtaggaaggtagcatttcaagttcaaagagaggtcaagtcatgcaaccatctttcctccagcacttttggggtaaggaggacagtttttgttatggtttaggggaaattttcatgaaatttccaccattaccaatagattactgatgtccatggcaagtgatctgttcttggtattttgttttgttttgttttggtttttaaatgtaatcacccattggtcaggcccaggactggtcaccatgagctctgctagccacggccccaacgatgcttccggctctcatggattccacagcaaataaaactgtactgacaac

SEQ ID NO: 302619 - DNA, 6502 bp, Homo sapiens
  misc_feature (4323)..(4323): n is a, c, g, or t
ggggttggagagagtggggggcggcggcacagtgggccggggaggagagagccgcagagggaaaccgattttaagatgaagttttcctcccgtccagcaggtcgcccccgataagacatgcatgcagttctccatccgccgccccaagctgccgtcctccgagacgcaccccgaggagagcatgtacaagaggctcggcgtctccgcctggctcaaccacctgaatgagctgggccaggtggaggaggagtacaagctgcggaaggtctggcccttcctgctgcgctattacagccacgagtccacgtcggaggagcgggaggcgctgcggctgcagaagcgaaaggagtactctgagatccagcagaaaaggctctccatgactcccgaggagcacagagcgttctggcgtaatgtgcagttcactgtggacaaagacgtggtccggacagatcggaacaaccagttcttccggggggaagacaatcccaatgtggagagcatgaggaggatcctgctgaactacgccgtgtacaaccctgccgtcggctattcccaagggatgtcggacctggtggcgcccatcttggccgaggtcctggatgagtcagacaccttctggtgctttgtgggtttgatgcagaacacgatcttcgtcagctcaccccgggacgaggacatggagaaacaactgctgtacctgcgcgagctgctgcggctgacgcacgtgcgcttctaccagcacctggtctcgctgggcgaggacggcctgcagatgctcttctgccaccgctggctccttctgtgcttcaagcgggagttccccgaggccgaagcgctgcggatctgggaggcctgctgggcccactaccagacggactacttccaccttttcatctgcgtggccatcgtggccatctacggggatgacgtcatcgagcagcagctggccacggaccagatgctcctgcacttcggaaacctggccatgcacatgaacggggagctcgttctccggaaggcgaggagtttgctgtaccagttccgcctcctgccccggatcccctgcagcctgcacgatctgtgtaagctgtgcgggtcaggcatgtgggacagcggctccatgcccgcggtggagtgcaccggccaccatcccggctcggagagctgtccctacgggggcacggtggagatgccttcccccaagtccctgagggaaggcaagaagggcccaaagacgccgcaggacggcttcggcttccgcagataggtcgggcccccgacaccggacaggggttgaggggacctcctcagaggccctgggcacgggagggggtggggctgggcgtgaaggggacaggggacggtagaaacctaaggaaaatgcttttgggcaacatgagaggaaccttttcatattaatgacaaaattagagtctggaagtgacagaagtcagatctacagccacccagaggaaagtcagctcctgaaacgctgcagtggaacgcgcagccaccgcacctgagacgcaggctggctgggctctcctgctggctgccctggaggatttcaacatgtcccaggatttgctccaccctcgagggcagccagacagcgtcgccaggcaatgaggaaagcagagacaggagaggaaggcctcactcacccactgcgtcgagggctgcagaacacagcggggtcctgtccaggcccagggacatctttgcaagccagacacacttcctcttgagacctcgttctctcggagtgagccaaacacacttcccaaaacgtccccagccacagctgggatgccgatggaaaggcatctgccataaaagaaaagcaaaagataaaaagcccaaccgatgtggggatagagaggcggaagagcagtcaggcttgaggagctggcgcttgtaatgtttatccgtttaaacatttcgtcctcctggtacacgaagggaactgtctgcccaggagcctgagcctcaggctgttggagaagcatctgatgcctttttctttgctgggggtcttctacgtgaggttccttggcgttgtttaaggtcaactccaccaaatacagcaaccagctggggcttgaatgggtcgatgtgtgcgtgtgtccctgcgtgcatgcatgcatgcacacgtgcgtgcgtgtttgtgtttgcaagatcctctgacaatgatctgctttgtcccagggacgtggtagtgtattagctgaccaaccaagacaaggacacctggaaatagttagactcttccacttcccttcaggacctgtgaactcagatatgtaagtcagcttctcaggtggtcggacgtgagagcgaccacagtgaaggagccagcactcagggctctctgccttctatgtgggaatgaggtcttcccaacagactctccctcttccaaaagattgtgtatcagttgctccttctgggatttagagatggacagaaaagggtgtgcgatctatgctgtgagaactcccagccagcttagaagtgtcgagccatttgcacagaaagccactccttgagcgaggagaccaaatccctcctgaaatcctccatcgcgtccttctggggagaaaaacccttgatgtgctgagaaccatcatggggaccaggatagaaggcttcttcccactcaaagcttttctccctggagggtgggcactgctgggccatgccacttcaaagcagtgttcctcagcaggaaagcggaggtcaccacttaccggcctcctccaccttctcggcttctcttttctccatgaacccaggtcgtccagcaggtacttccaagttcccaggtctgtctgcctaagagccttttgaggagaccgtcctggagccccatcagtgcccagatcctggggtaccgaccattgctgtctagcagtgggggatcctgtggtgggaatggggtgggcttctcatccatgttgcttctgggaagagagggttgcctttctgggctagggaggtggctggagcttctgccctgaccctccgctagaaaccagttatatccattgccacagcaatactgtgtaacaaatccgccaacactcggtggcctgcaacagtcagcactgatctagggcaggagtcagcagtctgggcagggtgattcttctggtctaggctgtgcttgtttgtttagggccagtgggttgttaagtcccaggggatgctcatggtgcagaggtcggacctggccctgctctgtggtctcttgcatccctcctgcaggccagccatggcacagccaaaggcacggagggagagacagcaagtgcctttccaagccttggtggacaccacacctgcagctctccccttggccacagcaagtcacgtggctgggctcagcattaaggggtgggggacaggcctgccactttattgtccgctctgcacagtcgggtggcagtaggctgagaatttggagggctaaacaactgggactctggagagtctgtgtcctaataatgcctgctttggagcactccttccccacccgcctgctccaggggaatagcgtccctggtcctagcatttcactagatacctcgtgcctttgaaccgctgtgtttgggagggaggaagaggatagacaggtccagggctcccctcacttgggaaggtcctagtagaaggcattccttctgagtctcctggccctacagcttctcacccctgctgctccccaagacctgacccggaccaatcagctgcatctctgcaccaagtgccacccccaccgtgcactgctcgcacctcacgctccccatgggctggcccggaccccagtgaggtctgcacctctcggaccagccaggacctcggaagccatgacctgggtgttcagggcttggcggaggagacgctgctccgcgggggatggagaagccccgcccctccacaactcccttaatctggatgcaattagaggaaaccagccaaaaaccccgcggcagctgttgccccgggattattcccagccagcgagaggcattagggcgataattcagtcattagacttctagccttcccaccgccagaacgtgcaaataggggataatcagccctgcacggccatcctcagcaatgctgcttatttaacccattttttaaaatgacacttaatgttattggctggcgtacgtgtgtgcgcatacttaaaagttgatgcgtggtgcagctctgctgctaatgtctgctgacagcgtcgcccgatgttgctcagggcctctgggaagaggggacacctttgatgtgggcgtgctggcacccaagaggcancgtggtcaggctcgatgcttgccagccctggaaggtcccgccagggttggggggtcgggtgagcactcagagatctggggaggaagcgaggagcctggtgtcctcaccaggtgcagaggggaaatgcgtactgctccagaaggttctgactcaagtctcggccctgaggactcagaactcacaagtcatggatcaagtacagagggagggagggccccagcccacccctgcgggggaggaggagggtctgaaggtgggagggcagctccatgagcagccactgttcctgaccagccgaagtgccaggcagggggaggtttccatgtccaggagggagaggacctccaccctctgacctttcagttttccatagcagcccagtgtgaagctcggcgggggtgggcagggcatcaggacaagatgaagatgctggctctggaatgaggactccccttgggctaaggggtagtggctggcagaggttgcccagctcttttggaggccacagggaatagaggtggggtggtgcttccgttcctgtgaggcccgcccccctgagccccctcgtctgcttcttgtttggcagaaatagatgtggggcacagcccctagatgatgggaatctgcccaagctgtgccctctggggaatgaaatcttgctcctcgtgcagcttcccctttcccttgcggggtgggggctgggggtgccaaggctccacccttggagggggttgctgggggtgccaaggctccaccctttgctcgctgggcagagggaaggaagcacctccctgtatgctctgcaggggcccctgcaggccactttgcctcagaggaaggaggagaggtcccctgggaaaatgcgcacacacacacacacacacacacacacacacacacgcacatgcacacacgcacgcatgcacacacacacacacatatgtgcaggggtgcagcctaagtcagtggagccaggactggctgcgcagctgggcctgccccattcttggagtccccagggaatgagcctcaggatccacttcgtcccttgtttctaagccaggctgcacggccgttcctgggtgtgaaagcattctgtcctgtctccagtcagagggaaccgcccccaaactagaaagctaatttcccccgaaggttcatgaagccagaggcatgcccttgggggttggtcgggagaagggtgagaggcagtgctgtggaaggggcctggcccctgctgcctgcgattctccccgggtatgtggccttctgcctccttcagcctcagtttcctcacctgtaacatgagaataatgatgcctgcctgcccaggccacctcctgggactgcagtggggactctaagtgtaaaactgtcatgaggatggtttatgaagtcccagggaccacacctgccactcagggaagagaccgctgacctcagccatcagccgtgtgcatcgtgaggggcagcgagctcaggacggagagctctcccttggttcggagtcagcacacctgcactcccacacgcccacccagctgtgtgtcctccgccgagggcgagcctctctgtgactcttctgtaaaatgcaccccattctgcccactcctgccacgagacccatcctctgcgatcccgccaggcatgtgtgtgtgaatgcatgtgcaaagctctccatcagaagggtggtgtgggccctgcaggtcctacccctcggccttgaagctccctcgggctgcggactctgcctcctgggtctgagcattagaaccaggagaggggtgtccctgggcagagccaggggtgcaaacagcctgcagccatctggccttttaagtatagtgtgtcgcatttccgggtaggaaggtagcatttcaagttcaaagagaggtcaagtcatgcaaccatctttcctccagcacttttggggtaaggaggacagtttttgttatggtttaggggaaattttcatgaaatttccaccattaccaatagattactgatgtccatggcaagtgatctgttcttggtattttgttttgttttgttttggtttttaaatgtaatcacccattggtcaggcccaggactggtcaccatgagctctgctagccacggccccaacgatgcttccggctctcatggattccacagcaaataaaactgtactgacaac

SEQ ID NO: 302620 - DNA, 1172 bp, Homo sapiens
gccttggtgtgtgcataaggccacatgacctcaggtcaggaataaaagcttagggctgagcagctcactctttggttgagaatccagttggctcccctggagtgaagttctacacagaccctggaggaaccaccccatctgtttgttggagactgaaccgttgcaaggaacagacgaagatgcagtagccagtgctgacttctctagcatgctctctgaggaggaaaaggaagagttaaaagcagagttagttcagctagaagacgaaattacaacactacgacaagttttgtcagcgaaagaaaggcatctagttgagataaaacaaaaactcggcatgaacctgatgaatgaattaaaacagaacttcagcaaaagctggcatgacatgcagactaccactgcctacaagaaaacacatgaaaccctgagtcacgcagggcaaaaggcaactgcagctttcagcaacgttggaacggccatcagcaagaagttcggagacatgagacgaaagtaggcggtacgaaccctaatggaggcagttttgaggaggtcctcagctccacggcccatgccagtgcccagagcttggcaggaggctcccggcggaccaaggaggaggagctgcagtgctaagtccagccagcgtgcagctgcatccagaaaccggccactacccagcccatctctgcctgtgcttatccagataagaagaccaaaatcccgctgggaaaaacccaggccttgacattgttattcaaatggcccctccagaaagtttaatgatttccatttgtatttgtgttgatgatggaccacttgaccatcacatttcagtattcatagatgactgtcacattttaaaatgttcccacttgagcaggtacacaactggtcataattcctgtctgtgtaattcgatgtatatttttccaaacatgtagctattgtttgctttgatttttgcttggcctcctttatgatgtgcatgtccttgaaggctgaatgaacagtccctttcagttcagcagatcaacaggatggagctcttcatgactgtctccagcaataggatgatttactataaatttcatccaactacttgtgatctctctcacctacatcaattatgtatgttaatttcagcaattaaaagaattgattttaatgac

SEQ ID NO: 302621 - DNA, 1310 bp, Homo sapiens
cttggtttgggccaggtggactggaaggggcggaggtaaccagaagcggctagtggcggctgcctgcgtccccaaccccctccgcgcagcgctcgcgacacgcgtgccaggagtgggagcgagcggcggggccagctgcgttctgagcctgggcgcagctgccatctgctctgggaagcaccagggtgtccccgccgccctcagctcgaagtcagccaccatggaggcgcaggcacaaggtttgttggagactgaaccgttgcaaggaacagacgaagatgcagtagccagtgctgacttctctagcatgctctctgaggaggaaaaggaagagttaaaagcagagttagttcagctagaagacgaaattacaacactacgacaagttttgtcagcgaaagaaaggcatctagttgagataaaacaaaaactcggcatgaacctgatgaatgaattaaaacagaacttcagcaaaagctggcatgacatgcagactaccactgcctacaagaaaacacatgaaaccctgagtcacgcagggcaaaaggcaactgcagctttcagcaacgttggaacggccatcagcaagaagttcggagacatgagttactccattcgccattccataagtatgcctgctatgagacgaaagtaggcggtacgaaccctaatggaggcagttttgaggaggtcctcagctccacggcccatgccagtgcccagagcttggcaggaggctcccggcggaccaaggaggaggagctgcagtgctaagtccagccagcgtgcagctgcatccagaaaccggccactacccagcccatctctgcctgtgcttatccagataagaagaccaaaatcccgctgggaaaaacccaggccttgacattgttattcaaatggcccctccagaaagtttaatgatttccatttgtatttgtgttgatgatggaccacttgaccatcacatttcagtattcatagatgactgtcacattttaaaatgttcccacttgagcaggtacacaactggtcataattcctgtctgtgtaattcgatgtatatttttccaaacatgtagctattgtttgctttgatttttgcttggcctcctttatgatgtgcatgtccttgaaggctgaatgaacagtccctttcagttcagcagatcaacaggatggagctcttcatgactgtctccagcaataggatgatttactataaatttcatccaactacttgtgatctctctcacctacatcaattatgtatgttaatttcagcaattaaaagaattgattttaatgac

SEQ ID NO: 302622 - DNA, 998 bp, Homo sapiens
  misc_feature (830)..(830): n is a, c, g, or t
acatctctgccttctcattttctcttaatttttttctttttttggcttcttggtattctttgctttcttggagctcgtcacacatttaggaggatttttgtcttttctggaatttttagttgttttttggtgggagggtctgtcagtgcatctagtcctccacactatggaagcagaagttggtttaaattcactttaaaaattgccttctgttttatcaattctgcctaaaggtttgttggagactgaaccgttgcaaggaacagacgaagatgcagtagccagtgctgacttctctagcatgctctctgaggaggaaaaggaagagttaaaagcagagttagttcagctagaagacgaaattacaacactacgacaagttttgtcagcgaaagaaaggcatctagttgagataaaacaaaaactcggcatgaacctgatgaatgaattaaaacagaacttcagcaaaagctggcatgacatgcagactaccactgcctacaagaaaacacatgaaaccctgagtcacgcagggcaaaaggcaactgcagctttcagcaacgttggaacggccatcagcaagaagttcggagacatgagacgaaagtaggcggtacgaaccctaatggaggcagttttgaggaggtcctcagctccacggcccatgccagtgcccagagcttggcaggaggctcccggcggaccaaggaggaggagctgcagtgctaagtccagccagcgtgcagctgcatccagaaaccggccactacccagcccatctctgcctgtgcttatccagataagaagaccaaaatcccgctgggaaaccngcttgcttgttttatggcctccgaagttatggttccttgtttggtgtttgcctggctccttgtctaataggcttaatcctggggccacggttccgggtggtttcccgtgtgtgtggcctttttggggctccgggcgcgttctttcttatcttcacgttcttgtccgcc

SEQ ID NO: 302623 - DNA, 1271 bp, Homo sapiens
cttggtttgggccaggtggactggaaggggcggaggtaaccagaagcggctagtggcggctgcctgcgtccccaaccccctccgcgcagcgctcgcgacacgcgtgccaggagtgggagcgagcggcggggccagctgcgttctgagcctgggcgcagctgccatctgctctgggaagcaccagggtgtccccgccgccctcagctcgaagtcagccaccatggaggcgcaggcacaaggtttgttggagactgaaccgttgcaaggaacagacgaagatgcagtagccagtgctgacttctctagcatgctctctgaggaggaaaaggaagagttaaaagcagagttagttcagctagaagacgaaattacaacactacgacaagttttgtcagcgaaagaaaggcatctagttgagataaaacaaaaactcggcatgaacctgatgaatgaattaaaacagaacttcagcaaaagctggcatgacatgcagactaccactgcctacaagaaaacacatgaaaccctgagtcacgcagggcaaaaggcaactgcagctttcagcaacgttggaacggccatcagcaagaagttcggagacatgagacgaaagtaggcggtacgaaccctaatggaggcagttttgaggaggtcctcagctccacggcccatgccagtgcccagagcttggcaggaggctcccggcggaccaaggaggaggagctgcagtgctaagtccagccagcgtgcagctgcatccagaaaccggccactacccagcccatctctgcctgtgcttatccagataagaagaccaaaatcccgctgggaaaaacccaggccttgacattgttattcaaatggcccctccagaaagtttaatgatttccatttgtatttgtgttgatgatggaccacttgaccatcacatttcagtattcatagatgactgtcacattttaaaatgttcccacttgagcaggtacacaactggtcataattcctgtctgtgtaattcgatgtatatttttccaaacatgtagctattgtttgctttgatttttgcttggcctcctttatgatgtgcatgtccttgaaggctgaatgaacagtccctttcagttcagcagatcaacaggatggagctcttcatgactgtctccagcaataggatgatttactataaatttcatccaactacttgtgatctctctcacctacatcaattatgtatgttaatttcagcaattaaaagaattgattttaatgac

SEQ ID NO: 302624 - DNA, 1184 bp, Homo sapiens
gcggcttgtggctcccaagttagggagtgagaggatcgcccgccgagggggtggctccgcagcccggctgcgcgagacgcttcccgctcggggacccgccttccgaggccaggtgaacgttaccggccccctgacctccagcagatccacacgtttgttggagactgaaccgttgcaaggaacagacgaagatgcagtagccagtgctgacttctctagcatgctctctgaggaggaaaaggaagagttaaaagcagagttagttcagctagaagacgaaattacaacactacgacaagttttgtcagcgaaagaaaggcatctagttgagataaaacaaaaactcggcatgaacctgatgaatgaattaaaacagaacttcagcaaaagctggcatgacatgcagactaccactgcctacaagaaaacacatgaaaccctgagtcacgcagggcaaaaggcaactgcagctttcagcaacgttggaacggccatcagcaagaagttcggagacatgagacgaaagtaggcggtacgaaccctaatggaggcagttttgaggaggtcctcagctccacggcccatgccagtgcccagagcttggcaggaggctcccggcggaccaaggaggaggagctgcagtgctaagtccagccagcgtgcagctgcatccagaaaccggccactacccagcccatctctgcctgtgcttatccagataagaagaccaaaatcccgctgggaaaaacccaggccttgacattgttattcaaatggcccctccagaaagtttaatgatttccatttgtatttgtgttgatgatggaccacttgaccatcacatttcagtattcatagatgactgtcacattttaaaatgttcccacttgagcaggtacacaactggtcataattcctgtctgtgtaattcgatgtatatttttccaaacatgtagctattgtttgctttgatttttgcttggcctcctttatgatgtgcatgtccttgaaggctgaatgaacagtccctttcagttcagcagatcaacaggatggagctcttcatgactgtctccagcaataggatgatttactataaatttcatccaactacttgtgatctctctcacctacatcaattatgtatgttaatttcagcaattaaaagaattgattttaatgac

SEQ ID NO: 302625 - DNA, 980 bp, Homo sapiens
ttctgtaagtatccttttttgctggtctgacattttcccccaccatttcccctccgccttgtagctagaagacgaaattacaacactacgacaagttttgtcagcgaaagaaaggcatctagttgagataaaacaaaaactcggcatgaacctgatgaatgaattaaaacagaacttcagcaaaagctggcatgacatgcagactaccactgcctacaagaaaacacatgaaaccctgagtcacgcagggcaaaaggcaactgcagctttcagcaacgttggaacggccatcagcaagaagttcggagacatgagacgaaagtaggcggtacgaaccctaatggaggcagttttgaggaggtcctcagctccacggcccatgccagtgcccagagcttggcaggaggctcccggcggaccaaggaggaggagctgcagtgctaagtccagccagcgtgcagctgcatccagaaaccggccactacccagcccatctctgcctgtgcttatccagataagaagaccaaaatcccgctgggaaaaacccaggccttgacattgttattcaaatggcccctccagaaagtttaatgatttccatttgtatttgtgttgatgatggaccacttgaccatcacatttcagtattcatagatgactgtcacattttaaaatgttcccacttgagcaggtacacaactggtcataattcctgtctgtgtaattcgatgtatatttttccaaacatgtagctattgtttgctttgatttttgcttggcctcctttatgatgtgcatgtccttgaaggctgaatgaacagtccctttcagttcagcagatcaacaggatggagctcttcatgactgtctccagcaataggatgatttactataaatttcatccaactacttgtgatctctctcacctacatcaattatgtatgttaatttcagcaattaaaagaattgattttaatgac

SEQ ID NO: 302626 - DNA, 1393 bp, Homo sapiens
cttggtttgggccaggtggactggaaggggcggaggtaaccagaagcggctagtggcggctgcctgcgtccccaaccccctccgcgcagcgctcgcgacacgcgtgccaggagtgggagcgagcggcggggccagctgcgttctgagcctgggcgcagctgccatctgctctgggaagcaccagggtgtccccgccgccctcagctcgaagtcagccaccatggaggcgcaggcacaaggtttgttggagactgaaccgttgcaaggaacagacgaagatgcagtagccagtgctgacttctctagcatgctctctgaggaggaaaaggaagagttaaaagcagagttagttcagctagaagacgaaattacaacactacgacaagttttgtcagcgaaagaaaggcatctagttgagataaaacaaaaactcggcatgaacctgatgaatgaattaaaacagaacttcagcaaaagctggcatgacatgcagactaccactgcctacaagaaaacacatgaaaccctgagtcacgcagggcaaaaggcaactgcagctttcagcaacgttggaacggccatcagcaagaagttcggagacatgagttactccattcgccattccataagtatgcctgctatgaggaattctcctactttcaaatcatttgaggagagggttgagacaactgtcacaagcctcaaggtacagatgaagtgaattctgtacgaaagtaggcggtacgaaccctaatggaggcagttttgaggaggtcctcagctccacggcccatgccagtgcccagagcttggcaggaggctcccggcggaccaaggaggaggagctgcagtgctaagtccagccagcgtgcagctgcatccagaaaccggccactacccagcccatctctgcctgtgcttatccagataagaagaccaaaatcccgctgggaaaaacccaggccttgacattgttattcaaatggcccctccagaaagtttaatgatttccatttgtatttgtgttgatgatggaccacttgaccatcacatttcagtattcatagatgactgtcacattttaaaatgttcccacttgagcaggtacacaactggtcataattcctgtctgtgtaattcgatgtatatttttccaaacatgtagctattgtttgctttgatttttgcttggcctcctttatgatgtgcatgtccttgaaggctgaatgaacagtccctttcagttcagcagatcaacaggatggagctcttcatgactgtctccagcaataggatgatttactataaatttcatccaactacttgtgatctctctcacctacatcaattatgtatgttaatttcagcaattaaaagaattgattttaatgac

SEQ ID NO: 302627 - DNA, 1278 bp, Homo sapiens
attaggaagcccaactcagcgattcaaatgaaattctatgcaaagaacgattataatttgggggacaaagtgacaaatacttggatgaaaaacaattatgtagagaagggtccaggagaattttatcattcacatctttgcttaaggaggtccttacctaagatattgcagtaggcagtcattaaacctacgtggttaggaatatctttgattccataccttctttgccaaattgatttcttacaaagccattccttctttattttactactctgtttagaggaaatcaagaaacaggagagaataatgaaacaaagcacagaagaaaacgtcagtgatttgtattcactgaattcaatattgtgtgttacttctattgcaaaagagaatgtgaatggaagaaaaaagaggagagagggaactattaatagagtagattacattgaattaatcttatttgtttctctcagggaagaaataagcatagtgaaaaatcacacaatggaaaccatcccttcccctgacctgttcccagtgttaagataacagagggaaggaagatcaatgctctgccagaggtccacaaactaagctgaccactttcttttgaatgacgaaagtaggcggtacgaaccctaatggaggcagttttgaggaggtcctcagctccacggcccatgccagtgcccagagcttggcaggaggctcccggcggaccaaggaggaggagctgcagtgctaagtccagccagcgtgcagctgcatccagaaaccggccactacccagcccatctctgcctgtgcttatccagataagaagaccaaaatcccgctgggaaaaacccaggccttgacattgttattcaaatggcccctccagaaagtttaatgatttccatttgtatttgtgttgatgatggaccacttgaccatcacatttcagtattcatagatgactgtcacattttaaaatgttcccacttgagcaggtacacaactggtcataattcctgtctgtgtaattcgatgtatatttttccaaacatgtagctattgtttgctttgatttttgcttggcctcctttatgatgtgcatgtccttgaaggctgaatgaacagtccctttcagttcagcagatcaacaggatggagctcttcatgactgtctccagcaataggatgatttactataaatttcatccaactacttgtgatctctctcacctacatcaattatgtatgttaatttcagcaattaaaagaattgattttaatgac

SEQ ID NO: 302628 - DNA, 1125 bp, Homo sapiens
cttggtttgggccaggtggactggaaggggcggaggtaaccagaagcggctagtggcggctgcctgcgtccccaaccccctccgcgcagcgctcgcgacacgcgtgccaggagtgggagcgagcggcggggccagctgcgttctgagcctgggcgcagctgccatctgctctgggaagcaccagggtgtccccgccgccctcagctcgaagtcagccaccatggaggcgcaggcacaaggtttgttggagactgaaccgttgcaaggaacagacgaagatgcagtagccagtgctgacttctctagcatgctctctgaggaggaaaaggaagagttaaaagcagagttagttcagctagaagacgaaattacaacactacgacaagttttgtcagcgaaagaaaggcatctagttgagataaaacaaaaactcggcatgaacctgatgaatgaattaaaacagaacttcagcaaaagctggcatgacatgcagactaccactgcctacaagaaaacacatgaaaccctgagtcacgcagggcaaaaggcaactgcagctttcagcaacgttggaacggccatcagcaagaagttcggagacatgagacgaaagtaggcggtacgaaccctaatggaggcagttttgaggaggtcctcagctccacggcccatgccagtgcccagagcttggcaggaggctcccggcggaccaaggaggaggagctgcagtgctaagtccagccagcgtgcagctgcatccagaaaccggccactacccagcccatctctgcctgtgcttatccagataagaagaccaaaatcccgctgggaaaaacccaggccttgacattgttattacgccccttgcttacagttttaccgatttcccatttattcctcgttcttgtctatggacccactctccacatcccaatgacccctacccctagaaagaaccgctccactttaaaaaactaccccacattgagacgagtatcttgaaatgagtccaaatttatagtttagaacagtaacaatacacaaatagaaagaaaccataattagtgccaattttatcttgctctgagtacacttacttttctattggtatattgtagtgatagg

SEQ ID NO: 302629 - DNA, 614 bp, Homo sapiens
atgaaattctatgcaaagaacgattataatttgggggacaaagtgacaaatacttggatgaaaaacaattatgtagagaagggtccaggagaattttatcattcacatctttgcttaaggaggtccttacctaagatattgcagtaggcagtcattaaacctacgtggttaggaatatctttgattccataccttctttgccaaattgatttcttacaaagccattccttctttattttactactctgtttagaggaaatcaagaaacaggagagaataatgaaacaaagcacagaagaaaacgtcagtgatttgtattcactgaattcaatattgtgtgttacttctattgcaaaagagaatgtgaatggaagaaaaaagaggagagagggaactattaatagagtagattacattgaattaatcttatttgtttctctcagggaagaaataagcatagtgaaaaatcacacaatggaaaccatcccttcccctgacctgttcccagtgttaagataacagagggaaggaagatcaatgctctgccagaggtccacaaactaagctgaccactttcttttgaatggtacataagctgagaatggctttacatt

SEQ ID NO: 302630 - DNA, 573 bp, Homo sapiens
ggcaaaactcaaacatgacattcatcatatggattttccattgcttactaaaaaacctgagtcaggaagaggagtgttgtgatagaaacaataaatgctaaatgaaaacttaagctacccattgctccactggctcattggaaatgatttacagtgtaccatggaattattacagttgtgtcattgccaaataccatattatttactgtattgtgtactgatcattttacctagaaaaattccatgtcaggttatggtttctgaacctaacctaacagaagtgacatacattttaaaacgtggttggtgcaggtggcaagctgacaggtagctctgtggcagaggccgtgtttacagatatgagcagaaaaccaaacagcatggttgctaagacagctaggcctttggagctgacctctctctttttgttattttaggaattctcctactttcaaatcatttgaggagagggttgagacaactgtcacaagcctcaaggtacagatgaagtgaattctgtgtgagtgggtccattgactcaggacagcttagccattgctgcggttagtttaa

SEQ ID NO: 302631 - DNA, 1371 bp, Homo sapiens
cttggtttgggccaggtggactggaaggggcggaggtaaccagaagcggctagtggcggctgcctgcgtccccaaccccctccgcgcagcgctcgcgacacgcgtgccaggagtgggagcgagcggcggggccagctgcgttctgagcctgggcgcagctgccatctgctctgggaagcaccagggtgtccccgccgccctcagctcgaagtcagccaccatggaggcgcaggcacaaggtttgttggagactgaaccgttgcaaggaacagacgaagatgcagtagccagtgctgacttctctagcatgctctctgaggaggaaaaggaagagttaaaagcagagttagttcagctagaagacgaaattacaacactacgacaagttttgtcagcgaaagaaaggcatctagttgagataaaacaaaaactcggcatgaacctgatgaatgaattaaaacagaacttcagcaaaagctggcatgacatgcagactaccactgcctacaagaaaacacatgaaaccctgagtcacgcagggcaaaaggcaactgcagctttcagcaacgttggaacggccatcagcaagaagttcggagacatgagttactccattcgccattccataagtatgcctgctatgaggaattctcctactttcaaatcatttgaggagagggttgagacaactgtcacaagcctcaagacgaaagtaggcggtacgaaccctaatggaggcagttttgaggaggtcctcagctccacggcccatgccagtgcccagagcttggcaggaggctcccggcggaccaaggaggaggagctgcagtgctaagtccagccagcgtgcagctgcatccagaaaccggccactacccagcccatctctgcctgtgcttatccagataagaagaccaaaatcccgctgggaaaaacccaggccttgacattgttattcaaatggcccctccagaaagtttaatgatttccatttgtatttgtgttgatgatggaccacttgaccatcacatttcagtattcatagatgactgtcacattttaaaatgttcccacttgagcaggtacacaactggtcataattcctgtctgtgtaattcgatgtatatttttccaaacatgtagctattgtttgctttgatttttgcttggcctcctttatgatgtgcatgtccttgaaggctgaatgaacagtccctttcagttcagcagatcaacaggatggagctcttcatgactgtctccagcaataggatgatttactataaatttcatccaactacttgtgatctctctcacctacatcaattatgtatgttaatttcagcaattaaaagaattgattttaatgac

SEQ ID NO: 302632 - DNA, 911 bp, Homo sapiens
cttggtttgggccaggtggactggaaggggcggaggtaaccagaagcggctagtggcggctgcctgcgtccccaaccccctccgcgcagcgctcgcgacacgcgtgccaggagtgggagcgagcggcggggccagctgcgttctgagcctgggcgcagctgccatctgctctgggaagcaccagggtgtccccgccgccctcagctcgaagtcagccaccatggaggcgcaggcacaaggtttgttggagactgaaccgttgcaaggaacagacgaagatgcagtagccagtgctgacttctctagcatgctctctgaggaggaaaaggaagagttaaaagcagagttagttcagctagaagacgaaattacaacactacgacaagttttgtcagcgaaagaaaggcatctagttgagataaaacaaaaactcggcatgaacctgatgaatgaattaaaacagaacttcagcaaaagctggcatgacatgcagactaccactgcctacaagaaaacacatgaaaccctgagtcacgcagggcaaaaggcaactgcagctttcagcaacgttggaacggccatcagcaagaagttcggagacatgagacgaaagtaggcggtacgaaccctaatggaggcagttttgaggaggtcctcagctccacggcccatgccagtgcccagagcttggcaggaggctcccggcggaccaaggaggaggagctgcagtgctaagtccagccagcgtgcagctgcatccagaaaccggccactacccagcccatctctgcctgtgcttatccagataagaagaccaaaatcccgctgggaaaaacccaggccttgacattgttatttaatggcctcagaaggtatgttcccttgtttgttgttaggcccctgacctcata

SEQ ID NO: 302633 - DNA, 947 bp, Homo sapiens
  misc_feature (32)..(32): n is a, c, g, or t
attctatagctatttctagcgtaacggaaaanggtcgttcgtagacgcagaaatacgctactacgacaagttttgtcagcgaaagaaaggcatctagttgagataaaacaaaaactcggcatgaacctgatgaatgaattaaaacagaacttcagcaaaagctggcatgacatgcagactaccactgcctacaagaaaacacatgaaaccctgagtcacgcagggcaaaaggcaactagacgccctaagcatcccagcgacgtttttttttcaagaagcacgaacacacgacttactccattcccctttccataagtatgcccgatatgaggaatcctcttacccgcaacacactggacgacagggctgacccactcgtctcgaacctaagaaagaatagtacgagccacaaaccgataaagaatggcatggctagaagacgcactcagcttaccctgcccaagcaaaacactcaaacactaggacaccacgctaaaccacaaaccccataccggaaaggctgactcaacataaccctactgacacagcccacagaagcaatagagcatccgacaactaacattcccattctatgacacgggtccatcgaaacttcaatactcaatccgacctacgcagcgttcaaaattgtcattgcgtagcaccgcccacatcacgtactataaccatcaacatgttcccgaacccgaccacgagaccgtacacgacaaatccatcaaacaagcctctatgaagtccctcccgacaatccagcgcaccgcacgctacgcatacattaactgccaacagcatgcatggtacaaacaaaagtatcctactcgaacgtccacaagagatgtcgggcgactgctggcggcggcagatctgaataaaagaaagaaacaatcacagaacacgctcgtttccctctaccctggcaccataca

SEQ ID NO: 302634 - DNA, 1265 bp, Homo sapiens
acatctctgccttctcattttctcttaatttttttctttttttggcttcttggtattctttgctttcttggagctcgtcacacatttaggaggatttttgtcttttctggaatttttagttgttttttggtgggagggtctgtcagtgcatctagtcctccacactatggaagcagaagttggtttaaattcactttaaaaattgccttctgttttatcaattctgcctaaaggtttgttggagactgaaccgttgcaaggaacagacgaagatgcagtagccagtgctgacttctctagcatgctctctgaggaggaaaaggaagagttaaaagcagagttagttcagctagaagacgaaattacaacactacgacaagttttgtcagcgaaagaaaggcatctagttgagataaaacaaaaactcggcatgaacctgatgaatgaattaaaacagaacttcagcaaaagctggcatgacatgcagactaccactgcctacaagaaaacacatgaaaccctgagtcacgcagggcaaaaggcaactgcagctttcagcaacgttggaacggccatcagcaagaagttcggagacatgagacgaaagtaggcggtacgaaccctaatggaggcagttttgaggaggtcctcagctccacggcccatgccagtgcccagagcttggcaggaggctcccggcggaccaaggaggaggagctgcagtgctaagtccagccagcgtgcagctgcatccagaaaccggccactacccagcccatctctgcctgtgcttatccagataagaagaccaaaatcccgctgggaaaaacccaggccttgacattgttattcaaatggcccctccagaaagtttaatgatttccatttgtatttgtgttgatgatggaccacttgaccatcacatttcagtattcatagatgactgtcacattttaaaatgttcccacttgagcaggtacacaactggtcataattcctgtctgtgtaattcgatgtatatttttccaaacatgtagctattgtttgctttgatttttgcttggcctcctttatgatgtgcatgtccttgaaggctgaatgaacagtccctttcagttcagcagatcaacaggatggagctcttcatgactgtctccagcaataggatgatttactataaatttcatccaactacttgtgatctctctcacctacatcaattatgtatgttaatttcagcaattaaaagaattgattttaatgac

SEQ ID NO: 302635 - DNA, 2178 bp, Homo sapiens
cttggtttgggccaggtggactggaaggggcggaggtaaccagaagcggctagtggcggctgcctgcgtccccaaccccctccgcgcagcgctcgcgacacgcgtgccaggagtgggagcgagcggcggggccagctgcgttctgagcctgggcgcagctgccatctgctctgggaagcaccagggtgtccccgccgccctcagctcgaagtcagccaccatggaggcgcaggcacaaggtttgttggagactgaaccgttgcaaggaacagacgaagatgcagtagccagtgctgacttctctagcatgctctctgaggaggaaaaggaagagttaaaagcagagttagttcagctagaagacgaaattacaacactacgacaagttttgtcagcgaaagaaaggcatctagttgagataaaacaaaaactcggcatgaacctgatgaatgaattaaaacagaacttcagcaaaagctggcatgacatgcagactaccactgcctacaagaaaacacatgaaaccctgagtcacgcagggcaaaaggcaactgcagctttcagcaacgttggaacggccatcagcaagaagttcggagacatgagacgaaagtaggcggtacgaaccctaatggaggcagttttgaggaggtcctcagctccacggcccatgccagtgcccagagcttggcaggaggctcccggcggaccaaggaggaggagctgcagtgctaagtccagccagcgtgcagctgcatccagaaaccggccactacccagcccatctctgcctgtgcttatccagataagaagaccaaaatcccgctgggaaaaacccaggccttgacattgttattcaaatggcccctccagaaagtttaatgatttccatttgtatttgtgttgatgatggaccacttgaccatcacatttcagtattcatagatgactgtcacattttaaaatgttcccacttgagcaggtacacaactggtcataattcctgtctgtgtaattcgatgtatatttttccaaacatgtagctattgtttgctttgatttttgcttggcctcctttatgatgtgcatgtccttgaaggctgaatgaacagtccctttcagttcagcagatcaacaggatggagctcttcatgactgtctccagcaataggatgatttactataaatttcatccaactacttgtgatctctctcacctacatcaattatgtatgttaatttcagcaattaaaagaattgattttaatgactttgaattcttaatttctttgtcttaaaagttgctagttatgattttacagatgcaattttaaatcaacttttagccaggtgcggcggctcacacctgtaatcccaactattttggatgccaaggtgagaggattgcttgaggccaggagttaaagatcagcctgggcaacacagaccctgtctctacaaaaaaagaaaaaaattagccagacatagtgttgcttgcctgtagtcccagctactctagaggctgaggcaggaggattgcatgagcctaggagttcgaaactgcagtgagctatgattgcaccactgcactactccagcctgggtgacagagtgagacactgtctccaaaaatagtaataataagtagtcaacttttactgctaatttggtgaacatgagagaggatatgaaaataaatattacctcagctatcctaggatgttaaaataatctccaattttaaaattctctccaatctacatacagtagtagttagtcagataaaggatatccaaaaaagagatagctagaaaatgggagaagcagagttctgcaacccctttcagtttgtaaattgttcacatgtatgaaaataactggtatttatcaatccactcagatttctgcactaacttttatcttatatatcatatgtatctcttttctttttctaaatgggaacatatatttgttattaggtggcagagatatagccttaagatatatttgtaaaatgcacactgaatagacatccaacctaaaaaaaatcactatttaaaaagcccatataatatatacatatttgttagcatgctaattgttcatgttttgtgtttattaaatagaagtgatatatatgacattttgaagtaaagcacatctgaaaaattctactca

SEQ ID NO: 302636 - DNA, 648 bp, Homo sapiens
cttggtttgggccaggtggactggaaggggcggaggtaaccagaagcggctagtggcggctgcctgcgtccccaaccccctccgcgcagcgctcgcgacacgcgtgccaggagtgggagcgagcggcggggccagctgcgttctgagcctgggcgcagctgccatctgctctgggaagcaccagggtgtccccgccgccctcagctcgaagtcagccaccatggaggcgcaggcacaaggtttgttggagactgaaccgttgcaaggaacagacgaagatgcagtagccagtgctgacttctctagcatgctctctgaggaggaaaaggaagagttaaaagcagagttagttcagctagaagacgaaattacaacactacgacaagttttgtcagcgaaagaaaggcatctagttgagataaaacaaaaactcggcatgaacctgatgaatgaattaaaacagaacttcagcaaaagctggcatgacatgcagactaccactgcctacaagaaaacacatgaaaccctgagtcacgcagggcaaaaggcaactgcagctttcagcaacgttggaacggccatcagcaagaagttcggagacatgagacgaaagtaagcgggatcttaagcggatcagcgggaactcta

SEQ ID NO: 302637 - DNA, 421 bp, Homo sapiens
  misc_feature (78)..(78): n is a, c, g, or t
  misc_feature (140)..(140): n is a, c, g, or t
ggcacgagggcagttggtgttgctataggaggggggggggggtttttttttttaacccccaaaaagggggcccccccncccttttttttttaaaatttccccccccaaaaggggggccccaaaacccaaaaggggccccnccctttttaccaaaccgggtttttgtgttggggccccctctgctgtcaccacttggtcagaaacttccaaacgcagtgccctgttctgccggtgtgtacagcctcagcgcaccaggagaccctagagtggtttccatctcacagagaatcagacagggccacagccccctcaggcagccaggtcatctgagtatcattaagagtagtgatgggaagattacagtctgagggccaaacgtgcctgcttcctgtttttgtaaataaagttttgttggaacaca

SEQ ID NO: 302638 - DNA, 1070 bp, Homo sapiens
ctcctcgtctgtccatctctcccccacacttatgctaggtcgaggctgggtgttaatcggccgactcggccatgctacgcgcgctgagccgcctgggcgcggggaccccgtgcaggccccgggcccctctggtgctgccagcgcgcggccgcaagacccgccacgacccgctggccaaatccaagatcgagcgagtgaacatgccgcccgcggtggaccctgcggagttcttcgtgctgatggagcgttaccagcactaccgccagaccgtgcgcgccctcaggatggagttcgtgtccgaggtgcagaggaaggtgcacgaggcccgagccggggttctggcggagcgcaaggccctgaaggacgccgccgagcaccgcgagctgatggcctggaaccaggcggagaaccggcggctgcacgagctgcggatagcgaggctgcggcaggaggagcgggagcaggagcagcggcaggcgttggagcaggcccgcaaggccgaagaggtgcaggcctgggcgcagcgcaaggagcgggaagtgctgcagctgcaggaagaggtgaaaaacttcatcacccgagagaacctggaggcacgggtggaagcagcattggactcccggaagaactacaactgggccatcaccagagaggggctggtggtcaggccacaacgcagggactcctaggggcccagtaaggacagtgcccgccagggaccatgtatgtatcatggcggaagagttggccctgacctggaataaagcagttggtgttgcttatgaggaaggttcagccttatccagcacagccttcacgttttgccctctgctgtcaccacttggtcagaaacttccaaacgcagtgccctgttctgccggtgtgtacagcctcagcgcaccaggagaccctagagtggtttccatctcacagagaatcagacagggccacagccccctcaggcagccaggtcatctgagtatcattaagagtagtgatgggaagattacagtctgagggccaaacgtgcctgcttcctgtttttgtaaataaagttttgttggaacaca

SEQ ID NO: 302639 - DNA, 1357 bp, Homo sapiens
agaggccacacggccgggcggggcgtgagggacagcccgaggactacaggtcccaaggttccccgcgccgcttccggggcacggtggcgtcccggcaccgcggccgcagtgaggagactcggccatgctacgcgcgctgagccgcctgggcgcggggaccccgtgcaggccccgggcccctctggtgctgccagcgcgcggccgcaagacccgccacgacccgctggccaaatccaagatcgagcgagtgaacatgccgcccgcggtggaccctgcggagttcttcgtgctgatggagcgttaccagcactaccgccagaccgtgcgcgccctcaggatggagttcgtgtccgaggtgcagaggaaggtgcacgaggcccgagccggggttctggcggagcgcaaggccctgaaggacgccgccgagcaccgcgagctgatggcctggaaccaggcggagaaccggcggctgcacgagctgcggatagcgaggctgcggcaggaggagcgggagcaggagcagcggcaggcgttggagcaggcccgcaaggccgaagaggtgcaggcctgggcgcagcgcaaggagcgggaagtgctgcagctgcaggaagaggtgaaaaacttcatcacccgagagaacctggaggcacgggtggaagcagcattggactcccggaagaactacaactgggccatcaccagagaggggctggtggtcaggccacaacgcagggactcctaggggcccagtaaggacagtgcccgccagggaccatgtatgtatcatggcggaagagttggccctgacctggaataaagcagttggtgttgcttatgaggaaggttcagccttatccagcacagccttcacgttttgccctctgctgtcaccacttggtcagaaacttccaaacgcagtgccctgttctgccggtgtgtacagcctcagcgcaccaggagaccctagagtggtttccatctcacagagaatcagacagggccacagccccctcgcccctgagtttctccgtccgggtctcctcatccgtcagggtgcacggtgggtaggagtagttgttggtcatcaccatctccatgagcatcttcagggtcgggtaatcctcccacgcagccaggccgatgttctctgggttgaatgcggcgacgaccagcaggaggggccaggccttccagtagagggtagagatggcgaggttcggaggctggtaccccggtgggagctggatgttttcagggtgatggtaggtgcacagattcagaacggcgtcgatcagctgggtcctccccaccttcagcacctctacatcatcggcctgcacgacagctctgctctaat

SEQ ID NO: 302640 - DNA, 1022 bp, Homo sapiens
ctcctcgtctgtccatctctcccccacacttatgctaggtcgaggctgggtgttaatcggccgactcggccatgctacgcgcgctgagccgcctgggcgcggggaccccgtgcaggccccgggcccctctggtgctgccagcgcgcggccgcaagacccgccacgacccgctggccaaatccaagatcgagcgagtgaacatgccgcccgcggtggaccctgcggagttcttcgtgctgatggagcgttaccagcactaccgccagaccgtgcgcgccctcaggatggagttcgtgtccgaggtgcagaggaaggtgcacgaggcccgagccggggttctggcggagcgcaaggccctgaaggacgccgccgagcaccgcgagctgatggcctggaaccaggcggagaaccggcggctgcacgagctgcggtgcgtggggcgggaggcggccgaagaggtgcaggcctgggcgcagcgcaaggagcgggaagtgctgcagctgcaggaagaggtgaaaaacttcatcacccgagagaacctggaggcacgggtggaagcagcattggactcccggaagaactacaactgggccatcaccagagaggggctggtggtcaggccacaacgcagggactcctaggggcccagtaaggacagtgcccgccagggaccatgtatgtatcatggcggaagagttggccctgacctggaataaagcagttggtgttgcttatgaggaaggttcagccttatccagcacagccttcacgttttgccctctgctgtcaccacttggtcagaaacttccaaacgcagtgccctgttctgccggtgtgtacagcctcagcgcaccaggagaccctagagtggtttccatctcacagagaatcagacagggccacagccccctcaggcagccaggtcatctgagtatcattaagagtagtgatgggaagattacagtctgagggccaaacgtgcctgcttcctgtttttgtaaataaagttttgttggaacaca

SEQ ID NO: 302641 - DNA, 736 bp, Homo sapiens
tatggctgaagtgtctgagaaaagaggaacgtggaaaagcaacctgatatcactccactgggaggccagaggggctctcaaataggacctgggttccaggcatgcttccccagggagagcaggagctgctttctcagtggggtgagaggccagcaggctgggtgggctggctggcatgtgcccaaggctcctgttcagctgggcttttctctcccgataggaagaggtgaaaaacttcatcacccgagagaacctggaggcacgggtggaagcagcattggactcccggaagaactacaactgggccatcaccagagaggggctggtggtcaggccacaacgcagggactcctaggggcccagtaaggacagtgcccgccagggaccatgtatgtatcatggcggaagagttggccctgacctggaataaagcagttggtgttgcttatgaggaaggttcagccttatccagcacagccttcacgttttgccctctgctgtcaccacttggtcagaaacttccaaacgcagtgccctgttctgccggtgtgtacagcctcagcgcaccaggagaccctagagtggtttccatctcacagagaatcagacagggccacagccccctcaggcagccaggtcatctgagtatcattaagagtagtgatgggaagattacagtctgagggccaaacgtgcctgcttcctgtttttgtaaataaagttttgttggaacaca

SEQ ID NO: 302642 - DNA, 1096 bp, Homo sapiens
ctcctcgtctgtccatctctcccccacacttatgctaggtcgaggctgggtgttaatcggccgactcggccatgctacgcgcgctgagccgcctgggcgcggggaccccgtgcaggccccgggcccctctggtgctgccagcgcgcggccgcaagacccgccacgacccgctggccaaatccaagatcgagcgagtgaacatgccgcccgcggtggaccctgcggagttcttcgtgctgatggagcgttaccagcactaccgccagaccgtgcgcgccctcaggatggagttcgtgtccgaggtgcagaggaaggtgcacgaggcccgagccggggttctggcggagcgcaaggccctgaaggacgccgccgagcaccgcgagctgatggcctggaaccaggcggagaaccggcggctgcacgagctgcggatagcgaggctgcggcaggaggagcgggagcaggagcagcggcaggcgttggagcaggcccgcaaggccgaagaggtgcaggcctgggcgcagcgcaaggagcgggaagtgctgcagctgcaggtgggcaacgtctccggagggtgggactccagccggggacgcggcttgcggggcactggggaattctgggcaccgcgacgcgggcgctggctatgtgcagagacttacagttggcaggtccggatttggagaggagagtgccagtcaggcgcaaagacccggaggtgagcggagtaattggacagtgttcaggtacctagcaggtctgtgggagggaccctgcgttccacaaagaggttgtattttgcataacaggtgatgaagccatgaagggttaagtatttcaggctaggattagcaggtgtgcgacttaaaagcagggagaccacttaggagtaatgcagtgagaatggatgaggcttgatttaaagtatagaagggtggctgggagcggtggttcacgcctgtaatcccagtactatgggaggccgaagcgggcgtatcacttgaggtcgggagttcgagtccagcctggccaagccccgtctctcctaaaaatacaaaaattagccgggcgtggtgtgcgccagtaatcgcagcta

SEQ ID NO: 302643 - DNA, 277 bp, Homo sapiens
ctcctcgtctgtccatctctcccccacacttatgctaggtcgaggctgggtgttaatcggccgactcggccatgctacgcgcgctgagccgcctgggcgcggggaccccgtgcaggccccgggcccctctggtgctgccagcgcgcggccgcaaatctttttttttttttttttttttttttttttttttttttttttttttttttgggggttcaacttaacatttattgcacaactcacttcaggccactggtgacatcccaaaacacagcctagt

SEQ ID NO: 302644 - DNA, 1123 bp, Homo sapiens
agaggccacacggccgggcggggcgtgagggacagcccgaggactacaggtcccaaggttccccgcgccgcttccggggcacggtggcgtcccggcaccgcggccgcagtgaggagactcggccatgctacgcgcgctgagccgcctgggcgcggggaccccgtgcaggccccgggcccctctggtgctgccagcgcgcggccgcaagacccgccacgacccgctggccaaatccaagatcgagcgagtgaacatgccgcccgcggtggaccctgcggagttcttcgtgctgatggagcgttaccagcactaccgccagaccgtgcgcgccctcaggatggagttcgtgtccgaggtgcagaggaaggtgcacgaggcccgagccggggttctggcggagcgcaaggccctgaaggacgccgccgagcaccgcgagctgatggcctggaaccaggcggagaaccggcggctgcacgagctgcggatagcgaggctgcggcaggaggagcgggagcaggagcagcggcaggcgttggagcaggcccgcaaggccgaagaggtgcaggcctgggcgcagcgcaaggagcgggaagtgctgcagctgcaggaagaggtgaaaaacttcatcacccgagagaacctggaggcacgggtggaagcagcattggactcccggaagaactacaactgggccatcaccagagaggggctggtggtcaggccacaacgcagggactcctaggggcccagtaaggacagtgcccgccagggaccatgtatgtatcatggcggaagagttggccctgacctggaataaagcagttggtgttgcttatgaggaaggttcagccttatccagcacagccttcacgttttgccctctgctgtcaccacttggtcagaaacttccaaacgcagtgccctgttctgccggtgtgtacagcctcagcgcaccaggagaccctagagtggtttccatctcacagagaatcagacagggccacagccccctcaggcagccaggtcatctgagtatcattaagagtagtgatgggaagattacagtctgagggccaaacgtgcctgcttcctgtttttgtaaataaagttttgttggaacaca

SEQ ID NO: 302645 - DNA, 1340 bp, Homo sapiens
agaggccacacggccgggcggggcgtgagggacagcccgaggactacaggtcccaaggttccccgcgccgcttccggggcacggtggcgtcccggcaccgcggccgcagtgaggagactcggccatgctacgcgcgctgagccgcctgggcgcggggaccccgtgcaggccccgggcccctctggtgctgccagcgcgcggccgcaagacccgccacgacccgctggccaaatccaagatcgagcgagtgaacatgccgcccgcggtggaccctgcggagttcttcgtgctgatggagcgttaccagcactaccgccagaccgtgcgcgccctcaggatggagttcgtgtccgaggtgcagaggaaggtgcacgaggcccgagccggggttctggcggagcgcaaggccctgaaggacgccgccgagcaccgcgagctgatggcctggaaccaggcggagaaccggcggctgcacgagctgcggatagcgaggctgcggcaggaggagcgggagcaggagcagcggcaggcgttggagcaggcccgcaaggccgaagaggtgcaggcctgggcgcagcgcaaggagcgggaagtgctgcagctgcaggaagaggtgaaaaacttcatcacccgagagaacctggaggcacgggtggaagcagcattggactcccggaagaactacaactgggccatcaccagagaggggctggtggtcaggccacaacgcagggactcctaggggcccagtaaggacagtgcccgccagggaccatgtatgtatcatggcggaagagttggccctgacctggaataaagcagttggtgttgcttatgaggaaggttcagccttatccagcacagccttcacgttttgccctctgctgtcaccacttggtcagaaacttccaaacgcagtgccctgttctgccggtgtgtacagcctcagcgcaccaggagaccctagagtggtttccatctcacagagaatcagacagggccacagccccctcaggcagccaggtcatctgagtatcattaagagtagtgatgggaagattacagtctgagggccaaacgtgcctgcttcctgtttttgtaaataaagttttgttggaacacaaaaaaaaacgacaaaaaaactcagaggaaaccaacgccaggatgaggaaacagagaggaacggaaagggaacagggacatagcaggaaaccgtgacccagagtttactaggtacacaaggggttagagtttagagggtgtccccaataacatgcgctccagaatagaattacgaatagagccagggttaaccgtgcgttaggaatcagggccaaaac

SEQ ID NO: 302646 - DNA, 1015 bp, Homo sapiens
ctcctcgtctgtccatctctcccccacacttatgctaggtcgaggctgggtgttaatcggccgactcggccatgctacgcgcgctgagccgcctgggcgcggggaccccgtgcaggccccgggcccctctggtgctgccagcgcgcggccgcaagacccgccacgacccgctggccaaatccaagatcgacgttaccagcactaccgccagaccgtgcgcgccctcaggatggagttcgtgtccgaggtgcagaggaaggtgcacgaggcccgagccggggttctggcggagcgcaaggccctgaaggacgccgccgagcaccgcgagctgatggcctggaaccaggcggagaaccggcggctgcacgagctgcggatagcgaggctgcggcaggaggagcgggagcaggagcagcggcaggcgttggagcaggcccgcaaggccgaagaggtgcaggcctgggcgcagcgcaaggagcgggaagtgctgcagctgcaggaagaggtgaaaaacttcatcacccgagagaacctggaggcacgggtggaagcagcattggactcccggaagaactacaactgggccatcaccagagaggggctggtggtcaggccacaacgcagggactcctaggggcccagtaaggacagtgcccgccagggaccatgtatgtatcatggcggaagagttggccctgacctggaataaagcagttggtgttgcttatgaggaaggttcagccttatccagcacagccttcacgttttgccctctgctgtcaccacttggtcagaaacttccaaacgcagtgccctgttctgccggtgtgtacagcctcagcgcaccaggagaccctagagtggtttccatctcacagagaatcagacagggccacagccccctcaggcagccaggtcatctgagtatcattaagagtagtgatgggaagattacagtctgagggccaaacgtgcctgcttcctgtttttgtaaataaagttttgttggaacaca

SEQ ID NO: 302647 - DNA, 505 bp, Homo sapiens
tcagacgctgaactatgtggtgggggatgagccggatgccagctgggacgaggcccttgtaaaaggccagaggcccgagcttcgctgtctccacggcgcagtggaaaacgccctgatactcccccttggagttcatcaggcgagtcttcagcacatccaggggctggcacaggaacgtggcaacatccacctggaataaagcagttggtgttgcttatgaggaaggttcagccttatccagcacagccttcacgttttgccctctgctgtcaccacttggtcagaaacttccaaacgcagtgccctgttctgccggtgtgtacagcctcagcgcaccaggagaccctagagtggtttccatctcacagagaatcagacagggccacagccccctcaggcagccaggtcatctgagtatcattaagagtagtgatgggaagattacagtctgagggccaaacgtgcctgcttcctgtttttgtaaataaagttttgttggaacaca

SEQ ID NO: 302648 - DNA, 452 bp, Homo sapiens
gtaaagagtgactgctcatagagacggggtatctttagggaggatgagaatgttagctagtggtggtggtcgcacaaccttggaaataaactaaaaaccactgaagtattcactttaagcagatgaattatatggcatgtgaattatatctcaataaagcttacctcaaggattgagggtctttggtaggggccgatatctaaaacagtgtgcctgtagcttaaggccttagtgcacatacacattcttatgaattagcacttctttgctgcctcttagggcttaaccactgacggaaactgtcttgtgtgcttgcacttttctggtttgtcttctgacctctgactcctttcctggaagaccagcatcaagaaagcacaaggcagatctgtggttcatctctgccctgttgtgggattggcacaccgtagatactagggagcttctttttt

SEQ ID NO: 302649 - DNA, 639 bp, Homo sapiens
gggggccgccacgtgcgggacctgccctggcgttggggtgtggggtcccctagcctggagcgggctcgtcctggcgggcctggatccaagcacaatctcagcttttggagccagcagccggaccgaattcagtttttccggagttcagttgttatgacccaagtttagccgacaggatcctggtgatgcggcccaacaggaagcaaagcacagggaagcagaaatgagaaacagtatcttagcccaagttctggatcagtcggcccgggccaggttaagtaacttagcacttgtaaagcctgaaaaaactaaagcagtagagaattaccttatacagatggcaagatatggacaactaagtgagaaggtatcagaacaaggtttaatagaaatccttaaaaaagtaagccaacaaacagaaaagacaacaacagtgaaattcaacagaagaaaagtaatggactctgatgaagatgacgattattgaactacaagtgctcacagactagaacttaacggaacaagtctaggacagaagttaagatctgattatttactttgtttattgtctatatgccttttaaaaaaataaacttgttatgcaaaataaaaaatatcggtaagttgttttagtatcat

SEQ ID NO: 302650 - DNA, 469 bp, Homo sapiens
  misc_feature (27)..(27): n is a, c, g, or t
tacgccggtaccacatctgacgtccancaggaagcaagcacagggaagcagaaatgagaaacagtatcttagcccaagttctggatcagtcggcccgggccaggttaagtaacttagcacttgtaaagcctgaaaaaactaaagcagtagagaattaccttatacagatggcaagatatggacaactaagtgagaaggtatcagaacaaggtttaatagaaatccttaaaaaagtaagccaacaaacagaaaagacaacaacagtgaaattcaacagaagaaaagtaatggactctgatgaagatgacgattattgaactacaagtgctcacagactagaacttaacggaacaagtctaggacagaagttaagatctgattatttactttgtttattgtctatatgccttttaaaaaaataaacttgttatgcaaaataaaaaatatcggtaagttgttttagtatcat

SEQ ID NO: 302651 - DNA, 496 bp, Homo sapiens
  misc_feature (22)..(22): n is a, c, g, or t
ctagctgaacgacttttaattncaccgctcaggatcctggtgatgcggcccaacaggaagcaaagcacagggaagcagaaatgagaaacagtatcttagcccaagttctggatcagtcggcccgggccaggttaagtaacttagcacttgtaaagcctgaaaaaactaaagcagtagagaattaccttatacagatggcaagatatggacaactaagtgagaaggtatcagaacaaggtttaatagaaatccttaaaaaagtaagccaacaaacagaaaagacaacaacagtgaaattcaacagaagaaaagtaatggactctgatgaagatgacgattattgaactacaagtgctcacagactagaacttaacggaacaagtctaggacagaagttaagatctgattatttactttgtttattgtctatatgccttttaaaaaaataaacttgttatgcaaaataaaaaatatcggtaagttgttttagtatcat

SEQ ID NO: 302652 - DNA, 500 bp, Homo sapiens
gccgcgctcgcgccgaggggctgcgagagtgaccgcggctgctccagcgctgacgccgagccatggcggacgaggagcttgaggcgctgaggagacagaggctggccgagctgcaggccaaacacggggatcctggtgatgcggcccaacaggaagcaaagcacagggaagcagaaatgagaaacagtatcttagcccaagttctggatcagtcggcccgggccaggtgtatcagaacaaggtttaatagaaatccttaaaaaagtaagccaacaaacagaaaagacaacaacagtgaaattcaacagaagaaaagtaatggactctgatgaagatgacgattattgaactacaagtgctcacagactagaacttaacggaacaagtctaggacagaagttaagatctgattatttactttgtttattgtctatatgccttttaaaaaaataaacttgttatgcaaaataaaaaatatcggtaagttgttttagtatcat

SEQ ID NO: 302653 - DNA, 1131 bp, Homo sapiens
tctccctctcagttgagccaaagcatctgtgctcatttgtttttagatttcttaaaggatttcatttgaaagaaaaaagaaacaagtccatgagaccactgtcctgtgaacgtgaactactttctatttgggtaggtaggaagaagtgaggatagttgcaaagttataatttcattccccttccccacccagaaaaatagaactgagagtcttaaaacatggaatctggctgtagcttggccacagttacctatgtctctttagcatagcctcctggatctcagctttatctctaagaaaatgatatagattagtcacatggtccttctaattgcctgaaatcccactataaatttctagcacctgtcacgcaataggtacttaagaaatgttggtgatggtgtttgaactgaggctccactctgatgaaactgtaaagctcaccttccagcctggtaggttgtcacctgtgtaatataaagctggttctttgagggcaaaaggggattctacttgaatgtagctgcagccttatgtacagcaactaccataatgcagtttgtataccgcaggccccatgtggagacacatactggatgggttctttctcgtatgttacatgggaatgccgacagctgtgttttaattgtgtttgacctatgttttcgttgtagggaagcagaaatgagaaacagtatcttagcccaagttctggatcagtcggcccgggccaggtgtaagcatctttgatttcatttccataaagttagcttgagttagttgaatggggtgattagataccattattgctatcactagatgaaatatttgcttaggctgaaaacacttgagatgtgtaagaagtgtgaagtttataaacctagagaactgtactttaatccctagtaaaagtaccaggtcacttctcttaccaagatgttctccaggtgtgtattaggtaagatttataggaaacaactcatagggccaatcacaaaatgttgctggtagttgacattttgtgtcaactggtgatggggactggggatgggggacttagaggtttttttatgtattgtcagttttagtgtatgttcagagttgttcatcataaaaaccaaaacctgtaga

SEQ ID NO: 302654 - DNA, 787 bp, Homo sapiens
gccgcgctcgcgccgaggggctgcgagagtgaccgcggctgctccagcgctgacgccgagccatggcggacgaggagcttgaggcgctgaggagacagaggctggccgagctgcaggccaaacacggggatcctggtgatgcggcccaacaggaagcaaagcacaggtatgggctggaaacgtgaactttttgaagggtggtttcaccaaatggatttcttttgctgtagttattttaagcaggtgtgtgactcagatttttttgttttgctggaatggtgatttggccaaaatcatccgcagggtatcttcattattgttaaataaacacgtgtgcagctccacatcagaccttgtattgcaattactggttgatgtttctctgctacaatgtgagtaccttaaaaatgagcctgataataggcagctgtggcagtttcctcggctgtgggggtgacgtgagtccggtgcctcacttagtaagtgctcaataagtgttaactggtaagctattctgattgttttatcccaacacagcgcacagcacctgagacagatgcaggtaattgattcggtggcaggtttattgaatgagtatgtgattaccctatcatgctatcattttttaaaaattgtggttaaataaaatttcaccatcacaaccatttttaagtgtgctcttcagtagtgttcacactctagaatgttttcatcttgcaagactgaaacctttagctactggacaattctctatttccccttcctcaccttcttactcctcctctcc

SEQ ID NO: 302655 - DNA, 618 bp, Homo sapiens
gccgcgctcgcgccgaggggctgcgagagtgaccgcggctgctccagcgctgacgccgagccatggcggacgaggagcttgaggcgctgaggagacagaggctggccgagctgcaggccaaacacggggatcctggtgatgcggcccaacaggaagcaaagcacagggaagcagaaatgagaaacagtatcttagcccaagttctggatcagtcggcccgggccaggttaagtaacttagcacttgtaaagcctgaaaaaactaaagcagtagagaattaccttatacagatggcaagatatggacaactaagtgagaaggtatcagaacaaggtttaatagaaatccttaaaaaagtaagccaacaaacagaaaagacaacaacagtgaaattcaacagaagaaaagtaatggactctgatgaagatgacgattattgaactacaagtgctcacagactagaacttaacggaacaagtctaggacagaagttaagatctgattatttactttgtttattgtctatatgccttttaaaaaaataaacttgttatcacgctgtcgccctggaggttctcctccccgccctgcgctcacgacacaccgacatattataaa

SEQ ID NO: 302656 - DNA, 589 bp, Homo sapiens
gcggccgcctactactactactactgctcgaattcaagcttctaacgatgtacggggccatggcggacgaggagcttgaggcgctgaggagacagaggctggccgagctgcaggccaaacacggggatcctggtgatgcggcccaacaggaagcaaagcacagggaagcagaaatgagaaacagtatcttagcccaagttctggatcagtcggcccgggccaggttaagtaacttagcacttgtaaagcctgaaaaaactaaagcagtagagaattaccttatacagatggcaagatatggacaactaagtgagaaggtatcagaacaaggtttaatagaaatccttaaaaaagtaagccaacaaacagaaaagacaacaacagtgaaattcaacagaagaaaagtaatggactctgatgaagatgacgattattgaactacaagtgctcacagactagaacttaacggaacaagtctaggacagaagttaagatctgattatttactttgtttattgtctatatgccttttaaaaaaataaacttgttatgcaaaataaaaaatatcggtaagttgttttagtatcat

SEQ ID NO: 302657 - DNA, 2373 bp, Homo sapiens
tctccctctcagttgagccaaagcatctgtgctcatttgtttttagatttcttaaaggatttcatttgaaagaaaaaagaaacaagtccatgagaccactgtcctgtgaacgtgaactactttctatttgggtaggtaggaagaagtgaggatagttgcaaagttataatttcattccccttccccacccagaaaaatagaactgagagtcttaaaacatggaatctggctgtagcttggccacagttacctatgtctctttagcatagcctcctggatctcagctttatctctaagaaaatgatatagattagtcacatggtccttctaattgcctgaaatcccactataaatttctagcacctgtcacgcaataggtacttaagaaatgttggtgatggtgtttgaactgaggctccactctgatgaaactgtaaagctcaccttccagcctggtaggttgtcacctgtgtaatataaagctggttctttgagggcaaaaggggattctacttgaatgtagctgcagccttatgtacagcaactaccataatgcagtttgtataccgcaggccccatgtggagacacatactggatgggttctttctcgtatgttacatgggaatgccgacagctgtgttttaattgtgtttgacctatgttttcgttgtagggaagcagaaatgagaaacagtatcttagcccaagttctggatcagtcggcccgggccaggttaagtaacttagcacttgtaaagcctgaaaaaactaaagcagtagagaattaccttatacagatggcaagatatggacaactaagtgagaaggtaagcttagacagccttgaggaactttactgttacctgctttatcaaaacatggcttcaaaaggtcagctgcatcttcactggattacagaattcttgctgactctcagaagaaattgttggagagaatagtcatacctactttaaaagagaataaattgcctttcctaaattcctctgcttcgctcctttcctggcgttgctctggaaccttgttggtgtctgtgacccaatgactgttagggtcagctagcttcaattgcccctgcactggaagcaaggtttgtcagtaacaccaattaaaatactaccagtgtaagtagaaggtgtgttttgcagatgagaaggtgctaagatgccttgcttatgttctctgtgttgctgtaataccatgaggggtatgttgtggcaaacctggcctttgagatcaagacgaaccccacctgccctgagaagccgtctgctaccaccacagcctacccgaattggtcctgtcccctaaacccctcacactgagaactgcttgtgtgggagagagctggttgggttgatcttttccgagtgtgacttacctccttcaaggggatgtttaagcttctcgggcagaagtggtgtgtctattcctgacaccaaacaccgtggtatatgtggttgtcacactcagctagtgatgataaaggtgttcttaaatatgttagctttcagttttcctgaggaagcaattttatggatacttccccctccttctcaagtgaggaatagcagagcaaattttatttggaacttaaaccaatagttataaccaatagtttcaacctcctgcctcaccactgcttccttcctgagctctttccccacacctcaaaaagagtacaaagtgattccatctgcagaggtaaattctttgtttaaaaaagtactgtttttcttatcttttctggttctcctaggtatcagaacaaggtttaatagaaatccttaaaaaagtaagccaacaaacagaaaagacaacaacagtgaaagtaagtgtccccagatgcttgtggcaaatgaaaagatggatactttaaagattaatgttgagtatacatctaccacacatatttttcagcccagagacattttccttttgtcaaacacgtgaaagtttggggagaaaggctgaatctgttgggggagggttctaatttttataggctcttgactccattcccacccttttagttcacgctaagttgctttaaagacacaaatgtcttgctaaaattggtagaaatcttttctcggaaaatctgagttatgctttattagaaatgttctgacactcatttaattttcctcccagttcaacagaagaaaagtaatggactctgatgaagatgacgattattgaactacaagtgctcacagactagaacttaacggaacaagtctaggacagaagttaagatctgattatttactttgtttattgtctatatgccttttaaaaaaataaacttgttatgcaaaataaaaaatatcggtaagttgttttagtatcat

SEQ ID NO: 302658 - DNA, 1685 bp, Homo sapiens
tgcatttgattttaatggattttttgcatatgtattttttctttttagtaagtaacttagcacttgtaaagcctgaaaaaactaaagcagtagagaattaccttatacagatggcaagatatggacaactaagtgagaaggtaagcttagacagccttgaggaactttactgttacctgctttatcaaaacatggcttcaaaaggtcagctgcatcttcactggattacagaattcttgctgactctcagaagaaattgttggagagaatagtcatacctactttaaaagagaataaattgcctttcctaaattcctctgcttcgctcctttcctggcgttgctctggaaccttgttggtgtctgtgacccaatgactgttagggtcagctagcttcaattgcccctgcactggaagcaaggtttgtcagtaacaccaattaaaatactaccagtgtaagtagaaggtgtgttttgcagatgagaaggtgctaagatgccttgcttatgttctctgtgttgctgtaataccatgaggggtatgttgtggcaaacctggcctttgagatcaagacgaaccccacctgccctgagaagccgtctgctaccaccacagcctacccgaattggtcctgtcccctaaacccctcacactgagaactgcttgtgtgggagagagctggttgggttgatcttttccgagtgtgacttacctccttcaaggggatgtttaagcttctcgggcagaagtggtgtgtctattcctgacaccaaacaccgtggtatatgtggttgtcacactcagctagtgatgataaaggtgttcttaaatatgttagctttcagttttcctgaggaagcaattttatggatacttccccctccttctcaagtgaggaatagcagagcaaattttatttggaacttaaaccaatagttataaccaatagtttcaacctcctgcctcaccactgcttccttcctgagctctttccccacacctcaaaaagagtacaaagtgattccatctgcagaggtaaattctttgtttaaaaaagtactgtttttcttatcttttctggttctcctaggtatcagaacaaggtttaatagaaatccttaaaaaagtaagccaacaaacagaaaagacaacaacagtgaaagtaagtgtccccagatgcttgtggcaaatgaaaagatggatactttaaagattaatgttgagtatacatctaccacacatatttttcagcccagagacattttccttttgtcaaacacgtgaaagtttggggagaaaggctgaatctgttgggggagggttctaatttttataggctcttgactccattcccacccttttagttcacgctaagttgctttaaagacacaaatgtcttgctaaaattggtagaaatcttttctcggaaaatctgagttatgctttattagaaatgttctgacactcatttaattttcctcccagttcaacagaagaaaagtaatggactctgatgaagatgacgattattgaactacaagtgctcacagactagaacttaacggaacaagtctaggacagaagttaagatctgattatttactttgtttattgtctatatgccttttaaaaaaataaacttgttatgcaaaataaaaaatatcggtaagttgttttagtatcat

SEQ ID NO: 302659 - DNA, 1742 bp, Homo sapiens
  misc_feature (27)..(27): n is a, c, g, or t
tacgccggtaccacatctgacgtccancaggaagcaagcacagggaagcagaaatgagaaacagtatcttagcccaagttctggatcagtcggcccgggccaggttaagtaacttagcacttgtaaagcctgaaaaaactaaagcagtagagaattaccttatacagatggcaagatatggacaactaagtgagaaggtaagcttagacagccttgaggaactttactgttacctgctttatcaaaacatggcttcaaaaggtcagctgcatcttcactggattacagaattcttgctgactctcagaagaaattgttggagagaatagtcatacctactttaaaagagaataaattgcctttcctaaattcctctgcttcgctcctttcctggcgttgctctggaaccttgttggtgtctgtgacccaatgactgttagggtcagctagcttcaattgcccctgcactggaagcaaggtttgtcagtaacaccaattaaaatactaccagtgtaagtagaaggtgtgttttgcagatgagaaggtgctaagatgccttgcttatgttctctgtgttgctgtaataccatgaggggtatgttgtggcaaacctggcctttgagatcaagacgaaccccacctgccctgagaagccgtctgctaccaccacagcctacccgaattggtcctgtcccctaaacccctcacactgagaactgcttgtgtgggagagagctggttgggttgatcttttccgagtgtgacttacctccttcaaggggatgtttaagcttctcgggcagaagtggtgtgtctattcctgacaccaaacaccgtggtatatgtggttgtcacactcagctagtgatgataaaggtgttcttaaatatgttagctttcagttttcctgaggaagcaattttatggatacttccccctccttctcaagtgaggaatagcagagcaaattttatttggaacttaaaccaatagttataaccaatagtttcaacctcctgcctcaccactgcttccttcctgagctctttccccacacctcaaaaagagtacaaagtgattccatctgcagaggtaaattctttgtttaaaaaagtactgtttttcttatcttttctggttctcctaggtatcagaacaaggtttaatagaaatccttaaaaaagtaagccaacaaacagaaaagacaacaacagtgaaagtaagtgtccccagatgcttgtggcaaatgaaaagatggatactttaaagattaatgttgagtatacatctaccacacatatttttcagcccagagacattttccttttgtcaaacacgtgaaagtttggggagaaaggctgaatctgttgggggagggttctaatttttataggctcttgactccattcccacccttttagttcacgctaagttgctttaaagacacaaatgtcttgctaaaattggtagaaatcttttctcggaaaatctgagttatgctttattagaaatgttctgacactcatttaattttcctcccagttcaacagaagaaaagtaatggactctgatgaagatgacgattattgaactacaagtgctcacagactagaacttaacggaacaagtctaggacagaagttaagatctgattatttactttgtttattgtctatatgccttttaaaaaaataaacttgttatgcaaaataaaaaatatcggtaagttgttttagtatcat

SEQ ID NO: 302660 - DNA, 751 bp, Homo sapiens
agggtcggaggaacgcttgccccgccgggatgacagggaggggccgcctgggaagcttggatggatcacacgcccggagaggcgtttctgataagggaccgggaccttagggacggagggcgcagtctttgagttatcgttgtccctaataccgaggcccgttttattttccagaaattattcctacatgtgaaacacggtttcgtaatacagggattcccctccccagggtgctctgtattccaaagccttctgaggttgtggttttagacgttcatcaaaacgttgatcctggtgatgcggcccaacaggaagcaaagcacagggaagcagaaatgagaaacagtatcttagcccaagttctggatcagtcggcccgggccaggttaagtaacttagcacttgtaaagcctgaaaaaactaaagcagtagagaattaccttatacagatggcaagatatggacaactaagtgagaaggtatcagaacaaggtttaatagaaatccttaaaaaagtaagccaacaaacagaaaagacaacaacagtgaaattcaacagaagaaaagtaatggactctgatgaagatgacgattattgaactacaagtgctcacagactagaacttaacggaacaagtctaggacagaagttaagatctgattatttactttgtttattgtctatatgccttttaaaaaaataaacttgttatgcaaaataaaaaatatcggtaagttgttttagtatcat

SEQ ID NO: 302661 - DNA, 1542 bp, Homo sapiens
gccgcgctcgcgccgaggggctgcgagagtgaccgcggctgctccagcgctgacgccgagccatggcggacgaggagcttgaggcgctgaggagacagaggctggccgagctgcaggccaaacacggggatcctggtgatgcggcccaacaggaagcaaagcacagggaagcagaaatgagaaacagtatcttagcccaagttctggatcagtcggcccgggccaggttaagtaacttagcacttgtaaagcctgaaaaaactaaagcagtagagaattaccttatacagatggcaagatatggacaactaagtgagaaggtaagcttagacagccttgaggaactttactgttacctgctttatcaaaacatggcttcaaaaggtcagctgcatcttcactggattacagaattcttgctgactctcagaagaaattgttggagagaatagtcatacctactttaaaagagaataaattgcctttcctaaattcctctgcttcgctcctttcctggcgttgctctggaaccttgttggtgtctgtgacccaatgactgttagggtcagctagcttcaattgcccctgcactggaagcaaggtttgtcagtaacaccaattaaaatactaccagtgtaagtagaaggtgtgttttgcagatgagaaggtgctaagatgccttgcttatgttctctgtgttgctgtaataccatgaggggtatgttgtggcaaacctggcctttgagatcaagacgaaccccacctgccctgagaagccgtctgctaccaccacagcctacccgaattggtcctgtcccctaaacccctcacactgagaactgcttgtgtgggagagagctggttgggttgatcttttccgagtgtgacttacctccttcaaggggatgtttaagcttctcgggcagaagtggtgtgtctattcctgacaccaaacaccgtggtatatgtggttgtcacactcagctagtgatgataaaggtgttcttaaatatgttagctttcagttttcctgaggaagcaattttatggatacttccccctccttctcaagtgaggaatagcagagcaaattttatttggaacttaaaccaatagttataaccaatagtttcaacctcctgcctcaccactgcttccttcctgagctctttccccacacctcaaaaagagtacaaagtgattccatctgcagaggtaaattctttgtttaaaaaagtactgtttttcttatcttttctggttctcctaggtatcagaacaaggtttaatagaaatccttaaaaaagtaagccaacaaacagaaaagacaacaacagtgaaattcaacagaagaaaagtaatggactctgatgaagatgacgattattgaactacaagtgctcacagactagaacttaacggaacaagtctaggacagaagttaagatctgattatttactttgtttattgtctatatgccttttaaaaaaataaacttgttatgcaaaataaaaaatatcggtaagttgttttagtatcat

SEQ ID NO: 302662 - DNA, 592 bp, Homo sapiens
gccgcgctcgcgccgaggggctgcgagagtgaccgcggctgctccagcgctgacgccgagccatggcggacgaggagcttgaggcgctgaggagacagaggctggccgagctgcaggccaaacacggggatcctggtgatgcggcccaacaggaagcaaagcacagggaagcagaaatgagaaacagtatcttagcccaagttctggatcagtcggcccgggccaggttaagtaacttagcacttgtaaagcctgaaaaaactaaagcagtagagaattaccttatacagatggcaagatatggacaactaagtgagaaggtatcagaacaaggtttaatagaaatccttaaaaaagtaagccaacaaacagaaaagacaacaacagtgaaattcaacagaagaaaagtaatggactctgatgaagatgacgattattgaactacaagtgctcacagactagaacttaacggaacaagtctaggacagaagttaagatctgattatttactttgtttattgtctatatgccttttaaaaaaataaacttgttatgcaaaataaaaaatatcggtaagttgttttagtatcat

SEQ ID NO: 302663 - DNA, 509 bp, Homo sapiens
cttcaacccactgcttcctgactcgctctactccgtggaaggacgctcacaaaggcacgtgggccgtggcccgggccaggttaagtaacttagcacttgtaaagcctgaaaaaactaaagcagtagagaattaccttatacagatggcaagatatggacaactaagtgagaaggtatcagaacaaggtttaatagaaatccttaaaaaagtaagccaacaaacagaaaagacaacaacagtgaaattcaacagaagaaaagtaatggactctgatgaagatgacgattattgaactacaagtgctcacagactagaacttaacggaacaagtctaggacagaagttaagatctgattatttactttgtttattgtctatatgccttttaaaaaaataaacttgttaaaaaaaaaaaaaaaaaaaaaaaaaaaaaaaaaaaaaaaaaaaaaaaaaaaaaaaaaaaaaaaaaaaaaaaaaaaaaaaaaaaaaaaaaaaaaaaaaaaaaaaa

SEQ ID NO: 302664 - DNA, 614 bp, Homo sapiens
  misc_feature (556)..(556): n is a, c, g, or t
gccgcgctcgcgccgaggggctgcgagagtgaccgcggctgctccagcgctgacgccgagccatggcggacgaggagcttgaggcgctgaggagacagaggctggccgagctgcaggccaaacacggggatcctggtgatgcggcccaacaggaagcaaagcacagggaagcagaaatgagaaacagtatcttagcccaagttctggatcagtcggcccgggccaggttaagtaacttagcacttgtaaagcctgaaaaaactaaagcagtagagaattaccttatacagatggcaagatatggacaactaagtgagaaggtatcagaacaaggtttaatagaaatccttaaaaaagtaagccaacaaacagaaaagacaacaacagtgaaattcaacagaagaaaagtaatggactctgatgaagatgacgattattgaactacaagtgctcacagactagaacttaacggaacaagtctaggacagaagttaagatctgattatttactttgtttattgtctatatgccttttaaaaaaataaacttgttaatngatgcggccggaattatttatataaaataaagcacctacgactgcccgcgccgacccc

SEQ ID NO: 302665 - DNA, 1865 bp, Homo sapiens
gccgcgctcgcgccgaggggctgcgagagtgaccgcggctgctccagcgctgacgccgagccatggcggacgaggagcttgaggcgctgaggagacagaggctggccgagctgcaggccaaacacggggatcctggtgatgcggcccaacaggaagcaaagcacagggaagcagaaatgagaaacagtatcttagcccaagttctggatcagtcggcccgggccaggttaagtaacttagcacttgtaaagcctgaaaaaactaaagcagtagagaattaccttatacagatggcaagatatggacaactaagtgagaaggtaagcttagacagccttgaggaactttactgttacctgctttatcaaaacatggcttcaaaaggtcagctgcatcttcactggattacagaattcttgctgactctcagaagaaattgttggagagaatagtcatacctactttaaaagagaataaattgcctttcctaaattcctctgcttcgctcctttcctggcgttgctctggaaccttgttggtgtctgtgacccaatgactgttagggtcagctagcttcaattgcccctgcactggaagcaaggtttgtcagtaacaccaattaaaatactaccagtgtaagtagaaggtgtgttttgcagatgagaaggtgctaagatgccttgcttatgttctctgtgttgctgtaataccatgaggggtatgttgtggcaaacctggcctttgagatcaagacgaaccccacctgccctgagaagccgtctgctaccaccacagcctacccgaattggtcctgtcccctaaacccctcacactgagaactgcttgtgtgggagagagctggttgggttgatcttttccgagtgtgacttacctccttcaaggggatgtttaagcttctcgggcagaagtggtgtgtctattcctgacaccaaacaccgtggtatatgtggttgtcacactcagctagtgatgataaaggtgttcttaaatatgttagctttcagttttcctgaggaagcaattttatggatacttccccctccttctcaagtgaggaatagcagagcaaattttatttggaacttaaaccaatagttataaccaatagtttcaacctcctgcctcaccactgcttccttcctgagctctttccccacacctcaaaaagagtacaaagtgattccatctgcagaggtaaattctttgtttaaaaaagtactgtttttcttatcttttctggttctcctaggtatcagaacaaggtttaatagaaatccttaaaaaagtaagccaacaaacagaaaagacaacaacagtgaaagtaagtgtccccagatgcttgtggcaaatgaaaagatggatactttaaagattaatgttgagtatacatctaccacacatatttttcagcccagagacattttccttttgtcaaacacgtgaaagtttggggagaaaggctgaatctgttgggggagggttctaatttttataggctcttgactccattcccacccttttagttcacgctaagttgctttaaagacacaaatgtcttgctaaaattggtagaaatcttttctcggaaaatctgagttatgctttattagaaatgttctgacactcatttaattttcctcccagttcaacagaagaaaagtaatggactctgatgaagatgacgattattgaactacaagtgctcacagactagaacttaacggaacaagtctaggacagaagttaagatctgattatttactttgtttattgtctatatgccttttaaaaaaataaacttgttatgcaaaataaaaaatatcggtaagttgttttagtatcat

SEQ ID NO: 302666 - DNA, 1105 bp, Homo sapiens
gcggccaccgttttaaccacgattggcgaagcgccgtcatttcggagcgactcagcgcctgcccgccctctcgccgcgtcgccggtgcctgcgcctcccgctccacctcgcttcttctctcccggccgaggcccgggggaccagagcgagaagcggggaccatgttccgacgcaagttgacggctctcgactaccacaaccccgccggcttcaactgcaaagatgaaacagaatttagaaacttcatcgtttggcttgaagaccagaaaatcaggcactacaagattgaagacagagggaatttaagaaacatccacagcagcgactggcccaagttctttgaaaagtatctcagagatgttaactgtcctttcaagattcaagatcgacaagaagctattgactggcttcttggtttagctgttagacttgaatatggagataatgctgaaaaatacaaggatttagtacctgataattcaaaaactgctgacaatgcaactaaaaatgcagaaccattgatcaatttggatgtaaataatcctgattttaaggctggtgtgatggctttggctaacctgcttcagattcagcgtcatgatgattacctggtaatgcttaaggcaattcggattttggttcaggagcgcctgacacaggatgcagttgctaaggcaaatcaaacaaaagagggcttacctgttgctttagacaaacatattcttggttttgacacaggagatgcagttcttaatgaagctgctcaaattctgcgattgctgcacatagaggagctcagagagctacagacaaaaatcaacgaagccatagtagctgttcaggcaattattgctgatccaaagacagaccacagactgggaaaagttggaagatgaacacttgaggacttcagcttctcacctacttagtacagttgggaaccatacacttctggcatgtttggaaatcaaaatgtcacattctcgggggaggaagcccagaaaattgggtatgttctagagatttaccaccattgcttattgcttttttctttaataaagtttaggaaagtagaaaaaaagtgagttggaaaaaaaagtcgaaa

SEQ ID NO: 302667 - DNA, 894 bp, Homo sapiens
ccgttacttacagtgtgcttcaccctgcgatacgataatccagaatttacaaacttcatcgttcggcttgacgaccaaaaaatcaggcactactctgattgatcatcgcaggaatttacgaacacatccacagtagccacgggcccctcttctttcaaccgtctcgcatacatgttaaccgtcctttcatcattcaacgatcgtcatcgtctctaacgatcgtggtctgctggtttagctgttagacttgactatcgagattatgctgaaaaatacaaggatttagtacctgataattcaaaaactgctgacaatgcaactaaaaatgcagaaccattgatcaatttggatgtaaataatcctgattttaaggctggtgtgatggctttggctaacctgcttcagattcagcgtcatgatgattacctggtaatgcttaaggcaattcggattttggttcaggagcgcctgacacaggatgcagttgctaaggcaaatcaaacaaaagagggcttacctgttgctttagacaaacatattcttggttttgacacaggagatgcagttcttaatgaagctgctcaaattctgcgattgctgcacatagaggagctcagagagctacagacaaaaatcaacgaagccatagtagctgttcaggcaattattgctgatccaaagacagaccacagactgggaaaagttggaagatgaacacttgaggacttcagcttctcacctacttagtacagttgggaaccatacacttctggcatgtttggaaatcaaaatgtcacattctcgggggaggaagcccagaaaattgggtatgttctagagatttaccaccattgcttattgcttttttctttaataaagtttaggaaagtagaa

SEQ ID NO: 302668 - DNA, 425 bp, Homo sapiens
ttttacagactgaatacttgggaggaaataaataaatggccttaaatgtaaaaattatgtattgaagcagtgttcttttctcataaaacaatgcagttcttaatgaagctgctcaaattctgcgattgctgcacatagaggagctcagagagctacagacaaaaatcaacgaagccatagtagctgttcaggcaattattgctgatccaaagacagaccacagactgggaaaagttggaagatgaacacttgaggacttcagcttctcacctacttagtacagttgggaaccatacacttctggcatgtttggaaatcaaaatgtcacattctcgggggaggaagcccagaaaattgggtatgttctagagatttaccaccattgcttattgcttttttctttaataaagtttaggaaagtagaa

SEQ ID NO: 302669 - DNA, 1076 bp, Homo sapiens
gcggccaccgttttaaccacgattggcgaagcgccgtcatttcggagcgactcagcgcctgcccgccctctcgccgcgtcgccggtgcctgcgcctcccgctccacctcgcttcttctctcccggccgaggcccgggggaccagagcgagaagcggggaccatgttccgacgcaagttgacggctctcgactaccacaaccccgccggcttcaactgcaaagatgaaacagaatttagaaacttcatcgtttggcttgaagaccagaaaatcaggcactacaagattgaagacagagggaatttaagaaacatccacagcagcgactggcccaagttctttgaaaagtatctcagagatgttaactgtcctttcaagattcaagatcgacaagaagctattgactggcttcttggtttagctgttagacttgaatatggagataatgctgaaaaatacaaggatttagtacctgataattcaaaaactgctgacaatgcaactaaaaatgcagaaccattgatcaatttggatgtaaataatcctgattttaaggctggtgtgatggctttggctaacctgcttcagattcagcgtcatgatgattacctggtaatgcttaaggcaattcggattttggttcaggagcgcctgacacaggatgcagttgctaaggcaaatcaaacaaaagagggcttacctgttgctttagacaaacatattcttggttttgacacaggagatgcagttcttaatgaagctgctcaaattctgcgattgctgcacatagaggagctcagagagctacagacaaaaatcaacgaagccatagtagctgttcaggcaattattgctgatccaaagacagaccacagactgggaaaagttggaagatgaacacttgaggacttcagcttctcacctacttagtacagttgggaaccatacacttctggcatgtttggaaatcaaaatgtcacattctcgggggaggaagcccagaaaattgggtatgttctagagatttaccaccattgcttattgcttttttctttaataaagtttaggaaagtagaa

SEQ ID NO: 302670 - DNA, 1051 bp, Homo sapiens
cggattccgcaccaaggctcgtgccggaacggctggccggccttttggcggggtcgccggtgcctgcgcctcccgctccacctcgcttcttctctcccggccgaggcccgggggaccagagcgagaagcggggaccatgttccgacgcaagttgacggctctcgactaccacaaccccgccggcttcaactgcaaagatgaaacagaatttagaaacttcatcgtttggcttgaagaccagaaaatcaggcactacaagattgaagacagagggaatttaagaaacatccacagcagcgactggcccaagttctttgaaaagtatctcagagatgttaactgtcctttcaagattcaagatcgacaagaagctattgactggcttcttggtttagctgttagacttgaatatggagataatgctgaaaaatacaaggatttagtacctgataattcaaaaactgctgacaatgcaactaaaaatgcagaaccattgatcaatttggatgtaaataatcctgattttaaggctggtgtgatggctttggctaacctgcttcagattcagcgtcatgatgattacctggtaatgcttaaggcaattcggattttggttcaggagcgcctgacacaggatgcagttgctaaggcaaatcaaacaaaagagggcttacctgttgctttagacaaacatattcttggttttgacacaggagatgcagttcttaatgaagctgctcaaattctgcgattgctgcacatagaggagctcagagagctacagacaaaaatcaacgaagccatagtagctgttcaggcaattattgctgatccaaagacagaccacagactgggaaaagttggaagatgaacacttgaggacttcagcttctcacctacttagtacagttgggaaccatacacttctggcatgtttggaaatcaaaatgtcacattctcgggggaggaagcccagaaaattgggtatgttctagagatttaccaccattgcttattgcttttttctttaataaagtttaggaaagtagaa

SEQ ID NO: 302671 - DNA, 1206 bp, Homo sapiens
gcggccaccgttttaaccacgattggcgaagcgccgtcatttcggagcgactcagcgcctgcccgccctctcgccgcgtcgccggtgcctgcgcctcccgctccacctcgcttcttctctcccggccgaggcccgggggaccagagcgagaagcggggaccatgttccgacgcaagttgacggctctcgactaccacaaccccgccggcttcaactgcaaagatgaaacagaatttagaaacttcatcgtttggcttgaagaccagaaaatcaggcactacaagattgaagacagagggaatttaagaaacatccacagcagcgactggcccaagttctttgaaaagtatctcagagatgttaactgtcctttcaagattcaagatcgacaagaagctattgactggcttcttggtttagctgttagacttgaatatggagataatgctgaaaaatacaaggatttagtacctgataattcaaaaactgctgacaatgcaactaaaaatgcagaaccattgatcaatttggatgtaaataatcctgattttaaggctggtgtgatggctttggctaacctgcttcagattcagcgtcatgatgattacctggtaatgcttaaggcaattcggattttggttcaggagcgcctgacacaggatgcagttgctaaggcaaatcaaacaaaagagggcttacctgttgctttagacaaacatattcttggttttgacacaggagatgcagttcttaatgaagctgctcaaattctgcgattgctgcacatagaggagctcagagagctacagacaaaaatcaacgaagccatagtagctgttcaggcaattattgctgatccaaagacagaccacagactgggaaaagttggaagatgaacacttgaggacttcagcttctcacctacttagtacagttgggaaccatacacttctggcatgtttggaaatcaaaatgtcacattctcgggggaggaagcccagaaaattgggtatgttctagagatttaccaccattgcttattgcttttttctttaataaagtttaggaaagtagaagtcgaccaaccaccccccccaccccccccacaaaaaaacccggggcttttttcgcgggggccaaacaggttaagcgcacgccacgttttccccccttttttgcacaggggaaaacggcccctaaggggca

SEQ ID NO: 302672 - DNA, 1365 bp, Homo sapiens
  misc_feature (1077)..(1077): n is a, c, g, or t
gcggccaccgttttaaccacgattggcgaagcgccgtcatttcggagcgactcagcgcctgcccgccctctcgccgcgtcgccggtgcctgcgcctcccgctccacctcgcttcttctctcccggccgaggcccgggggaccagagcgagaagcggggaccatgttccgacgcaagttgacggctctcgactaccacaaccccgccggcttcaactgcaaagatgaaacagaatttagaaacttcatcgtttggcttgaagaccagaaaatcaggcactacaagattgaagacagagggaatttaagaaacatccacagcagcgactggcccaagttctttgaaaagtatctcagagatgttaactgtcctttcaagattcaagatcgacaagaagctattgactggcttcttggtttagctgttagacttgaatatggagataatgctgaaaaatacaaggatttagtacctgataattcaaaaactgctgacaatgcaactaaaaatgcagaaccattgatcaatttggatgtaaataatcctgattttaaggctggtgtgatggctttggctaacctgcttcagattcagcgtcatgatgattacctggtaatgcttaaggcaattcggattttggttcaggagcgcctgacacaggatgcagttgctaaggcaaatcaaacaaaagagggcttacctgttgctttagacaaacatattcttggttttgacacaggagatgcagttcttaatgaagctgctcaaattctgcgattgctgcacatagaggagctcagagagctacagacaaaaatcaacgaagccatagtagctgttcaggcaattattgctgatccaaagacagaccacagactgggaaaagttggaagatgaacacttgaggacttcagcttctcacctacttagtacagttgggaaccatacacttctggcatgtttggaaatcaaaatgtcacattctcgggggaggaagcccagaaaattgggtatgttctagagatttaccaccattgcttattgcttttttctttaataaagtttaggaaagtagaanaaaacacacaaacaccacaaaccaaccccaaacaacacttgggggggcgccacgggcctggaaaaaaaggtttcaaaaccccattcctggggggccccgcggccaagtgaggtaattgaacactgggcacacgtggtccaaagaaacacccggcactgagacacagggcgggtctcccaccaataaaaaacggcggggggcgaccggcggttcgcaacaatccagagggggtccgcggctcacgggtctcacacgggatcaggaggctatacccacgccgccacggga

SEQ ID NO: 302673 - DNA, 1588 bp, Homo sapiens
gcggccaccgttttaaccacgattggcgaagcgccgtcatttcggagcgactcagcgcctgcccgccctctcgccgcgtcgccggtgcctgcgcctcccgctccacctcgcttcttctctcccggccgaggcccgggggaccagagcgagaagcggggaccatgttccgacgcaagttgacggctctcgactaccacaaccccgccggcttcaactgcaaagatgaaacagaatttagaaacttcatcgtttggcttgaagaccagaaaatcaggcactacaagattgaagacagagggaatttaagaaacatccacagcagcgactggcccaagttctttgaaaagtatctcagagatgttaactgtcctttcaagattcaagatcgacaagaagctattgactggcttcttggtttagctgttagacttgaatatggagataatgctgaaaaatacaaggatttagtacctgataattcaaaaactgctgacaatgcaactaaaaatgcagaaccattgatcaatttggatgtaaataatcctgattttaaggctggtgtgatggctttggctaacctgcttcagattcagcgtcatgatgattacctggtaatgcttaaggcaattcggattttggttcaggagcgcctgacacaggatgcagttgctaaggcaaatcaaacaaaagagggcttacctgttgctttagacaaacatattcttggttttgacacaggagatgcagttcttaatgaagctgctcaaattctgcgattgctgcacatagaggagctcagagagctacagacaaaaatcaacgaagccatagtagctgttcaggcaattattgctgatccaaagacagaccacagactgggaaaagttggaagatgaacacttgaggacttcagcttctcacctacttagtacagttgggaaccatacacttctggcatgtttggaaatcaaaatgtcacattctcgggggaggaagcccagaaaattgggtatgttctagagatttaccaccattgcttattgcttttttctttaataaagtttaggaaagtagaaaaaaaaaaagtaaaaaaaacaagagaaaatacaaagggggggggggagacactaaagagaaatcccgagagggggcgcaagataaggcggaaccaagtttattatgtgcacaaaggggcgccactaatagagaggcgagataatagagaagagggacagagcacaagagagaaaaacacaggcagaagagagtggggcaacaaggtgggtgatatggttgagggacacatcttgtgggaggagggaaccccttatatagtagggggggaggagaaggggacaaaataataggtgggggagcaaaatattaccacctaagagaagagtatttgaagcacccatgagggggaaacataaatagacaatgttgaagagggtgaattcaatggctgttaaaaacagatcgtgggaattatggtatggagagcttagaaaaaatatgtagaagaaaggtagatattgtgtttaaggacaatttttttaatcagagggtaggatgagtagaatataag

SEQ ID NO: 302674 - DNA, 1289 bp, Homo sapiens
gcggccaccgttttaaccacgattggcgaagcgccgtcatttcggagcgactcagcgcctgcccgccctctcgccgcgtcgccggtgcctgcgcctcccgctccacctcgcttcttctctcccggccgaggcccgggggaccagagcgagaagcggggaccatgttccgacgcaagttgacggctctcgactaccacaaccccgccggcttcaactgcaaagatgaaacagaatttagaaacttcatcgtttggcttgaagaccagaaaatcaggcactacaagattgaagacagagggaatttaagaaacatccacagcagcgactggcccaagttctttgaaaagtatctcagagatgttaactgtcctttcaagattcaagatcgacaagaagctattgactggcttcttggtttagctgttagacttgaatatggagataatgctgaaaaatacaaggatttagtacctgataattcaaaaactgctgacaatgcaactaaaaatgcagaaccattgatcaatttggatgtaaataatcctgattttaaggctggtgtgatggctttggctaacctgcttcagattcagcgtcatgatgattacctggtaatgcttaaggcaattcggattttggttcaggagcgcctgacacaggatgcagttgctaaggcaaatcaaacaaaagagggcttacctgttgctttagacaaacatattcttggttttgacacaggagatgcagttcttaatgaagctgctcaaattctgcgattgctgcacatagaggagctcagagagctacagacaaaaatcaacgaagccatagtagctgttcaggcaattattgctgatccaaagacagaccacagactgggaaaagttggaagatgaacacttgaggacttcagcttctcacctacttagtacagttgggaaccatacacttctggcatgtttggaaatcaaaatgtcacattctcgggggaggaagcccagaaaattgggtatgttctagagatttaccaccattgcttattgcttttttctttaataaagtttaggaaagtagaaaaatatcaataattatatctacctacacttcactcatcttcacccccctctcccctctcttccttccctctatacctctcctcatttaccttctatccctcccttccccttactgccctctcttctctacccctcctctttctttctctccattttttgtcctcccctccccctcctattttcatctccttccttcttgtttcctcctcctcc

SEQ ID NO: 302675 - DNA, 1124 bp, Homo sapiens
  misc_feature (137)..(137): n is a, c, g, or t
  misc_feature (139)..(139): n is a, c, g, or t
  misc_feature (142)..(142): n is a, c, g, or t
gtctcgtgtcgtcgtgttgtgttgtctgcttgttgcttgtgtcgtgcttgttctgtttctgctgtcgtcgttctttctcgcgcttcttcgttccttgctgtggtcgtcttttttgtttgtctttctgctgtgtctcncnagntgtttggtcttagtcccgaccgcgcgccatccccgtcccaccggtgttctttgtttggtgaatcgtgggtttccctccccgcgtgcgctattttggcgcggattttctagctcgagggtcggtgtgtcccccccccgtggttcctcgcatgtcccacgttaaacctcctgtgcttaaacccaaactcgccctccaagtgaaacagaggattaagaacatcccacaccaccgactgccccagttctttgaaaagtatctcagagatgttaactgtcctttcaagattcaagatcgacaagaagctattgactggcttcttggtttagctgttagacttgaatatggagataatgctgaaaaatacaaggatttagtacctgataattcaaaaactgctgacaatgcaactaaaaatgcagaaccattgatcaatttggatgtaaataatcctgattttaaggctggtgtgatggctttggctaacctgcttcagattcagcgtcatgatgattacctggtaatgcttaaggcaattcggattttggttcaggagcgcctgacacaggatgcagttgctaaggcaaatcaaacaaaagagggcttacctgttgctttagacaaacatattcttggttttgacacaggagatgcagttcttaatgaagctgctcaaattctgcgattgctgcacatagaggagctcagagagctacagacaaaaatcaacgaagccatagtagctgttcaggcaattattgctgatccaaagacagaccacagactgggaaaagttggaagatgaacacttgaggacttcagcttctcacctacttagtacagttgggaaccatacacttctggcatgtttggaaatcaaaatgtcacattctcgggggaggaagcccagaaaattgggtatgttctagagatttaccaccattgcttattgcttttttctttaataaagtttaggaaagtagaa

SEQ ID NO: 302676 - DNA, 981 bp, Homo sapiens
gcggccaccgttttaaccacgattggcgaagcgccgtcatttcggagcgactcagcgcctgcccgccctctcgccgcgtcgccggtgcctgcgcctcccgctccacctcgcttcttctctcccggccgaggcccgggggaccagagcgagaagcggggaccatgttccgacgcaagttgacggctctcgactaccacaaccccgccggcttcaactgcaaagatgaaacagaatttagaaacttcatcgtttggcttgaagaccagaaaatcaggcactacaagattgaagacagagggaatttaagaaacatccacagcagcgactggcccaagttctttgaaaagtatctcagagatgttaactgtcctttcaagattcaagatcgacaagaagctattgactggcttcttggtttagctgttagacttgaatatggagataatgctgaaaaatacaaggatttagtacctgataattcaaaaactgctgacaatgcaactaaaaatgcagaaccattgatcaatttggatgtaaataatcctgattttaaggctggtgtgatggctttggctaacctgcttcagattcagcgtcatgatgattacctggtaatgcttaaggcaattcggattttggttcaggagcgcctgacacaggatgcagttgctaaggcaaatcaaacaaaagagggcttacctgttgctttagacaaacatattcttggttttgacacaggagatgcagttcttaatgaagctgctcaaattctgcgattgctgcacatagaggagctcagagagctacagacaaaaatcaacgaagccatagtagctgttcaggcaattattgacttctggcatgtttggaaatcaaaatgtcacattctcgggggaggaagcccagaaaattgggtatgttctagagatttaccaccattgcttattgcttttttctttaataaagtttaggaaagtagaa

SEQ ID NO: 302677 - DNA, 718 bp, Homo sapiens
atgggaaagtcggaagatgaacacttgaggacttcagcttctcacctacttagtacagttgggaacattcacctctggtggagataatgctgaaaaatacaaggatttagtacctgataattcaaaaactgctgacaatgcaactaaaaatgcagaaccattgatcaatttggatgtaaataatcctgattttaaggctggtgtgatggctttggctaacctgcttcagattcagcgtcatgatgattacctggtaatgcttaaggcaattcggattttggttcaggagcgcctgacacaggatgcagttgctaaggcaaatcaaacaaaagagggcttacctgttgctttagacaaacatattcttggttttgacacaggagatgcagttcttaatgaagctgctcaaattctgcgattgctgcacatagaggagctcagagagctacagacaaaaatcaacgaagccatagtagctgttcaggcaattattgctgatccaaagacagaccacagactgggaaaagttggaagatgaacacttgaggacttcagcttctcacctacttagtacagttgggaaccatacacttctggcatgtttggaaatcaaaatgtcacattctcgggggaggaagcccagaaaattgggtatgttctagagatttaccaccattgcttattgcttttttctttaataaagtttaggaaagtagaa

SEQ ID NO: 302678 - DNA, 652 bp, Homo sapiens
tatatttttgcctgtttttatagctgaaaaatacaaggatttagtacctgataattcaaaaactgctgacaatgcaactaaaaatgcagaaccattgatcaatttggatgtaaataatcctgattttaaggctggtgtgatggctttggctaacctgcttcagattcagcgtcatgatgattacctggtaatgcttaaggcaattcggattttggttcaggagcgcctgacacaggatgcagttgctaaggcaaatcaaacaaaagagggcttacctgttgctttagacaaacatattcttggttttgacacaggagatgcagttcttaatgaagctgctcaaattctgcgattgctgcacatagaggagctcagagagctacagacaaaaatcaacgaagccatagtagctgttcaggcaattattgctgatccaaagacagaccacagactgggaaaagttggaagatgaacacttgaggacttcagcttctcacctacttagtacagttgggaaccatacacttctggcatgtttggaaatcaaaatgtcacattctcgggggaggaagcccagaaaattgggtatgttctagagatttaccaccattgcttattgcttttttctttaataaagtttaggaaagtagaa

SEQ ID NO: 302679 - DNA, 1074 bp, Homo sapiens
gcggccaccgttttaaccacgattggcgaagcgccgtcatttcggagcgactcagcgcctgcccgccctctcgccgcgtcgccggtgcctgcgcctcccgctccacctcgcttcttctctcccggccgaggcccgggggaccagagcgagaagcggggaccatgttccgacgcaagttgacggctctcgactaccacaaccccgccggcttcaactgcaaagatgaaacagaatttagaaacttcatcgtttggcttgaagaccagaaaatcaggcactacaagattgaagacagagggaatttaagaaacatccacagcagcgactggcccaagttctttgaaaagtatctcagagatgttaactgtcctttcaagattcaagatcgacaagaagctattgactggcttcttggtttagctgttagacttgaatatggagataatgctgaaaaatacaaggatttagtacctgataattcaaaaactgctgacaatgcaactaaaaatgcagaaccattgatcaatttggatgtaaataatcctgattttaaggctggtgtgatggctttggctaacctgcttcagattcagcgtcatgatgattacctggtaatgcttaaggcaattcggattttggttcaggagcgcctgacacaggatgcagttgctaaggcaaatcaaacaaaagagggcttacctgttgctttagacaaacatattcttggttttgacacaggagcatcccacctccgccccctccgtgcacatcctgtcatctcccagttcattcgtggaaccagacaggccaggcaaccagtggcccccaaaggcaggcaggatcctcaggccccatcctcggaaggctggaagggatggcagatcgcttccctcatccacctccaccggtccaggtttttgatgctgtccccagacctcgtgtcacaccacgccagatcacagggcaccaggccagagatagttttctttttgtcctttctggcctctgggtagtcagtttttcatagccttccagtatctggctttgtattgagaaataaaacacattttcata

SEQ ID NO: 302680 - DNA, 1088 bp, Homo sapiens
tctcgtttccgttttccttctttttgcgttgtccttgtcttttccttccccttccatttttttaaaatttgatttttaagtgtgtatggatacttgcatgcatgcctaccataatgaaatgccttggtgattaaaaccaccaacggtgtcctttgaaaggtttgaaaatattttactagagtgaagtgataaaagcaaagtgtaagacagtatgtatgatctgctaccctttgtgtcaaaaatgtgtattcgtgctaagcatgctcgtcatttcgcagttttagtgagggtaaggaatctgtaggggatcgcaaggctcaggtaggaaggagacctactttttaccatgtgtcttgctgtatttaaagttgttttttaccagtcacgtgcattacctattcaaaaaatggttttaattgttgcaagcaccattcaacattattaaaatactagaagtgtgaaaggttacgttatattagtgggttttttttatttttaatttaatggggagtttattaatgaacttaggtaattctgacttcatcaaaatgagcatccttattctctgggctcatagaagaaaggatgacaggtacacagcctataaaaagtaaaaatatttttgggtttcttaggcaattcggattttggttcaggagcgcctgacacaggatgcagttgctaaggcaaatcaaacaaaagagggcttacctgttgctttagacaaacatattcttggttttgacacaggagatgcagttcttaatgaagctgctcaaattctgcgattgctgcacatagaggagctcagagagctacagacaaaaatcaacgaagccatagtagctgttcaggcaattattgctgatccaaagacagaccacagactgggaaaagttggaagatgaacacttgaggacttcagcttctcacctacttagtacagttgggaaccatacacttctggcatgtttggaaatcaaaatgtcacattctcgggggaggaagcccagaaaattgggtatgttctagagatttaccaccattgcttattgcttttttctttaataaagtttaggaaagtagaa

SEQ ID NO: 302681 - DNA, 687 bp, Homo sapiens
taatgacaaggcactgctgcaataaggatatattgttttgtatgcctgggctaaaggattggatgagctatagagcttcctggtacatttaaaggttaacttttccccctaaccggttgaaatagggaaaactcgctaatcacaatcatcacaaagcaaatataaacaaaattcctagttcccttgcccatgcagctaaaagagttaagacaccagaatagctaggtgcttttcagtttcagttgaggaaaggatgctattcttaaccataaatactctcgttttgtctttctttttttaaagggcttacctgttgctttagacaaacatattcttggttttgacacaggagatgcagttcttaatgaagctgctcaaattctgcgattgctgcacatagaggagctcagagagctacagacaaaaatcaacgaagccatagtagctgttcaggcaattattgctgatccaaagacagaccacagactgggaaaagttggaagatgaacacttgaggacttcagcttctcacctacttagtacagttgggaaccatacacttctggcatgtttggaaatcaaaatgtcacattctcgggggaggaagcccagaaaattgggtatgttctagagatttaccaccattgcttattgcttttttctttaataaagtttaggaaagtagaa

SEQ ID NO: 302682 - DNA, 866 bp, Homo sapiens
tctcgtttccgttttccttctttttgcgttgtccttgtcttttccttccccttccatttttttaaaatttgatttttaagtgtgtatggatacttgcatgcatgcctaccataatgaaatgccttggtgattaaaaccaccaacggtgtcctttgaaaggtttgaaaatattttactagagtgaagtgataaaagcaaagtgtaagacagtatgtatgatctgctaccctttgtgtcaaaaatgtgtattcgtgctaagcatgctcgtcatttcgcagttttagtgagggtaaggaatctgtaggggatcgcaaggctcaggtaggaaggagacctactttttaccatgtgtcttgctgtatttaaagttgttttttaccagtcacgtgcattacctattcaaaaaatggttttaattgttgcaagcaccattcaacattattaaaatactagaagtgtgaaaggttacgttatattagtgggttttttttatttttaatttaatggggagtttattaatgaacttaggtaattctgacttcatcaaaatgagcatccttattctctgggctcatagaagaaaggatgacaggtacacagcctataaaaagtaaaaatatttttgggtttcttaggcaattcggattttggttcaggagcgcctgacacaggatgcagttgctaaggcaaatcaaacaaaagaggtacgtttctataaatcctaaataagttgttaatgaacatttcttctggtatggccatgattttaaactttgcatgtatctgtttaagatatccattctacgttctacaacttagagaaaggatagcttacttcagtgcttcctaaagcaaattgaatgtat

SEQ ID NO: 302683 - DNA, 746 bp, Homo sapiens
ggcttgttctttattccgacaattatgtaaattgccttggaactgttctatagtgatcatgtcagctttaatcataaagtaagtgagaggagagtcagacaatgcatagcgtatttgggatgcttttgttagacttcaaaacccaaggggataaagtataaatcaactacaacaaaatgctataaaattctagtcctgctgcacatttgtcccttttgagttattttaagaggcattcaaacaataacataatatggaaaacatcttagtacgtttgccaagtacaagcatcagtatattaactgtttggcaaccagactatttaataacatctgcaataactgttaaacattgtttgaattcggtttttcaaagatagcatttggttttttatttaaaaattatagtttaagttttcacacttatttttgagttgtaattgtcatcttcctaattaaaattccatttttttaaaatttgatttttaagtgtgtatggatacttgcatgcatgcctaccataatgaaatgccttggtgattaaaaccaccaacggtgtcctttgaaaggtttgaaaatattttactagagtgaagtgataaaagcaaagtgtaagacagtatgtatgatctgctaccctttgtgtcaaaaatgtgtattcgtgctaagcatgctcgtcatttcgcagttttagtgagggtaaggaatctgtaggggatcgcaaggctcaggtaggaaggagaccta

SEQ ID NO: 302684 - DNA, 1027 bp, Homo sapiens
gcggccaccgttttaaccacgattggcgaagcgccgtcatttcggagcgactcagcgcctgcccgccctctcgccgcgtcgccggtgcctgcgcctcccgctccacctcgcttcttctctcccggccgaggcccgggggaccagagcgagaagcggggaccatgttccgacgcaagttgacggctctcgactaccacaaccccgccggcttcaactgcaaagatgaaacagaatttagaaacttcatcgtttggcttgaagaccagaaaatcaggcactacaagattgaagacagagggaatttaagaaacatccacagcagcgactggcccaagttctttgaaaagtatctcagagatgttaactgtcctttcaagattcaagatcgacaagaagctattgactggcttcttggtttagctgttagacttgaatatggagataatgctgaaaaatacaaggatttagtacctgataattcaaaaactgctgacaatgcaactaaaaatgcagaaccattgatcaatttggatgtaaataatcctgattttaaggctggtgtgatggctttggctaacctgcttcagattcagcgtcatgatgattacctggtaatgcttaaggcaattcggattttggttcaggagcgcctgacacaggatgcagttgctaaggcaaatcaaacaaaagagatgcagttcttaatgaagctgctcaaattctgcgattgctgcacatagaggagctcagagagctacagacaaaaatcaacgaagccatagtagctgttcaggcaattattgctgatccaaagacagaccacagactgggaaaagttggaagatgaacacttgaggacttcagcttctcacctacttagtacagttgggaaccatacacttctggcatgtttggaaatcaaaatgtcacattctcgggggaggaagcccagaaaattgggtatgttctagagatttaccaccattgcttattgcttttttctttaataaagtttaggaaagtagaa

SEQ ID NO: 302685 - DNA, 684 bp, Homo sapiens
gcggccaccgttttaaccacgattggcgaagcgccgtcatttcggagcgactcagcgcctgcccgccctctcgccgcgtcgccggtgcctgcgcctcccgctccacctcgcttcttctctcccggccgaggcccgggggaccagagcgagaagcggggaccatgttccgacgcaagttgacggctctcgactaccacaaccccgccggcttcaactgcaaagatgaaacagaatttagaaacttcatcgtttggcttgaagaccagaaaatcaggcactacaagattgaagacagagggaatttaagaaacatccacagcagcgactggcccaagttctttgaaaagtatctcagagatgttaactgtcctttcaagattcaagatcgacaagaagctattgactggcttcttggtttagctgttagacttgaatatggagataatgctgaaaaatacaaggatttagtacctgataattcaaaaactgctgacaatgcaactaaaaatgcagaaccattgatcaatttggatgtaaataatcctgattttaaggctggtgtgatggctttggctaacctgcttcagattcagcgtcatgatgattacctggtaatgcttaaggcaattcggattttggttcagggcagttgctaaggcaaatcaaacaaaagagggcttacct

SEQ ID NO: 302686 - DNA, 1853 bp, Homo sapiens
ggggctgcgccgggttccgtgtgtctatgtcaatgtgtctgtccttcactcctccattgtctgccgccactgctgctgctgctgctgctgccgctgctgctgcacgaatcgtcgcagcccccagccttgcgcgtcgtcgctacctcctcggacagaaattttatgaataagcatcagaagccagtgctaacaggccagcggttcaaaactcggaaaagggatgaaaaagagaaattcgaacccacagtcttcagggatacacttgtccaggggcttaatgaggctggtgatgaccttgaagctgtagccaaatttctggactctacaggctcaagattagattatcgtcgctatgcagacacactcttcgatatcctggtggctggcagtatgcttgcccctggaggaacgcgcatagatgatggtgacaagaccaagatgaccaaccactgtgtgttttcagcaaatgaagatcatgaaaccatccgaaactatgctcaggtcttcaataaactcatcaggagatataagtatttggagaaggcatttgaagatgaaatgaaaaagcttctcctcttccttaaagccttttccgaaacagagcagacaaagttggcgatgctgtcggggattctgctgggcaatggcaccctgcccgccaccatcctcaccagtctcttcaccgacagcttagtcaaagaaggcattgcggcctcatttgctgtcaagcttttcaaagcatggatggcagaaaaagatgccaactctgttacctcgtctttgagaaaagccaacttagacaagaggctgcttgaactctttccagttaacagacagagtgtggatcattttgctaaatacttcactgacgcaggtcttaaggagctttccgacttcctccgagtccagcagtccctgggcaccaggaaggaactgcagaaggagctccaggagcgtctttctcaggaatgcccgatcaaggaggtggtgctttatgtcaaagaagaaatgaagaggaatgatcttccagaaacagcagtgattggtcttctgtggacatgtataatgaacgctgttgagtggaacaagaaggaagaacttgttgcagagcaggctctgaagcacctgaagcaatatgctcccctgctggccgtgttcagctcccaaggccagtcagagctgatcctcctccagaaggttcaggaatactgctacgacaacatccatttcatgaaagcctttcagaagattgtggttctcttttataaagctgatgttctgagcgaagaagcaatactgaaatggtataaggaagcacatgttgctaaaggcaaaagtgtttttcttgaccagatgaagaaatttgttgagtggttacaaaatgcagaagaagaatccgaatcggaaggtgaggaaaattaaatggctcaacaagcacaatacctaggttaccacacaccactttttgattgggaatgctgaaccatttgagaagagaaacttggcttctgttttcgcaaaggaaaaaaaaaataggataggcttcccttgtgcagagggagaaatggttttgtttttgttttgtttttaaatggagccctgaggcatcagctattatacttgggactctacctctcactcactatatgctaacttaaagccattcaacaaggagtcaagtagatctgaaattaaatactcaacagactcctccttttttagctgtatttttcaggtactgtgtggtgaccgccccactggtgtctattacaggccactttggtagttgtgtatctgctcatgtatgtgatttgacaaaccagttttttaaaataaatggctttttaaaaatc

SEQ ID NO: 302687 - DNA, 1093 bp, Homo sapiens
caattaatgttatgttgagaatatcaaggcacatttgtggaatttagagttttagacaaaagatagttaacattttttgttgtttttagaaacctgtaggaaattagctaatatgtctattttgtcttaatgtagtagaggaaaaatattactcttgtaatttgggatatactgtgggaaaataagtcgtgatttagtgatggagaaagtgtagaacttcagtttaggtgtgtattactcccacaacatagcccagaagttcctctttatatctaattgctaacatcattattgcatactatctacatttttttcctttgtcatttttctcctaaaaaaagaaaatcccaatctccttaaaagacactggtcatttgaggttactctttaatcaagatatggttgaacttggcaggacccaaaatgttctaaaatgctggaattgctggttcatttgcaaaattacaaaacaattctatttcctaccagcaaattagcactgtgagagatttccaagtcctagtagtgagctataggcttgcattatatcatgcctaagaagatgtatatcatcatcatcagtacttaagcctttagtaagctatcaaaatatggcactatgctacatgaaaatcaacttggttcctctcttctgataagtaacagaatgctttatatttaaaatgattgctttctattaaactgtaatacatgaagttgttttgaaacatgacatttgtatagtaactttgaaatctttgatttaaaattgcagctgatgttctgagcgaagaagcaatactgaaatggtataaggaagcacatgttgctaaaggcaaaagtgtttttcttgaccagatgaagaaatttgttgagtggttacaaaatgcagaagaaggtatgattctgtttacaaacattgatgacctttaaacactgtctcattatatgtcaaaatatttacctcttccacagattttacttgattttctaaaactaaaattctagagttatctttcgtatcaaacattttgccaacatcttagctttcctttctgaaatcacggcaataaaaatctctacatgtaaaaac

SEQ ID NO: 302688 - DNA, 607 bp, Homo sapiens
gttgtccacctagagtagaatctgtcctgcactttgctctcctccccatcacatcgttgtctaagtggttatatctttaacaccttcatttccgtgatttttactgctatattcttgaatgaatttgttttatcttacgtgtacattttgatcatatttgttcccctaggtcatgatagcatctttgaaatgcttatagttcttatattacagtgtgagcctgtttaactatacacttttattattatagatctatggtgtcattatagtgagtttctattacctacttctgtgtctttttggttgacctaatatttaatggttgttttttttttaggtcttcaataaactcatcaggagatataagtatttggagaaggcatttgaagatgaaatgaaaaaggtaaaaattcaaatataatgcctatctgttttatagtaatgacatgggggtggataaaaattttataagtggccggacacggtggctcacgcctgtaatcccagcactttgggaggccgagacgggtgggtcacaaggtcaggagtttaagaccagcctggccaagatgctgaaaccctgtctctactaaaaacacaaaaatta

SEQ ID NO: 302689 - DNA, 1915 bp, Homo sapiens
  misc_feature (1903)..(1903): n is a, c, g, or t
ggggctgcgccgggttccgtgtgtctatgtcaatgtgtctgtccttcactcctccattgtctgccgccactgctgctgctgctgctgctgccgctgctgctgcacgaatcgtcgcagcccccagccttgcgcgtcgtcgctacctcctcggacagaaattttatgaataagcatcagaagccagtgctaacaggccagcggttcaaaactcggaaaagggatgaaaaagagaaattcgaacccacagtcttcagggatacacttgtccaggggcttaatgaggctggtgatgaccttgaagctgtagccaaatttctggactctacaggctcaagattagattatcgtcgctatgcagacacactcttcgatatcctggtggctggcagtatgcttgcccctggaggaacgcgcatagatgatggtgacaagaccaagatgaccaaccactgtgtgttttcagcaaatgaagatcatgaaaccatccgaaactatgctcaggtcttcaataaactcatcaggagatataagtatttggagaaggcatttgaagatgaaatgaaaaagcttctcctcttccttaaagccttttccgaaacagagcagacaaagttggcgatgctgtcggggattctgctgggcaatggcaccctgcccgccaccatcctcaccagtctcttcaccgacagcttagtcaaagaaggcattgcggcctcatttgctgtcaagcttttcaaagcatggatggcagaaaaagatgccaactctgttacctcgtctttgagaaaagccaacttagacaagaggctgcttgaactctttccagttaacagacagagtgtggatcattttgctaaatacttcactgacgcaggtcttaaggagctttccgacttcctccgagtccagcagtccctgggcaccaggaaggaactgcagaaggagctccaggagcgtctttctcaggaatgcccgatcaaggaggtggtgctttatgtcaaagaagaaatgaagaggaatgatcttccagaaacagcagtgattggtcttctgtggacatgtataatgaacgctgttgagtggaacaagaaggaagaacttgttgcagagcaggctctgaagcacctgaagcaatatgctcccctgctggccgtgttcagctcccaaggccagtcagagctgatcctcctccagaaggttcaggaatactgctacgacaacatccatttcatgaaagcctttcagaagattgtggttctcttttataaagctgatgttctgagcgaagaagcaatactgaaatggtataaggaagcacatgttgctaaaggcaaaagtgtttttcttgaccagatgaagaaatttgttgagtggttacaaaatgcagaagaagaatccgaatcggaaggtgaggaaaattaaatggctcaacaagcacaatacctaggttaccacacaccactttttgattgggaatgctgaaccatttgagaagagaaacttggcttctgttttcgcaaaggaaaaaaaaaataggataggcttcccttgtgcagagggagaaatggttttgtttttgttttgtttttaaatggagccctgaggcatcagctattatacttgggactctacctctcactcactatatgctaacttaaagccattcaacaaggagtcaagtagatctgaaattaaatactcaacagactcctccttttttagctgtatttttcaggtactgtgtggtgaccgccccactggtgtctattacaggccactttggtagttgtgtatctgctcatgtatgtgatttgacaaaccagttttttaaaataaatggctttttaaaaatcaaaaaaaaaaacaaaaaaaacaaaaaaaataaataaaaaaaataaacaanaacaaacaaaaa

SEQ ID NO: 302690 - DNA, 2027 bp, Homo sapiens
  misc_feature (2017)..(2017): n is a, c, g, or t
ggggctgcgccgggttccgtgtgtctatgtcaatgtgtctgtccttcactcctccattgtctgccgccactgctgctgctgctgctgctgccgctgctgctgcacgaatcgtcgcagcccccagccttgcgcgtcgtcgctacctcctcggacagaaattttatgaataagcatcagaagccagtgctaacaggccagcggttcaaaactcggaaaagggatgaaaaagagaaattcgaacccacagtcttcagggatacacttgtccaggggcttaatgaggctggtgatgaccttgaagctgtagccaaatttctggactctacaggctcaagattagattatcgtcgctatgcagacacactcttcgatatcctggtggctggcagtatgcttgcccctggaggaacgcgcatagatgatggtgacaagaccaagatgaccaaccactgtgtgttttcagcaaatgaagatcatgaaaccatccgaaactatgctcaggtcttcaataaactcatcaggagatataagtatttggagaaggcatttgaagatgaaatgaaaaagcttctcctcttccttaaagccttttccgaaacagagcagacaaagttggcgatgctgtcggggattctgctgggcaatggcaccctgcccgccaccatcctcaccagtctcttcaccgacagcttagtcaaagaaggcattgcggcctcatttgctgtcaagcttttcaaagcatggatggcagaaaaagatgccaactctgttacctcgtctttgagaaaagccaacttagacaagaggctgcttgaactctttccagttaacagacagagtgtggatcattttgctaaatacttcactgacgcaggtcttaaggagctttccgacttcctccgagtccagcagtccctgggcaccaggaaggaactgcagaaggagctccaggagcgtctttctcaggaatgcccgatcaaggaggtggtgctttatgtcaaagaagaaatgaagaggaatgatcttccagaaacagcagtgattggtcttctgtggacatgtataatgaacgctgttgagtggaacaagaaggaagaacttgttgcagagcaggctctgaagcacctgaagcaatatgctcccctgctggccgtgttcagctcccaaggccagtcagagctgatcctcctccagaaggttcaggaatactgctacgacaacatccatttcatgaaagcctttcagaagattgtggttctcttttataaagctgatgttctgagcgaagaagcaatactgaaatggtataaggaagcacatgttgctaaaggcaaaagtgtttttcttgaccagatgaagaaatttgttgagtggttacaaaatgcagaagaagaatccgaatcggaaggtgaggaaaattaaatggctcaacaagcacaatacctaggttaccacacaccactttttgattgggaatgctgaaccatttgagaagagaaacttggcttctgttttcgcaaaggaaaaaaaaaataggataggcttcccttgtgcagagggagaaatggttttgtttttgttttgtttttaaatggagccctgaggcatcagctattatacttgggactctacctctcactcactatatgctaacttaaagccattcaacaaggagtcaagtagatctgaaattaaatactcaacagactcctccttttttagctgtatttttcaggtactgtgtggtgaccgccccactggtgtctattacaggccactttggtagttgtgtatctgctcatgtatgtgatttgacaaaccagttttttaaaataaatggctttttaaaaatcaaaggaattccatgacatttaccaagaagatcaacaaagactgtaggtcttgtgtttcttcatgcctaaaatttgaagaccaatttaaattctctggtttttctgcttgggtggttggtagaggttagtcttttcatttagatgataaggttgttgtatatggnttatcagaat

SEQ ID NO: 302691 - DNA, 1834 bp, Homo sapiens
ggggctgcgccgggttccgtgtgtctatgtcaatgtgtctgtccttcactcctccattgtctgccgccactgctgctgctgctgctgctgccgctgctgctgcacgaatcgtcgcagcccccagccttgcgcgtcgtcgctacctcctcggacagaaattttatgaataagcatcagaagccagtgctaacaggccagcggttcaaaactcggaaaagggatgaaaaagagaaattcgaacccacagtcttcagggatacacttgtccaggggcttaatgaggctggtgatgaccttgaagctgtagccaaatttctggactctacaggctcaagattagattatcgtcgctatgcagacacactcttcgatatcctggtggctggcagtatgcttgcccctggaggaacgcgcatagatgatggtgacaagaccaagatgaccaaccactgtgtgttttcagcaaatgaagatcatgaaaccatccgaaactatgctcaggtcttcaataaactcatcaggagatataagtatttggagaaggcatttgaagatgaaatgaaaaagccttttccgaaacagagcagacaaagttggcgatgctgtcggggattctgctgggcaatggcaccctgcccgccaccatcctcaccagtctcttcaccgacagcttagtcaaagaaggcattgcggcctcatttgctgtcaagcttttcaaagcatggatggcagaaaaagatgccaactctgttacctcgtctttgagaaaagccaacttagacaagaggctgcttgaactctttccagttaacagacagagtgtggatcattttgctaaatacttcactgacgcaggtcttaaggagctttccgacttcctccgagtccagcagtccctgggcaccaggaaggaactgcagaaggagctccaggagcgtctttctcaggaatgcccgatcaaggaggtggtgctttatgtcaaagaagaaatgaagaggaatgatcttccagaaacagcagtgattggtcttctgtggacatgtataatgaacgctgttgagtggaacaagaaggaagaacttgttgcagagcaggctctgaagcacctgaagcaatatgctcccctgctggccgtgttcagctcccaaggccagtcagagctgatcctcctccagaaggttcaggaatactgctacgacaacatccatttcatgaaagcctttcagaagattgtggttctcttttataaagctgatgttctgagcgaagaagcaatactgaaatggtataaggaagcacatgttgctaaaggcaaaagtgtttttcttgaccagatgaagaaatttgttgagtggttacaaaatgcagaagaagaatccgaatcggaaggtgaggaaaattaaatggctcaacaagcacaatacctaggttaccacacaccactttttgattgggaatgctgaaccatttgagaagagaaacttggcttctgttttcgcaaaggaaaaaaaaaataggataggcttcccttgtgcagagggagaaatggttttgtttttgttttgtttttaaatggagccctgaggcatcagctattatacttgggactctacctctcactcactatatgctaacttaaagccattcaacaaggagtcaagtagatctgaaattaaatactcaacagactcctccttttttagctgtatttttcaggtactgtgtggtgaccgccccactggtgtctattacaggccactttggtagttgtgtatctgctcatgtatgtgatttgacaaaccagttttttaaaataaatggctttttaaaaatc

SEQ ID NO: 302692 - DNA, 1719 bp, Homo sapiens
tagacaggagcagtcattcccttgtagggacaactagaagaaattttatgaataagcatcagaagccagtgctaacaggccagcggttcaaaactcggaaaagggatgaaaaagagaaattcgaacccacagtcttcagggatacacttgtccaggggcttaatgaggctggtgatgaccttgaagctgtagccaaatttctggactctacaggctcaagattagattatcgtcgctatgcagacacactcttcgatatcctggtggctggcagtatgcttgcccctggaggaacgcgcatagatgatggtgacaagaccaagatgaccaaccactgtgtgttttcagcaaatgaagatcatgaaaccatccgaaactatgctcaggtcttcaataaactcatcaggagatataagtatttggagaaggcatttgaagatgaaatgaaaaagccttttccgaaacagagcagacaaagttggcgatgctgtcggggattctgctgggcaatggcaccctgcccgccaccatcctcaccagtctcttcaccgacagcttagtcaaagaaggcattgcggcctcatttgctgtcaagcttttcaaagcatggatggcagaaaaagatgccaactctgttacctcgtctttgagaaaagccaacttagacaagaggctgcttgaactctttccagttaacagacagagtgtggatcattttgctaaatacttcactgacgcaggtcttaaggagctttccgacttcctccgagtccagcagtccctgggcaccaggaaggaactgcagaaggagctccaggagcgtctttctcaggaatgcccgatcaaggaggtggtgctttatgtcaaagaagaaatgaagaggaatgatcttccagaaacagcagtgattggtcttctgtggacatgtataatgaacgctgttgagtggaacaagaaggaagaacttgttgcagagcaggctctgaagcacctgaagcaatatgctcccctgctggccgtgttcagctcccaaggccagtcagagctgatcctcctccagaaggttcaggaatactgctacgacaacatccatttcatgaaagcctttcagaagattgtggttctcttttataaagctgatgttctgagcgaagaagcaatactgaaatggtataaggaagcacatgttgctaaaggcaaaagtgtttttcttgaccagatgaagaaatttgttgagtggttacaaaatgcagaagaagaatccgaatcggaaggtgaggaaaattaaatggctcaacaagcacaatacctaggttaccacacaccactttttgattgggaatgctgaaccatttgagaagagaaacttggcttctgttttcgcaaaggaaaaaaaaaataggataggcttcccttgtgcagagggagaaatggttttgtttttgttttgtttttaaatggagccctgaggcatcagctattatacttgggactctacctctcactcactatatgctaacttaaagccattcaacaaggagtcaagtagatctgaaattaaatactcaacagactcctccttttttagctgtatttttcaggtactgtgtggtgaccgccccactggtgtctattacaggccactttggtagttgtgtatctgctcatgtatgtgatttgacaaaccagttttttaaaataaatggctttttaaaaatc

SEQ ID NO: 302693 - DNA, 1717 bp, Homo sapiens
ggggctgcgccgggttccgtgtgtctatgtcaatgtgtctgtccttcactcctccattgtctgccgccactgctgctgctgctgctgctgccgctgctgctgcacgaatcgtcgcagcccccagccttgcgcgtcgtcgctacctcctcggacagaaattttatgaataagcatcagaagccagtgctaacaggccagcggttcaaaactcggaaaagggatgaaaaagagaaattcgaacccacagtcttcagggatacacttgtccaggggcttaatgaggctggtgatgaccttgaagctgtagccaaatttctggactctacaggctcaagattagattatcgtcgctatgcagacacactcttcgatatcctggtggctggcagtatgcttgcccctggaggaacgcgcatagatgatggtgacaagaccaagatgaccaaccactgtgtgttttcagcaaatgaagatcatgaaaccatccgaaactatgctcaggtcttcaataaactcatcaggagatataagtatttggagaaggcatttgaagatgaaatgaaaaaggcattgcggcctcatttgctgtcaagcttttcaaagcatggatggcagaaaaagatgccaactctgttacctcgtctttgagaaaagccaacttagacaagaggctgcttgaactctttccagttaacagacagagtgtggatcattttgctaaatacttcactgacgcaggtcttaaggagctttccgacttcctccgagtccagcagtccctgggcaccaggaaggaactgcagaaggagctccaggagcgtctttctcaggaatgcccgatcaaggaggtggtgctttatgtcaaagaagaaatgaagaggaatgatcttccagaaacagcagtgattggtcttctgtggacatgtataatgaacgctgttgagtggaacaagaaggaagaacttgttgcagagcaggctctgaagcacctgaagcaatatgctcccctgctggccgtgttcagctcccaaggccagtcagagctgatcctcctccagaaggttcaggaatactgctacgacaacatccatttcatgaaagcctttcagaagattgtggttctcttttataaagctgatgttctgagcgaagaagcaatactgaaatggtataaggaagcacatgttgctaaaggcaaaagtgtttttcttgaccagatgaagaaatttgttgagtggttacaaaatgcagaagaagaatccgaatcggaaggtgaggaaaattaaatggctcaacaagcacaatacctaggttaccacacaccactttttgattgggaatgctgaaccatttgagaagagaaacttggcttctgttttcgcaaaggaaaaaaaaaataggataggcttcccttgtgcagagggagaaatggttttgtttttgttttgtttttaaatggagccctgaggcatcagctattatacttgggactctacctctcactcactatatgctaacttaaagccattcaacaaggagtcaagtagatctgaaattaaatactcaacagactcctccttttttagctgtatttttcaggtactgtgtggtgaccgccccactggtgtctattacaggccactttggtagttgtgtatctgctcatgtatgtgatttgacaaaccagttttttaaaataaatggctttttaaaaatc

SEQ ID NO: 302694 - DNA, 1358 bp, Homo sapiens
caattaatgttatgttgagaatatcaaggcacatttgtggaatttagagttttagacaaaagatagttaacattttttgttgtttttagaaacctgtaggaaattagctaatatgtctattttgtcttaatgtagtagaggaaaaatattactcttgtaatttgggatatactgtgggaaaataagtcgtgatttagtgatggagaaagtgtagaacttcagtttaggtgtgtattactcccacaacatagcccagaagttcctctttatatctaattgctaacatcattattgcatactatctacatttttttcctttgtcatttttctcctaaaaaaagaaaatcccaatctccttaaaagacactggtcatttgaggttactctttaatcaagatatggttgaacttggcaggacccaaaatgttctaaaatgctggaattgctggttcatttgcaaaattacaaaacaattctatttcctaccagcaaattagcactgtgagagatttccaagtcctagtagtgagctataggcttgcattatatcatgcctaagaagatgtatatcatcatcatcagtacttaagcctttagtaagctatcaaaatatggcactatgctacatgaaaatcaacttggttcctctcttctgataagtaacagaatgctttatatttaaaatgattgctttctattaaactgtaatacatgaagttgttttgaaacatgacatttgtatagtaactttgaaatctttgatttaaaattgcagctgatgttctgagcgaagaagcaatactgaaatggtataaggaagcacatgttgctaaaggcaaaagtgtttttcttgaccagatgaagaaatttgttgagtggttacaaaatgcagaagaagaatccgaatcggaaggtgaggaaaattaaatggctcaacaagcacaatacctaggttaccacacaccactttttgattgggaatgctgaaccatttgagaagagaaacttggcttctgttttcgcaaaggaaaaaaaaaataggataggcttcccttgtgcagagggagaaatggttttgtttttgttttgtttttaaatggagccctgaggcatcagctattatacttgggactctacctctcactcactatatgctaacttaaagccattcaacaaggagtcaagtagatctgaaattaaatactcaacagactcctccttttttagctgtatttttcaggtactgtgtggtgaccgccccactggtgtctattacaggccactttggtagttgtgtatctgctcatgtatgtgatttgacaaaccagttttttaaaataaatggctttttaaaaatc

SEQ ID NO: 302695 - DNA, 633 bp, Homo sapiens
  misc_feature (148)..(148): n is a, c, g, or t
  misc_feature (162)..(162): n is a, c, g, or t
cggaacgttgaggccaatatgacgtgaagtcgtggaagcctgtggctacaaaaaatgttgagccgtcaatccgtcggaaatggtgaagggagactcgaagtactctgaggcttgtaggagggtaaaatagagacccagtaaaattgtngagtggttacaaantgcagaagaagaatccgaatcggaaggtgaggaaaattaaatggctcaacaagcacaatacctaggttaccacacaccactttttgattgggaatgctgaaccatttgagaagagaaacttggcttctgttttcgcaaaggaaaaaaaaaataggataggcttcccttgtgcagagggagaaatggttttgtttttgttttgtttttaaatggagccctgaggcatcagctattatacttgggactctacctctcactcactatatgctaacttaaagccattcaacaaggagtcaagtagatctgaaattaaatactcaacagactcctccttttttagctgtatttttcaggtactgtgtggtgaccgccccactggtgtctattacaggccactttggtagttgtgtatctgctcatgtatgtgatttgacaaaccagttttttaaaataaatggctttttaaaaatc

SEQ ID NO: 302696 - DNA, 799 bp, Homo sapiens
aggtgatccaaagaagaaaagttatattgtttaattttatatatattcaaatttttatataatttatatgtataaatttaatatatataaaatgtattcatttataggtatttgtatatgtatgcatgttgcatttttagacaggcaaaatttacgtgaaagcagaaaagagcaagagtttgctatctgccctcatgtgactattttaccttataatgggtgcctagggtaaaagtatgctggcgcaatggcagggttctgggttggtgactgtagtaacttttgaccttaattagaggaatctgggaggaaatatctcacttctttcttctctcctagaatccgaatcggaaggtgaggaaaattaaatggctcaacaagcacaatacctaggttaccacacaccactttttgattgggaatgctgaaccatttgagaagagaaacttggcttctgttttcgcaaaggaaaaaaaaaataggataggcttcccttgtgcagagggagaaatggttttgtttttgttttgtttttaaatggagccctgaggcatcagctattatacttgggactctacctctcactcactatatgctaacttaaagccattcaacaaggagtcaagtagatctgaaattaaatactcaacagactcctccttttttagctgtatttttcaggtactgtgtggtgaccgccccactggtgtctattacaggccactttggtagttgtgtatctgctcatgtatgtgatttgacaaaccagttttttaaaataaatggctttttaaaaatc

SEQ ID NO: 302697 - DNA, 591 bp, Homo sapiens
  misc_feature (106)..(106): n is a, c, g, or t
  misc_feature (120)..(120): n is a, c, g, or t
cttatgcatagggtgtgggtcttcgaaacagagattcatagaatttgaaatggacgaaagatgtgcacaattaagataaaataaaagggagatgaagatgtgtgtngagtggttacaaantgcagaagaagaatccgaatcggaaggtgaggaaaattaaatggctcaacaagcacaatacctaggttaccacacaccactttttgattgggaatgctgaaccatttgagaagagaaacttggcttctgttttcgcaaaggaaaaaaaaaataggataggcttcccttgtgcagagggagaaatggttttgtttttgttttgtttttaaatggagccctgaggcatcagctattatacttgggactctacctctcactcactatatgctaacttaaagccattcaacaaggagtcaagtagatctgaaattaaatactcaacagactcctccttttttagctgtatttttcaggtactgtgtggtgaccgccccactggtgtctattacaggccactttggtagttgtgtatctgctcatgtatgtgatttgacaaaccagttttttaaaataaatggctttttaaaaatc

SEQ ID NO: 302698 - DNA, 2386 bp, Homo sapiens
  misc_feature (1108)..(1108): n is a, c, g, or t
  misc_feature (1693)..(1693): n is a, c, g, or t
ggggctgcgccgggttccgtgtgtctatgtcaatgtgtctgtccttcactcctccattgtctgccgccactgctgctgctgctgctgctgccgctgctgctgcacgaatcgtcgcagcccccagccttgcgcgtcgtcgctacctcctcggacagaaattttatgaataagcatcagaagccagtgctaacaggccagcggttcaaaactcggaaaagggatgaaaaagagaaattcgaacccacagtcttcagggatacacttgtccaggggcttaatgaggctggtgatgaccttgaagctgtagccaaatttctggactctacaggctcaagattagattatcgtcgctatgcagacacactcttcgatatcctggtggctggcagtatgcttgcccctggaggaacgcgcatagatgatggtgacaagaccaagatgaccaaccactgtgtgttttcagcaaatgaagatcatgaaaccatccgaaactatgctcaggtcttcaataaactcatcaggagatataagtatttggagaaggcatttgaagatgaaatgaaaaagcttctcctcttccttaaagccttttccgaaacagagcagacaaagttggcgatgctgtcggggattctgctgggcaatggcaccctgcccgccaccatcctcaccagtctcttcaccgacagcttagtcaaagaaggtaacgaggctcctgttttctcgcctgtcagacaacaaaagaaaaataaagtcacagatagttagaaaaatgccagtggctctttttggtgtcctctattactcattcttcatttaagagaatatctttgtatgggtgtatattgcctttcaaataataaaaggagtggacttgttaattgtaggaagtttgaaggaaaaaatatgcacacctgtacaaagacatattaagaaagactaatagcaaattaaaatctcatggaagacttgatgcctaggtcaaataccccgaaatcgatctggtaatctttttgcccttcgacacaaaatggcagcctttaactttcacccctattataagaacaaaaactgttcccctctcaaggtctagagaaactgatgctcngatattcattttgattgcactttttaagatactcattgtctcagttttagaaaacaattttaagtctgctgcattagaaggagtcttgttttaattttaaggcattaagggttggataggcatgcataccatggtttggttatagaataaaataaaagtcggctgtttacttgtaggaggataatgatagtcaaattacaatgcaacacaaaacagttatttttccttaaaaataaattaaaagagcttttgtgagaacatctgtttcttctgagaacttaaagttttcctcctacatatatgaagtcctagcttcattcatgcctatagtgaaagaaaggagtcatagttttcttgtagctaaggaaagaatagtaaattgagagtcaattggtcttattcagagactcttcctagtttttagcttaaaatcactcagatttatgacaattcagactctgtaattgttagatgttattagtattatgacattttaaagtatttccctgaagaaaattcacaatacaacacacatcttatttttgctattagccattttgcacacagaaagtcaacatagaatanaaatgttaatcattaattattttaaattatcctagccaacataacagaaaataattgcctttctagtttttttaaaaacctaagtgatgtctgtaacttcctttgtaatatatccaaaaattacgttattaggtggatagatatctgataaagcaaatacggcaaaatattagttatagaaactagatggtgggcatgtgaatgttcattgttcaatttgttcaacttttctgtatgtctggaaattattgtagtaaaatgtttggggggtggtgaggagaaaaataactttgctatggaagtaacatagtacctctgttatatggcttttccttaaactctgccatcttttacaaactagaggtttaaacccttgcttcctaattggaaaaggattaagaaaatgctgggtatggtaactcatgcctgtaatcctaacactttgggaagctgaggtaaaaaaattgcttgaggccaggagtttgagaccagtctgggaaacaaagcaagactctcttctctacaaaaaaaaatttaaaaactagccaggtgtgttggcacacctgtacaatcccagctgctcaggagactaaggcaagaggattgcttgagcccaggagtttggggctacagtgagctataatcacatcatcttactacagcctgggcaacagagaaagactatctaaaata

SEQ ID NO: 302699 - DNA, 589 bp, Homo sapiens
ggggctgcgccgggttccgtgtgtctatgtcaatgtgtctgtccttcactcctccattgtctgccgccactgctgctgctgctgctgctgccgctgctgctgcacgaatcgtcgcagcccccagccttgcgcgtcgtcgctacctcctcggacagaaattttatgaataagcatcagaagccagtgctaacaggccagcggttcaaaactcggaaaagggatgaaaaagagaaattcgaacccacagtcttcagggatacacttgtccaggggcttaatgaggctggtgatgaccttgaagctgtagccaaatttctggactctacaggctcaagattagattatcgtcgctatgcagacacactcttcgatatcctggtggctggcagtatgcttgcccctggaggaacgcgcatagatgatggtgacaagaccaagatgaccaaccactgtgtgttttcagcaaatgaagatcatgaaaccatccgaaactatgctcagcttcaataaactcatcaggagatttaaggaagaggagaagctttttcatttcatcttcaaatgccttctccaaatacttatatgtcga

SEQ ID NO: 302700 - DNA, 220 bp, Homo sapiens
aaattttatgaataagcatcagaagccagtgctaacaggccagcggttcaaaactcggaaaaggggtaggttgtgtgtgtgtgtgtgtgtgtgtttaaagttgtaaccaaaatataagattggagaagaatctgaatgatccctgtttcccccagcctcactgattctactcatttgagctctgagtgtagaatctgaagtgctttagtgaaaccataga

SEQ ID NO: 302701 - DNA, 2271 bp, Homo sapiens
  misc_feature (993)..(993): n is a, c, g, or t
  misc_feature (1578)..(1578): n is a, c, g, or t
tagacaggagcagtcattcccttgtagggacaactagaagaaattttatgaataagcatcagaagccagtgctaacaggccagcggttcaaaactcggaaaagggatgaaaaagagaaattcgaacccacagtcttcagggatacacttgtccaggggcttaatgaggctggtgatgaccttgaagctgtagccaaatttctggactctacaggctcaagattagattatcgtcgctatgcagacacactcttcgatatcctggtggctggcagtatgcttgcccctggaggaacgcgcatagatgatggtgacaagaccaagatgaccaaccactgtgtgttttcagcaaatgaagatcatgaaaccatccgaaactatgctcaggtcttcaataaactcatcaggagatataagtatttggagaaggcatttgaagatgaaatgaaaaagcttctcctcttccttaaagccttttccgaaacagagcagacaaagttggcgatgctgtcggggattctgctgggcaatggcaccctgcccgccaccatcctcaccagtctcttcaccgacagcttagtcaaagaaggtaacgaggctcctgttttctcgcctgtcagacaacaaaagaaaaataaagtcacagatagttagaaaaatgccagtggctctttttggtgtcctctattactcattcttcatttaagagaatatctttgtatgggtgtatattgcctttcaaataataaaaggagtggacttgttaattgtaggaagtttgaaggaaaaaatatgcacacctgtacaaagacatattaagaaagactaatagcaaattaaaatctcatggaagacttgatgcctaggtcaaataccccgaaatcgatctggtaatctttttgcccttcgacacaaaatggcagcctttaactttcacccctattataagaacaaaaactgttcccctctcaaggtctagagaaactgatgctcngatattcattttgattgcactttttaagatactcattgtctcagttttagaaaacaattttaagtctgctgcattagaaggagtcttgttttaattttaaggcattaagggttggataggcatgcataccatggtttggttatagaataaaataaaagtcggctgtttacttgtaggaggataatgatagtcaaattacaatgcaacacaaaacagttatttttccttaaaaataaattaaaagagcttttgtgagaacatctgtttcttctgagaacttaaagttttcctcctacatatatgaagtcctagcttcattcatgcctatagtgaaagaaaggagtcatagttttcttgtagctaaggaaagaatagtaaattgagagtcaattggtcttattcagagactcttcctagtttttagcttaaaatcactcagatttatgacaattcagactctgtaattgttagatgttattagtattatgacattttaaagtatttccctgaagaaaattcacaatacaacacacatcttatttttgctattagccattttgcacacagaaagtcaacatagaatanaaatgttaatcattaattattttaaattatcctagccaacataacagaaaataattgcctttctagtttttttaaaaacctaagtgatgtctgtaacttcctttgtaatatatccaaaaattacgttattaggtggatagatatctgataaagcaaatacggcaaaatattagttatagaaactagatggtgggcatgtgaatgttcattgttcaatttgttcaacttttctgtatgtctggaaattattgtagtaaaatgtttggggggtggtgaggagaaaaataactttgctatggaagtaacatagtacctctgttatatggcttttccttaaactctgccatcttttacaaactagaggtttaaacccttgcttcctaattggaaaaggattaagaaaatgctgggtatggtaactcatgcctgtaatcctaacactttgggaagctgaggtaaaaaaattgcttgaggccaggagtttgagaccagtctgggaaacaaagcaagactctcttctctacaaaaaaaaatttaaaaactagccaggtgtgttggcacacctgtacaatcccagctgctcaggagactaaggcaagaggattgcttgagcccaggagtttggggctacagtgagctataatcacatcatcttactacagcctgggcaacagagaaagactatctaaaata

SEQ ID NO: 302702 - DNA, 2158 bp, Homo sapiens
ggggctgcgccgggttccgtgtgtctatgtcaatgtgtctgtccttcactcctccattgtctgccgccactgctgctgctgctgctgctgccgctgctgctgcacgaatcgtcgcagcccccagccttgcgcgtcgtcgctacctcctcggacagaaattttatgaataagcatcagaagccagtgctaacaggccagcggttcaaaactcggaaaagggatgaaaaagagaaattcgaacccacagtcttcagggatacacttgtccaggggcttaatgaggctggtgatgaccttgaagctgtagccaaatttctggactctacaggctcaagattagattatcgtcgctatgcagacacactcttcgatatcctggtggctggcagtatgcttgcccctggaggaacgcgcatagatgatggtgacaagaccaagatgaccaaccactgtgtgttttcagcaaatgaagatcatgaaaccatccgaaactatgctcaggtcttcaataaactcatcaggagatataagtatttggagaaggcatttgaagatgaaatgaaaaagcttctcctcttccttaaagccttttccgaaacagagcagacaaagttggcgatgctgtcggggattctgctgggcaatggcaccctgcccgccaccatcctcaccagtctcttcaccgacagcttagtcaaagaaggcattgcggcctcatttgctgtcaagcttttcaaagcatggatggcagaaaaagatgccaactctgttacctcgtctttgagaaaagccaacttagacaagaggctgcttgaactctttccagttaacagacagagtgtggatcattttgctaaatacttcactgacgcaggtcttaaggagctttccgacttcctccgagtccagcagtccctgggcaccaggaaggaactgcagaaggagctccaggagcgtctttctcaggaatgcccgatcaaggaggtggtgctttatgtcaaagaagaaatgaagaggaatgatcttccagaaacagcagtgattggtcttctgtggacatgtataatgaacgctgttgagtggaacaagaaggaagaacttgttgcagagcaggctctgaagcacctgaagcaatatgctcccctgctggccgtgttcagctcccaaggccagtcagagctgatcctcctccagaaggttcaggaatactgctacgacaacatccatttcatgaaagcctttcagaagattgtggttctcttttataaagctgatgttctgagcgaagaagcaatactgaaatggtataaggaagcacatgttgctaaaggcaaaagtgtttttcttgaccagatgaagaaatttgttgagtggttacaaaatgcagaagaagaatccgaatcggaaggtgaggaaaattaaatggctcaacaagcacaatacctaggttaccacacaccactttttgattgggaatgctgaaccatttgagaagagaaacttggcttctgttttcgcaaaggaaaaaaaaaataggataggcttcccttgtgcagagggagaaatggttttgtttttgttttgtttttaaatggagccctgaggcatcagctattatacttgggactctacctctcactcactatatgctaacttaaagccattcaacaaggagtcaagtagatctgaaattaaatactcaacagactcctccttttttagctgtatttttcaggtactgtgtggtgaccgccccactggtgtctattacaggccactttggtagttgtgtatctgctcatgtatgtgatttgacaaaccagttttttaaaataaatggctttttaaaaatcaaagaaaaaagaaagaagacaagagaaagaaaagaagagaacacagaaaaaaaaaagaacgtgttaggaggacaacagcaacgcgagagaaaagctaaaaaacacaggtagagcagcgcggggccccaaaaagtacaacgacaaagaggacaaaaaatataacaaaaaagaacctgtgcaacaaacacgcgccgggtaatacacacaaaaaaaaacccccgtgaacacgacagaagtgaacaagaccaacagcagggacgcagagaccaaaggggacaccaagggagcaagaagccacataaaca

SEQ ID NO: 302703 - DNA, 2026 bp, Homo sapiens
ggggctgcgccgggttccgtgtgtctatgtcaatgtgtctgtccttcactcctccattgtctgccgccactgctgctgctgctgctgctgccgctgctgctgcacgaatcgtcgcagcccccagccttgcgcgtcgtcgctacctcctcggacagaaattttatgaataagcatcagaagccagtgctaacaggccagcggttcaaaactcggaaaagggatgaaaaagagaaattcgaacccacagtcttcagggatacacttgtccaggggcttaatgaggctggtgatgaccttgaagctgtagccaaatttctggactctacaggctcaagattagattatcgtcgctatgcagacacactcttcgatatcctggtggctggcagtatgcttgcccctggaggaacgcgcatagatgatggtgacaagaccaagatgaccaaccactgtgtgttttcagcaaatgaagatcatgaaaccatccgaaactatgctcaggtcttcaataaactcatcaggagatataagtatttggagaaggcatttgaagatgaaatgaaaaagcttctcctcttccttaaagccttttccgaaacagagcagacaaagttggcgatgctgtcggggattctgctgggcaatggcaccctgcccgccaccatcctcaccagtctcttcaccgacagcttagtcaaagaaggcattgcggcctcatttgctgtcaagcttttcaaagcatggatggcagaaaaagatgccaactctgttacctcgtctttgagaaaagccaacttagacaagaggctgcttgaactctttccagttaacagacagagtgtggatcattttgctaaatacttcactgacgcaggtcttaaggagctttccgacttcctccgagtccagcagtccctgggcaccaggaaggaactgcagaaggagctccaggagcgtctttctcaggaatgcccgatcaaggaggtggtgctttatgtcaaagaagaaatgaagaggaatgatcttccagaaacagcagtgattggtcttctgtggacatgtataatgaacgctgttgagtggaacaagaaggaagaacttgttgcagagcaggctctgaagcacctgaagcaatatgctcccctgctggccgtgttcagctcccaaggccagtcagagctgatcctcctccagaaggttcaggaatactgctacgacaacatccatttcatgaaagcctttcagaagattgtggttctcttttataaagctgatgttctgagcgaagaagcaatactgaaatggtataaggaagcacatgttgctaaaggcaaaagtgtttttcttgaccagatgaagaaatttgttgagtggttacaaaatgcagaagaagaatccgaatcggaaggtgaggaaaattaaatggctcaacaagcacaatacctaggttaccacacaccactttttgattgggaatgctgaaccatttgagaagagaaacttggcttctgttttcgcaaaggaaaaaaaaaataggataggcttcccttgtgcagagggagaaatggttttgtttttgttttgtttttaaatggagccctgaggcatcagctattatacttgggactctacctctcactcactatatgctaacttaaagccattcaacaaggagtcaagtagatctgaaattaaatactcaacagactcctccttttttagctgtatttttcaggtactgtgtggtgaccgccccactggtgtctattacaggccactttggtagttgtgtatctgctcatgtatgtgatttgacaaaccagttttttaaaataaatggctttttaaaaatcaaacaaaaaaaagggaaaaaaaaaaaaaaatgttgggggggcgggccgaaaaaagttttaaaacattttgggggggggcccaaggatggaatgggtaggtgcaaggaacggtgaaaggggggtccccaaaaaaggggggaggggttgaaaccggggtgggcttggttaagcag

SEQ ID NO: 302704 - DNA, 1738 bp, Homo sapiens
tagacaggagcagtcattcccttgtagggacaactagaagaaattttatgaataagcatcagaagccagtgctaacaggccagcggttcaaaactcggaaaagggatgaaaaagagaaattcgaacccacagtcttcagggatacacttgtccaggggcttaatgaggctggtgatgaccttgaagctgtagccaaatttctggactctacaggctcaagattagattatcgtcgctatgcagacacactcttcgatatcctggtggctggcagtatgcttgcccctggaggaacgcgcatagatgatggtgacaagaccaagatgaccaaccactgtgtgttttcagcaaatgaagatcatgaaaccatccgaaactatgctcaggtcttcaataaactcatcaggagatataagtatttggagaaggcatttgaagatgaaatgaaaaagcttctcctcttccttaaagccttttccgaaacagagcagacaaagttggcgatgctgtcggggattctgctgggcaatggcaccctgcccgccaccatcctcaccagtctcttcaccgacagcttagtcaaagaaggcattgcggcctcatttgctgtcaagcttttcaaagcatggatggcagaaaaagatgccaactctgttacctcgtctttgagaaaagccaacttagacaagaggctgcttgaactctttccagttaacagacagagtgtggatcattttgctaaatacttcactgacgcaggtcttaaggagctttccgacttcctccgagtccagcagtccctgggcaccaggaaggaactgcagaaggagctccaggagcgtctttctcaggaatgcccgatcaaggaggtggtgctttatgtcaaagaagaaatgaagaggaatgatcttccagaaacagcagtgattggtcttctgtggacatgtataatgaacgctgttgagtggaacaagaaggaagaacttgttgcagagcaggctctgaagcacctgaagcaatatgctcccctgctggccgtgttcagctcccaaggccagtcagagctgatcctcctccagaaggttcaggaatactgctacgacaacatccatttcatgaaagcctttcagaagattgtggttctcttttataaagctgatgttctgagcgaagaagcaatactgaaatggtataaggaagcacatgttgctaaaggcaaaagtgtttttcttgaccagatgaagaaatttgttgagtggttacaaaatgcagaagaagaatccgaatcggaaggtgaggaaaattaaatggctcaacaagcacaatacctaggttaccacacaccactttttgattgggaatgctgaaccatttgagaagagaaacttggcttctgttttcgcaaaggaaaaaaaaaataggataggcttcccttgtgcagagggagaaatggttttgtttttgttttgtttttaaatggagccctgaggcatcagctattatacttgggactctacctctcactcactatatgctaacttaaagccattcaacaaggagtcaagtagatctgaaattaaatactcaacagactcctccttttttagctgtatttttcaggtactgtgtggtgaccgccccactggtgtctattacaggccactttggtagttgtgtatctgctcatgtatgtgatttgacaaaccagttttttaaaataaatggctttttaaaaatc

SEQ ID NO: 302705 - DNA, 1749 bp, Homo sapiens
ggggctgcgccgggttccgtgtgtctatgtcaatgtgtctgtccttcactcctccattgtctgccgccactgctgctgctgctgctgctgccgctgctgctgcacgaatcgtcgcagcccccagccttgcgcgtcgtcgctacctcctcggacagaaattttatgaataagcatcagaagccagtgctaacaggccagcggttcaaaactcggaaaagggatgaaaaagagaaattcgaacccacagtcttcagggatacacttgtccaggggcttaatgaggctggtgatgaccttgaagctgtagccaaatttctggactctacaggctcaagattagattatcgtcgctatgcagacacactcttcgatatcctggtggctggcagtatgcttggtcttcaataaactcatcaggagatataagtatttggagaaggcatttgaagatgaaatgaaaaagcttctcctcttccttaaagccttttccgaaacagagcagacaaagttggcgatgctgtcggggattctgctgggcaatggcaccctgcccgccaccatcctcaccagtctcttcaccgacagcttagtcaaagaaggcattgcggcctcatttgctgtcaagcttttcaaagcatggatggcagaaaaagatgccaactctgttacctcgtctttgagaaaagccaacttagacaagaggctgcttgaactctttccagttaacagacagagtgtggatcattttgctaaatacttcactgacgcaggtcttaaggagctttccgacttcctccgagtccagcagtccctgggcaccaggaaggaactgcagaaggagctccaggagcgtctttctcaggaatgcccgatcaaggaggtggtgctttatgtcaaagaagaaatgaagaggaatgatcttccagaaacagcagtgattggtcttctgtggacatgtataatgaacgctgttgagtggaacaagaaggaagaacttgttgcagagcaggctctgaagcacctgaagcaatatgctcccctgctggccgtgttcagctcccaaggccagtcagagctgatcctcctccagaaggttcaggaatactgctacgacaacatccatttcatgaaagcctttcagaagattgtggttctcttttataaagctgatgttctgagcgaagaagcaatactgaaatggtataaggaagcacatgttgctaaaggcaaaagtgtttttcttgaccagatgaagaaatttgttgagtggttacaaaatgcagaagaagaatccgaatcggaaggtgaggaaaattaaatggctcaacaagcacaatacctaggttaccacacaccactttttgattgggaatgctgaaccatttgagaagagaaacttggcttctgttttcgcaaaggaaaaaaaaaataggataggcttcccttgtgcagagggagaaatggttttgtttttgttttgtttttaaatggagccctgaggcatcagctattatacttgggactctacctctcactcactatatgctaacttaaagccattcaacaaggagtcaagtagatctgaaattaaatactcaacagactcctccttttttagctgtatttttcaggtactgtgtggtgaccgccccactggtgtctattacaggccactttggtagttgtgtatctgctcatgtatgtgatttgacaaaccagttttttaaaataaatggctttttaaaaatc

SEQ ID NO: 302706 - DNA, 1799 bp, Homo sapiens
ggggctgcgccgggttccgtgtgtctatgtcaatgtgtctgtccttcactcctccattgtctgccgccactgctgctgctgctgctgctgccgctgctgctgcacgaatcgtcgcagcccccagccttgcgcgtcgtcgctacctcctcggacagaaattttatgaataagcatcagaagccagtgctaacaggccagcggttcaaaactcggaaaagggatgaaaaagagaaattcgaacccacagtcttcagggatacacttgtccaggggcttaatgaggctggtgatgaccttgaagctgtagccaaatttctggactctacaggctcaagattagattatcgtcgctatgcagacacactcttcgatatcctggtggctggcagtatgcttgcccctggaggaacgcgcatagatgatggtgacaagaccaagatgaccaaccactgtgtgttttcagcaaatgaagatcatgaaaccatccgaaactatgctcaggtcttcaataaactcatcaggagatataagtatttggagaaggcatttgaagatgaaatgaaaaagcttctcctcttccttaaagccttttccgaaacagagcagacaaagttggcgatgctgtcggggattctgctgggcaatggcaccctgcccgccaccatcctcaccagtctcttcaccgacagcttagtcaaagaaggcattgcggcctcatttgctgtcaagcttttcaaagcatggatggcagaaaaagatgccaactctgttacctcgtctttgagtgtggatcattttgctaaatacttcactgacgcaggtcttaaggagctttccgacttcctccgagtccagcagtccctgggcaccaggaaggaactgcagaaggagctccaggagcgtctttctcaggaatgcccgatcaaggaggtggtgctttatgtcaaagaagaaatgaagaggaatgatcttccagaaacagcagtgattggtcttctgtggacatgtataatgaacgctgttgagtggaacaagaaggaagaacttgttgcagagcaggctctgaagcacctgaagcaatatgctcccctgctggccgtgttcagctcccaaggccagtcagagctgatcctcctccagaaggttcaggaatactgctacgacaacatccatttcatgaaagcctttcagaagattgtggttctcttttataaagctgatgttctgagcgaagaagcaatactgaaatggtataaggaagcacatgttgctaaaggcaaaagtgtttttcttgaccagatgaagaaatttgttgagtggttacaaaatgcagaagaagaatccgaatcggaaggtgaggaaaattaaatggctcaacaagcacaatacctaggttaccacacaccactttttgattgggaatgctgaaccatttgagaagagaaacttggcttctgttttcgcaaaggaaaaaaaaaataggataggcttcccttgtgcagagggagaaatggttttgtttttgttttgtttttaaatggagccctgaggcatcagctattatacttgggactctacctctcactcactatatgctaacttaaagccattcaacaaggagtcaagtagatctgaaattaaatactcaacagactcctccttttttagctgtatttttcaggtactgtgtggtgaccgccccactggtgtctattacaggccactttggtagttgtgtatctgctcatgtatgtgatttgacaaaccagttttttaaaataaatggctttttaaaaatc

SEQ ID NO: 302707 - DNA, 1338 bp, Homo sapiens
  misc_feature (1306)..(1306): n is a, c, g, or t
ggggctgcgccgggttccgtgtgtctatgtcaatgtgtctgtccttcactcctccattgtctgccgccactgctgctgctgctgctgctgccgctgctgctgcacgaatcgtcgcagcccccagccttgcgcgtcgtcgctacctcctcggacagaaattttatgaataagcatcagaagccagtgctaacaggccagcggttcaaaactcggaaaagggatgaaaaagagaaattcgaacccacagtcttcagggatacacttgtccaggggcttaatgaggctggtgatgaccttgaagctgtagccaaatttctggactctacaggctcaagattagattatcgtcgctatgcagacacactcttcgatatcctggtggctggcagtatgcttgcccctggaggaacgcgcatagatgatggtgacaagaccaagatgaccaaccactgtgtgttttcagcaaatgaagatcatgaaaccatccgaaactatgctcaggtcttcaataaactcatcaggagatataagtatttggagaaggcatttgaagatgaaatgaaaaagcttctcctcttccttaaagccttttccgaaacagagcagacaaagttggcgatgctgtcggggattctgctgggcaatggcaccctgcccgccaccatcctcaccagtctcttcaccgacagcttagtcaaagaaggcattgcggcctcatttgctgtcaagcttttcaaagcatggatggcagaaaaagatgccaactctgttacctcgtctttgagaaaagccaacttagacaagaggctgcttgaactctttccagttaacagacagagtgtggatcattttgctaaatacttcactgacgcaggtcttaaggagctttccgacttcctccgagtccagcagtccctgggcaccaggaaggaactgcagaaggagctccaggagcgtctttctcaggaatgcccgatcaaggaggtggtgctttatgtcaaagaagaaatgaagaggaatgatcttccagaaacagcagtgattggtcttctgtggacatgtataatgaacgctgttgagtggaacaagaaggaagaacttgttgcagagcaggctctgaagcacctgaagcaatatgctcccctgctggccgtgttcagctcccaaggccagtcagagctgatcctcctccagaaggttcaggaatactgctacgacaacatccatttcatgaaagcctttcagaagattgtggttctcttttataaagtcagtattgcttcttcgctcagaacatcagctttantcgtgccgattcggcacgagcggcacgagcct

SEQ ID NO: 302708 - DNA, 908 bp, Homo sapiens
  misc_feature (877)..(877): n is a, c, g, or t
gcgtgacagagcgctttacgacggagttgctttgaggcagtaccggaggagaaagatggcggctaccttactagctgctcggggagccgggccagcaccggcttgggggccggaggcgttcactccagactgggaaagccgagaagtttccactgggaccactatcatggccgtgcagtttgacgggggcgtggttctgggggcggactccagaacaaccactgggtcctacatcgccaatcgagtgactgacaagctgacacctattcacgaccgcattttctgctgtcgctcaggctcagctgctgatacccaggcagtagctgatgctgtcacctaccagctcggtttccacagcattgaactgaatgagcctccactggtccacacagcagccagcctctttaaggagatgtgttaccgataccgggaagacctgatggcgggaatcatcatcgcaggctgggaccctcaagaaggagggcaggtgtactcagtgcctatggggggtatgatggtaaggcagtcctttgccattggaggctccgggagctcctacatctatggctatgttgatgctacctaccgggaaggcatgaccaaggaagagtgtctgcaattcactgccaatgctctcgctttggccatggagcgggatggctccagtggaggagtgatccgcctggcagccattgcagagtcaggggtagagcggcaagtacttttgggagaccagatacccaaattcgccgttgccactttaccacccgcctgaatcctgggattctagtatgcaataagagatgccctgtactgatgcaaaatttaataaagtttgtcacagaggtggccagaatcaaaacaaaaaaaattgggngccccaaattaacacattggggcgaagaagt

SEQ ID NO: 302709 - DNA, 987 bp, Homo sapiens
gcgtgacagagcgctttacgacggagttgctttgaggcagtaccggaggagaaagatggcggctaccttactagctgctcggggagccgggccagcaccggcttgggggccggaggcgttcactccagactgggaaagccgagaagtttccactgggaccactatcatggccgtgcagtttgacgggggcgtggttctgggggcggactccagaacaaccactgggtcctacatcgccaatcgagtgactgacaagctgacacctattcacgaccgcattttctgctgtcgctcaggctcagctgctgatacccaggcagtagctgatgctgtcacctaccagctcggtttccacagcattgaactgaatgagcctccactggtccacacagcagccagcctctttaaggagatgtgttaccgataccgggaagacctgatggcgggaatcatcatcgcaggctgggaccctcaagaaggagggcaggtgtactcagtgcctatggggggtatgatggtaaggcagtcctttgccattggaggctccgggagctcctacatctatggctatgttgatgctacctaccgggaaggcatgaccaaggaagagtgtctgcaattcactgccaatgctctcgctttggccatggagcgggatggctccagtggaggagtgatccgcctggcagccattgcagagtcaggggtagagcggcaagtacttttgggagaccagatacccaaattcgccgttgccactttaccacccgcctgaatcctgggattctagtatgcaataagagatgccctgtactgatgcaaaatttaataaagtttgtcacagaggaaaacaaaaacaaactcgacgttagttggtggacaaaaatatatacccaccctcgatattgtaaggaactccagcattgggtgtacccgcacttgcttgtttgtgagtatgtgtcgttgatagaatagacaatagacacc

SEQ ID NO: 302710 - DNA, 641 bp, Homo sapiens
  misc_feature (24)..(24): n is a, c, g, or t
  misc_feature (42)..(42): n is a, c, g, or t
  misc_feature (50)..(50): n is a, c, g, or t
  misc_feature (62)..(62): n is a, c, g, or t
  misc_feature (67)..(67): n is a, c, g, or t
  misc_feature (96)..(96): n is a, c, g, or t
  misc_feature (104)..(104): n is a, c, g, or t
  misc_feature (111)..(112): n is a, c, g, or t
  misc_feature (114)..(114): n is a, c, g, or t
  misc_feature (131)..(131): n is a, c, g, or t
  misc_feature (158)..(158): n is a, c, g, or t
ctaataaatgcaatgcggccgcantgggttttttattttttntccatttnaacttttttaanggggnctcaaaaattttttgcaaaattttttggncaaggttntttcccnntnaaaaaggtttttttttnaaaacttaataatttaaaacctccccncccccaaaaaaaaaaaccaaaagacacagcagccagcctctttaaggagatgtgttaccgataccgggaagacctgatggcgggaatcatcatcgcaggctgggaccctcaagaaggagggcaggtgtactcagtgcctatggggggtatgatggtaaggcagtcctttgccattggaggctccgggagctcctacatctatggctatgttgatgctacctaccgggaaggcatgaccaaggaagagtgtctgcaattcactgccaatgctctcgctttggccatggagcgggatggctccagtggaggagtgatccgcctggcagccattgcagagtcaggggtagagcggcaagtacttttgggagaccagatacccaaattcgccgttgccactttaccacccgcctgaatcctgggattctagtatgcaataagagatgccctgtactgatgcaaaatttaataaagtttgtcacagag

SEQ ID NO: 302711 - DNA, 477 bp, Homo sapiens
ctcagaccaatagcagaatggacaggtgaatgtacgtgtgttggagggaggatacgactggtgactcctctccttctatctggcaggtgtactcagtgcctatggggggtatgatggtaaggcagtcctttgccattggaggctccgggagctcctacatctatggctatgttgatgctacctaccgggaaggcatgaccaaggaagagtgtctgcaattcactgccaatgctctcgctttggccatggagcgggatggctccagtggaggagtgatccgcctggcagccattgcagagtcaggggtagagcggcaagtacttttgggagaccagatacccaaattcgccgttgccactttaccacccgcctgaatcctgggattctagtatgcaataagagatgccctgtactgatgcaaaatttaataaagtttgtcacagagtaaagtttgtcacagagaatctttgtaaattg

SEQ ID NO: 302712 - DNA, 825 bp, Homo sapiens
aattcgcggccgcgtcgacacgacagaagggaagatggcggctaccttactagctgctcggggagccgggccagcaccggcttgggggccggaggcgttcactccagactgggaaagccgagaagtttccactgggaccactatcatggccgtgcagtttgacgggggcgtggttctgggggcggactccagaacaaccactgggtcctacatcgccaatcgagtgactgacaagctgacacctattcacgaccgcattttctgctgtcgctcaggctcagctgctgatacccaggcagtagctgatgctgtcacctaccagctcggtttccacagcattgaactgaatgagcctccactggtccacacagcagccagcctctttaaggagatgtgttaccgataccgggaagacctgatggcgggaatcatcatcgcaggctgggaccctcaagaaggagggcaggtgtactcagtgcctatggggggtatgatggtaaggcagtcctttgccattggaggctccgggagctcctacatctatggctatgttgatgctacctaccgggaaggcatgaccaaggaagagtgtctgcaattcactgccaatgctctcgctttggccatggagcgggatggctccagtggaggagtgatccgcctggcagccattgcagagtcaggggtagagcggcaagtacttttgggagaccagatacccaaattcgccgttgccactttaccacccgcctgaatcctgggattctagtatgcaataagagatgccctgtactgatgcaaaatttaataaagtttgtcacagag

SEQ ID NO: 302713 - DNA, 878 bp, Homo sapiens
gcgtgacagagcgctttacgacggagttgctttgaggcagtaccggaggagaaagatggcggctaccttactagctgctcggggagccgggccagcaccggcttgggggccggaggcgttcactccagactgggaaagccgagaagtttccactgggaccactatcatggccgtgcagtttgacgggggcgtggttctgggggcggactccagaacaaccactgggtcctacatcgccaatcgagtgactgacaagctgacacctattcacgaccgcattttctgctgtcgctcaggctcagctgctgatacccaggcagtagctgatgctgtcacctaccagctcggtttccacagcattgaactgaatgagcctccactggtccacacagcagccagcctctttaaggagatgtgttaccgataccgggaagacctgatggcgggaatcatcatcgcaggctgggaccctcaagaaggagggcaggtgtactcagtgcctatggggggtatgatggtaaggcagtcctttgccattggaggctccgggagctcctacatctatggctatgttgatgctacctaccgggaaggcatgaccaaggaagagtgtctgcaattcactgccaatgctctcgctttggccatggagcgggatggctccagtggaggagtgatccgcctggcagccattgcagagtcaggggtagagcggcaagtacttttgggagaccagatacccaaattcgccgttgccactttaccacccgcctgaatcctgggattctagtatgcaataagagatgccctgtactgatgcaaaatttaataaagtttgtcacagagtaaagtttgtcacagagaatctttgtaaattg

SEQ ID NO: 302714 - DNA, 831 bp, Homo sapiens
gcgtgacagagcgctttacgacggagttgctttgaggcagtaccggaggagaaagatggcggctaccttactagctgctcggggagccgggccagcaccggcttgggggccggaggcgttcactccagactgggaaagccgagaagtttccactgggaccactatcatggccgtgcagtttgacgggggcgtggttctgggggcggactccagaacaaccactgggtcctacatcgccaatcgagtgactgacaagctgacacctattcacgaccgcattttctgctgtcgctcaggctcagctgctgatacccaggcagtagctgatgctgtcacctaccagctcggtttccacagcattgaactgaatgagcctccactggtccacacagcagccagcctctttaaggagatgtgttaccgataccgggaagacctgatggcgggaatcatcatcgcaggctgggaccctcaagaaggagggcaggtgtactcagtgcctatggggggtatgatggtaaggcagtcctttgccattggaggctccgggagctcctacatctatggctatgttgatgctacctaccgggaaggcatgaccaaggaagagtgtctgcaattcactgccaatgctctcgctttggccatggagcgggatggctccagtggaggagtgatccgcctggcagccattgcagagtcaggggtagagcggcaagtacttttgggagaccagatacccaaattcgccgttgccactttacaccgctgatctggatctatttgaaaagaagccgtctgtcaatttaggtgccgggaaaaaaaacggtc

SEQ ID NO: 302715 - DNA, 610 bp, Homo sapiens
attccctgccatcgaggtcttcccgggtcatcggtaaacgaattccttaaaaagtgcctgtgtggaccagtggaggccaggcagtagctgatgctgtcacctaccagctcggtttccacagcattgaactgaatgagcctccactggtccacacagcagccagcctctttaaggagatgtgttaccgataccgggaagacctgatggcgggaatcatcatcgcaggctgggaccctcaagaaggagggcaggtgtactcagtgcctatggggggtatgatggtaaggcagtcctttgccattggaggctccgggagctcctacatctatggctatgttgatgctacctaccgggaaggcatgaccaaggaagagtgtctgcaattcactgccaatgctctcgctttggccatggagcgggatggctccagtggaggagtgatccgcctggcagccattgcagagtcaggggtagagcggcaagtacttttgggagaccagatacccaaattcgccgttgccactttaccacccgcctgaatcctgggattctagtatgcaataagagatgccctgtactgatgcaaaatttaataaagtttgtcacagag

SEQ ID NO: 302716 - DNA, 817 bp, Homo sapiens
gcgtgacagagcgctttacgacggagttgctttgaggcagtaccggaggagaaagatggcggctaccttactagctgctcggggagccgggccagcaccggcttgggggccggaggcgttcactccagactgggaaagccgagaagtttccactgggaccactatcatggccgtgcagtttgacgggggcgtggttctgggggcggactccagaacaaccactgggtcctacatcgccaatcgagtgactgacaagctgacacctattcacgaccgcattttctgctgtcgctcaggctcagctgctgatacccaggcagtagctgatgctgtcacctaccagctcggtttccacagacacagcagccagcctctttaaggagatgtgttaccgataccgggaagacctgatggcgggaatcatcatcgcaggctgggaccctcaagaaggagggcaggtgtactcagtgcctatggggggtatgatggtaaggcagtcctttgccattggaggctccgggagctcctacatctatggctatgttgatgctacctaccgggaaggcatgaccaaggaagagtgtctgcaattcactgccaatgctctcgctttggccatggagcgggatggctccagtggaggagtgatccgcctggcagccattgcagagtcaggggtagagcggcaagtacttttgggagaccagatacccaaattcgccgttgccactttaccacccgcctgaatcctgggattctagtatgcaataagagatgccctgtactgatgcaaaatttaataaagtttgtcacagag

SEQ ID NO: 302717 - DNA, 846 bp, Homo sapiens
gcgtgacagagcgctttacgacggagttgctttgaggcagtaccggaggagaaagatggcggctaccttactagctgctcggggagccgggccagcaccggcttgggggccggaggcgttcactccagactgggaaagccgagaagtttccactgggaccactatcatggccgtgcagtttgacgggggcgtggttctgggggcggactccagaacaaccactgggtcctacatcgccaatcgagtgactgacaagctgacacctattcacgaccgcattttctgctgtcgctcaggctcagctgctgatacccaggcagtagctgatgctgtcacctaccagctcggtttccacagcattgaactgaatgagcctccactggtccacacagcagccagcctctttaaggagatgtgttaccgataccgggaagacctgatggcgggaatcatcatcgcaggctgggaccctcaagaaggagggcaggtgtactcagtgcctatggggggtatgatggtaaggcagtcctttgccattggaggctccgggagctcctacatctatggctatgttgatgctacctaccgggaaggcatgaccaaggaagagtgtctgcaattcactgccaatgctctcgctttggccatggagcgggatggctccagtggaggagtgatccgcctggcagccattgcagagtcaggggtagagcggcaagtacttttgggagaccagatacccaaattcgccgttgccactttaccacccgcctgaatcctgggattctagtatgcaataagagatgccctgtactgatgcaaaatttaataaagtttgtcacagag

SEQ ID NO: 302718 - DNA, 4876 bp, Homo sapiens
aatgtaatgaatgtgggaaaaccttttgtcagaagttacacctcactcaacacctaagaactcattcaggagagaaaccctacgaatgtagcgaatgtgggaaaaccttctgccaaaagacacatctcaccctgcaccagaggaatcattcaggagagaggccctatccatgtaacgaatgtgggaaatccttctcccgcaagtctgctctcagtgaccatcagagaactcacacgggagagaagctttataaatgtaatgaatgtgggaaatcctactaccgaaagtctactctgattacacatcagagaacacacacgggagagaagccctatcagtgtagcgagtgtgggaaattcttttctcgggtgtcatacctcactatacattatagaagtcatttagaagagaaaccctatgaatgtaatgaatgtggcaaaaccttcaatttaaattcagccttcattagacatcggaaagtacacacagaagagaaatcccatgaatgtagtgaatgtggaaagttctctcagttgtatctcaccgaccatcatacagctcatttagaagagaaaccctatgaatgtaatgaatgtgggaaaaccttccttgtaaattcagccttcgatgggcaccagccacttccaaaaggggagaaatcctatgaatgtaatgagtgtgggaaaaaattccaccacagatcagccttcaatagccatcagagaattcatagaagaggaaatatgaacgtacttgatgtggaaaatctctgaagtcagatctcaatttttagaaaactctctgaatataatgaatatggggaatccaataggaagtcaaagcgtttatctgagagttcgtgttcctgaacggtgagaagcatttaggcattagagtcattttaatccaaattttcacagagaagaatcccgaagaatgtaacaagaagcaaagccttcagcaagatcatacgactcatcggacactaatttatataggagtgaagttttataaatatttaatatttattttggattcaaattgtatttacatatcagggaatcatacaaaggcaaaatctgtcaatatggtgaatgtggaaaatatattgtcttggaaatttgttgtaaaagccatatttctaatggaaaatcaggtgtttacaggaaagatctcagaggctatgagctctgaataaatcttcattgtataaaatgaagtttttaaattgtcaggagttgatcatgaggacagtagcattaaataagtatatggccgttttttatcatgtcttaaaaatgcaatctaatggtaattctatgcaagtttggaattggatgacttgtgaagaggcagttttcttatttgagtattaggatggcaaaatgtattaagacaggacatattgttggtgagataatatttaataggtataaaatggtaaaatacctagttttctatttagaggaatttacaaatgggtttttaacaaatgcctcattagtacaggaggcagtcgttttgtaaagttttcaactgcatctgagtaagataagattttctaaaagactattttgataaactatacatacataatttggaattgtttaagtctatttcagtgaaagagaacaagcatactgcccatactctaaaatatccccagctctcacaccacccttgttttttaacccataggtttgagtgtgcctagtgccaatattttgtaatttagaaattttattcacaaacttctgtttggtacaaatacagtgtcattgttttgtgcattctcctttttcccagtatttcagaacaaattgattcaagtttctagcagatatttttgatcaattaacttaatgtcctcgctccatttcttgctggaacagtttaggtacctaccacttcttcacatgacacaggggaatcctgattagtcaaaataataatgatttcattctctttgccagtaacttgttttatagtggtcatatgacctgatactgggtaaacaaaacaaagatggacttgttctgggaaaaggtaaaatggtaatcaaatagattgtgttccaggaatgcaaaggtggcttaatattcacaagtcagttgctattatacaccacctgtagaaaagtaatctggcatgcagaacattcttgtggtacaattaatgttcgtttatgatcttagcaaatgatggattgaaagggacttacttaattgcataaagagacttaaactacaacaaacaatatgcttaatgatgaaatagtgaacatttctcctaagattataaaaataagacaaggatatctgctgtcaatgattttattcggcattgttcagaaggacctaaccagaaaactaatgcaaggaagagaaacaaaaggcatagagattagaaaagaagtaaaactttaaaaacgaaaaagaatataaatctctatttgcagatgccatgagtaaatttggtaagttccctgcataaaagttatgcaaaaagcattttatgatataccagcaaaaaacatggaaaatgaaattttgaaaagcaatgccacttcaaagatccctcaagtgcctagagggagaaaatgagttaatatgctttgaagaactgtatccagaaaataaaattacaaaggaggagagggataggattccaggacaatctcaaaactattgctttttcctaaattcattgcaaccttaaaatcctagcaagttctttaatgtaaattaacaagctaattctagaattcatatgcatattcaaaagtcgaataattgtcaaggctatcctgtagaatggacagagaggattgaaatttctaaatatcaagacctgttataaagccatagaaataatgaaggtgttaatttggcacaaggatgaaaaaactgactagtggaacagcatacagattcaaaagtagacccacgtgtataccatcacctgagttttgagaaaggtgacattgaagtgtagtgggggaaagggtgttctttccagtaaatgtactttgccaataaaattttgtaatttgataaaaagttatttggaggtggattgcagatctgaatatgaaatgtgaaagctttacaaagaaatcttaggacagtttgtaatcttggagtaagcaaaggtttattgagacccaaaaagcattaacccataaaattagaacttaatattaaatttgagaacttctatttatcagaaagaccaccagtaagaaaatgaacaggaaatcatggggaggagaagatatttgcagttcatgtatgtgacaacagcaccgagtatagcagaagtgttggcaaactttataaagcaaggcaccagatggtgaaaattttcagctttgtcacaactgctcatctttgctattgtgtgaaagcatccatacaccatgcattaaaaaaaaaatgagcatggctgcttcccagtaaaaccattcacaatcccaggtggcagtctggatttggtctgcactcatagttttctggtccctgatctcgaatatgtaaagagcacctacaaatcaacaagggggaaactggaaaaggcaaaagactttagaggatatccactcactttagaggatatccagacggccaataagcatgaaaagatgtgttagctttattagtaatcagggaaatgcaaacttaaaacatgtagcactgctacccatccatggaaatggttaaaatgaaaagcatgaaaaagcatcacgttttggcaaggatgtaagcaagaggaactgtacactactggtggaattgctcatcgataaaaccattttgaaagctggcactaaaagccaagcatatgtatactgttttacccaaacccagcaaaaatgcatgtgtctgtccaccaaaggacatgcactagaatatttatagcctaaaactgcacaaaacagaactatcttaaggcacatgtgcaatggaatgaataaagaagtggcatatgtccatggaatactgtaaaacagtgagcatgaatgaactagaagtccgtgtaataacgcagctgaatttaacaaaccttgctgaatgaaagactccagacacaaaagccaacatgctgtatgattccttctatataaattataaagacgggcaaaacttgtatacgtggtttaaaattaggatagcagttagccttggccaaggctgaaagggggcatttatctggtgctgggaataatctgtttctaaacctaggtgctaagtatttgagtgtgttttgagctgtgcacttaagatatgtgtatttttctgcatgtgtgttaaactttccataaaagttttctaaaatcacaaatggctaacatttgtgtcgctcatcactctaatcatatttttctagatgtgtatgaatatgctgcacaacaggaattaaatggcagattttgcataattctgtgcaggaaatacatatttatagtaattttgatggcaactactaagatttcctacgctgtccttaaagcttagcataatgtatattttaagtgaaatatttgagaaggttaaagaatcattacatactttgtcatcctatacttttgcatatataaataggtctgagctgcctcttcaataaagaagctaatgtgtaacatttcatatttccctaaacaaattgttttttgcatttctgaattcgggattcatcttaacttttactgtaggggtgacctttcttggcagtgaatgaatataatgctgagttggatttgatggaaaattattttaaaagtattcagctaaatatttgagcaaatctcagatacacagttaacagcccagatgtaagtgagtgaaagaaacaggtcagcaaaactttgcaccattga

SEQ ID NO: 302719 - DNA, 5296 bp, Homo sapiens
aatgtaatgaatgtgggaaaaccttttgtcagaagttacacctcactcaacacctaagaactcattcaggagagaaaccctacgaatgtagcgaatgtgggaaaaccttctgccaaaagacacatctcaccctgcaccagaggaatcattcaggagagaggccctatccatgtaacgaatgtgggaaatccttctcccgcaagtctgctctcagtgaccatcagagaactcacacgggagagaagctttataaatgtaatgaatgtgggaaatcctactaccgaaagtctactctgattacacatcagagaacacacacgggagagaagccctatcagtgtagcgagtgtgggaaattcttttctcgggtgtcatacctcactatacattatagaagtcatttagaagagaaaccctatgaatgtaatgaatgtggcaaaaccttcaatttaaattcagccttcattagacatcggaaagtacacacagaagagaaatcccatgaatgtagtgaatgtggaaagttctctcagttgtatctcaccgaccatcatacagctcatttagaagagaaaccctatgaatgtaatgaatgtgggaaaaccttccttgtaaattcagccttcgatgggcaccagccacttccaaaaggggagaaatcctatgaatgtaatgtatgtggaaagttattcaatgagttgtcatactatactgaacattatagaagtcattcagaagagaaaccttatggatgtagcgaatgtgggaaaaccttttcccataattcatccctcttcagacatcaaagagtacacacaggcgagaaaccctatgaatgttacgaatgtggaaaattcttctctcagaaatcatatctcactatacatcatcgaattcattcaggagagaaaccctatgaatgtagtaaatgtggaaaagtcttctctcggatgtcaaacctcactgtccactacagaagccattcaggagagaaaccctatgaatgtaatgaatgtgggaaagtcttttctcagaagtcatacctcactgtacactatagaactcattcaggagagaaaccctatgaatgtaacgagtgtgggaaaaaattccaccacagatcagccttcaatagccatcagagaattcatagaagaggaaatatgaacgtacttgatgtggaaaatctctgaagtcagatctcaatttttagaaaactctctgaatataatgaatatggggaatccaataggaagtcaaagcgtttatctgagagttcgtgttcctgaacggtgagaagcatttaggcattagagtcattttaatccaaattttcacagagaagaatcccgaagaatgtaacaagaagcaaagccttcagcaagatcatacgactcatcggacactaatttatataggagtgaagttttataaatatttaatatttattttggattcaaattgtatttacatatcagggaatcatacaaaggcaaaatctgtcaatatggtgaatgtggaaaatatattgtcttggaaatttgttgtaaaagccatatttctaatggaaaatcaggtgtttacaggaaagatctcagaggctatgagctctgaataaatcttcattgtataaaatgaagtttttaaattgtcaggagttgatcatgaggacagtagcattaaataagtatatggccgttttttatcatgtcttaaaaatgcaatctaatggtaattctatgcaagtttggaattggatgacttgtgaagaggcagttttcttatttgagtattaggatggcaaaatgtattaagacaggacatattgttggtgagataatatttaataggtataaaatggtaaaatacctagttttctatttagaggaatttacaaatgggtttttaacaaatgcctcattagtacaggaggcagtcgttttgtaaagttttcaactgcatctgagtaagataagattttctaaaagactattttgataaactatacatacataatttggaattgtttaagtctatttcagtgaaagagaacaagcatactgcccatactctaaaatatccccagctctcacaccacccttgttttttaacccataggtttgagtgtgcctagtgccaatattttgtaatttagaaattttattcacaaacttctgtttggtacaaatacagtgtcattgttttgtgcattctcctttttcccagtatttcagaacaaattgattcaagtttctagcagatatttttgatcaattaacttaatgtcctcgctccatttcttgctggaacagtttaggtacctaccacttcttcacatgacacaggggaatcctgattagtcaaaataataatgatttcattctctttgccagtaacttgttttatagtggtcatatgacctgatactgggtaaacaaaacaaagatggacttgttctgggaaaaggtaaaatggtaatcaaatagattgtgttccaggaatgcaaaggtggcttaatattcacaagtcagttgctattatacaccacctgtagaaaagtaatctggcatgcagaacattcttgtggtacaattaatgttcgtttatgatcttagcaaatgatggattgaaagggacttacttaattgcataaagagacttaaactacaacaaacaatatgcttaatgatgaaatagtgaacatttctcctaagattataaaaataagacaaggatatctgctgtcaatgattttattcggcattgttcagaaggacctaaccagaaaactaatgcaaggaagagaaacaaaaggcatagagattagaaaagaagtaaaactttaaaaacgaaaaagaatataaatctctatttgcagatgccatgagtaaatttggtaagttccctgcataaaagttatgcaaaaagcattttatgatataccagcaaaaaacatggaaaatgaaattttgaaaagcaatgccacttcaaagatccctcaagtgcctagagggagaaaatgagttaatatgctttgaagaactgtatccagaaaataaaattacaaaggaggagagggataggattccaggacaatctcaaaactattgctttttcctaaattcattgcaaccttaaaatcctagcaagttctttaatgtaaattaacaagctaattctagaattcatatgcatattcaaaagtcgaataattgtcaaggctatcctgtagaatggacagagaggattgaaatttctaaatatcaagacctgttataaagccatagaaataatgaaggtgttaatttggcacaaggatgaaaaaactgactagtggaacagcatacagattcaaaagtagacccacgtgtataccatcacctgagttttgagaaaggtgacattgaagtgtagtgggggaaagggtgttctttccagtaaatgtactttgccaataaaattttgtaatttgataaaaagttatttggaggtggattgcagatctgaatatgaaatgtgaaagctttacaaagaaatcttaggacagtttgtaatcttggagtaagcaaaggtttattgagacccaaaaagcattaacccataaaattagaacttaatattaaatttgagaacttctatttatcagaaagaccaccagtaagaaaatgaacaggaaatcatggggaggagaagatatttgcagttcatgtatgtgacaacagcaccgagtatagcagaagtgttggcaaactttataaagcaaggcaccagatggtgaaaattttcagctttgtcacaactgctcatctttgctattgtgtgaaagcatccatacaccatgcattaaaaaaaaaatgagcatggctgcttcccagtaaaaccattcacaatcccaggtggcagtctggatttggtctgcactcatagttttctggtccctgatctcgaatatgtaaagagcacctacaaatcaacaagggggaaactggaaaaggcaaaagactttagaggatatccactcactttagaggatatccagacggccaataagcatgaaaagatgtgttagctttattagtaatcagggaaatgcaaacttaaaacatgtagcactgctacccatccatggaaatggttaaaatgaaaagcatgaaaaagcatcacgttttggcaaggatgtaagcaagaggaactgtacactactggtggaattgctcatcgataaaaccattttgaaagctggcactaaaagccaagcatatgtatactgttttacccaaacccagcaaaaatgcatgtgtctgtccaccaaaggacatgcactagaatatttatagcctaaaactgcacaaaacagaactatcttaaggcacatgtgcaatggaatgaataaagaagtggcatatgtccatggaatactgtaaaacagtgagcatgaatgaactagaagtccgtgtaataacgcagctgaatttaacaaaccttgctgaatgaaagactccagacacaaaagccaacatgctgtatgattccttctatataaattataaagacgggcaaaacttgtatacgtggtttaaaattaggatagcagttagccttggccaaggctgaaagggggcatttatctggtgctgggaataatctgtttctaaacctaggtgctaagtatttgagtgtgttttgagctgtgcacttaagatatgtgtatttttctgcatgtgtgttaaactttccataaaagttttctaaaatcacaaatggctaacatttgtgtcgctcatcactctaatcatatttttctagatgtgtatgaatatgctgcacaacaggaattaaatggcagattttgcataattctgtgcaggaaatacatatttatagtaattttgatggcaactactaagatttcctacgctgtccttaaagcttagcataatgtatattttaagtgaaatatttgagaaggttaaagaatcattacatactttgtcatcctatacttttgcatatataaataggtctgagctgcctcttcaataaagaagctaatgtgtaacatttcatatttccctaaacaaattgttttttgcatttctgaattcgggattcatcttaacttttactgtaggggtgacctttcttggcagtgaatgaatataatgctgagttggatttgatggaaaattattttaaaagtattcagctaaatatttgagcaaatctcagatacacagttaacagcccagatgtaagtgagtgaaagaaacaggtcagcaaaactttgcaccattga

SEQ ID NO: 302720 - DNA, 384 bp, Homo sapiens
gtctcaaactcccgacctcaggtgatccacctgccttggcctcccaaaatgctgggattacaggcatgagccaccacgtcccaccttggctaagtaatttataactatctcacctgtctttccccatctactaagtggagaaagtaagaatacctgctttgttaagattattggtagtttgagtaaaatagtatatggaaaccactatgtgtgggacatagtagttgatactcatagttttttagttattactgatcactgggactgtttggcatctagtgtctttttaggtatcatttttaccatctcttttcatattttattccaacaaaggctatggataggactagtgtagacgtggaatcactagacttggcactgtga

SEQ ID NO: 302721 - DNA, 2102 bp, Homo sapiens
gcaccggacaaacgtctctggagtctctccaatgagcaagaaagcaagtcgggggtaggggaggggcctcacaccagggggtgggcgcagtccctcctccagctccttcaccctccagtagtctcgtgggtccccgagcgccagcgcgggaaccgggaaaaggaaaccgtgttgtgtacgtaagattcaggaaacgaaaccaggagccgcgggtgttggcgcaaaggttactcccagacccttttccggctgacttctgagaaggttgcgcagcagctgtgcccggcagtctagaggcgcagaagaggaagccatcgcctggccccggctctctggaccttgtctcgctcgggagcggaaacagcggcagccagagaactgttttaatcatggacaaacaaaactcacagatgaatgcttctcacccggaaacaaacttgccagttgggtatcctcctcagtatccaccgacagcattccaaggacctccaggatatagtggctaccctgggccccaggtcagctacccacccccaccagccggccattcaggtcctggcccagctggctttcctgtcccaaatcagccagtgtataatcagccagtatataatcagccagttggagctgcaggggtaccatggatgccagcgccacagcctccattaaactgtccacctggattagaatatttaagtcaggtaatttcaaagacacaaaatactcataaaaaacagaactgtgcttccagcttgcttaaccagattagcaaatgaataattcaccaaagtctgaaatagcaaaactgtatttcctgctaacagattactctaattcttctaggtctggttcaattttaaagcaaaatacaaatgccttagaaaattgtattttctgttatcttaaatacaatctatgataatggccaatagcaaacatttaattagcactgtttcctgcctttgttgtatgcctgatacatgtattaactcatttaatccttattgaaagtctgtgatgtataggtgctacatttttcaaaagaagaaactgaggtccagagaggttatatagctcactctggggtgagaacctaaagagtcaagactgtttttttaatcccgaaactttggtactgagcgaagtgctctttagtctcaatactgaataattgccttataatttggaagaaaatttaaataaagtttattgttgagtttcaataagtggccccaaacaaggggttaatattttatgtataatatgactcacctttttattgtaactaataaaactgcatttttatgatgctgcttttgttctttggaagacctaattttataaatgccattaataaaggagtaaaaagtcctggattttgttgcactaaattataattaatctcagcaataagaggtttaacatttaattggtgttagaaatcaggtaggtcaaatagaaacaagaaactctgtgtgtccagtctatacacatacaaatattcttgtgatattcaaccagttttcatttcataaatcatttctttcttgcactctctttagtaacttaatttcccacaatgtgcttaagtggcataatcataggaatttttggtcattattatattatgcaagaaatacatagaaatagatattttaaaaatcagagtctcataaaatacataaaggatgttatcacatatgacaaaggttgatattaagtatgcttaatacaaatctgaaacttgtaaaaaaaaatctctttgatggctaaaaaagttaccaatatttcttcagcctattctagaaggaagattgttttctaccttttgaattgtttttgacacataataattgtgcatatttatggagtacagtctggcattttaatgcacatgtactacgtgtaatgaaaaataaggataattagcatatctgtcacttttaatatttatcatttcttagtgttgagaacattccaaatcctcccttctagctatttgaaaatatacaataaattattgttaattatagtcagcctacatagctatagaacactagaatttattcctcctatctagctgtaattttgtattcattaac

SEQ ID NO: 302722 - DNA, 1390 bp, Homo sapiens
taaagaatgtgtattgaaattccagttttgaaacaaagttatgtcagatattttcagacctcaatgccacctatcgtacaattcaaggccatttacaatctgaaaactttaagcaacgggtaatgacttgcttcagagcatgggaagattgggcaatttatccagaaccatttttgatcaaactacaaaatattttcttaggacttgtaaatattattgaagaaaaggaaacagaggatgttccagatgaccttgatggtgcccccatcgaggaagagcttgatggtgcacctctggaagatgtagatggaattcctattgatgctactcccatcgatgatcttgatggagtccctataaaaagtcttgatgatgatcttgatggagtgcctttggatgcaactgaagactcaaaaaagaatgagcctatatttaaagttgccccatcaaaatgggaagctgtggatgaatctgaattggaagcacaggctgttacaacttctaaatgggaattatttgaccagcatgaagaatcagaagaagaagaaaatcaaaatcaagaagaagaaagtgaagatgaagaagatactcaaagttccaaatctgaagaacatcatttgtactctaatccaatcaaagaagaaatgactgagtctaagttctctaagtactctgaaatgagtgaggaaaaacgagccaaacttcgtgaaattgagctcaaagttatgaagtttcaggatgaattggaatctgggaaaagacctaaaaaaccaggccagagttttcaggagcaagtagaacactacagagataaacttcttcaacgagtaaggaataagtatacccaataatacacatattttgaagttatttatttgacttcctagaatactggtatacctaaagatgatttcaaattatatcctttgtataaattttgaatactagtagggcaatcagaaacatttgaaatttgatattttaaaagtattttgattggaaaggagcttaaaggcagcagcacactattttattctgagtattacctgtggacaagaagattaattctgctaagagcatgctttcaaaactggaaaacccttcaggacaagtcacattttgtgacagtgagacgccaacaaccctgagaggtagtacagaaagaaaaagatggaggcagggtttgggaagttctggtgttgagaagtttattttcatttctcatggtttccagggagggacagcaagtggtagaatacctcattggtgagctctgagtgtttgagggactttatattctcgtgcatcacaaaatttataggcatgtgcagagaattttagaaccaggaacctcaggaattttgttgagactgtcgttgcaaaaaaaaaa

SEQ ID NO: 302723 - DNA, 436 bp, Homo sapiens
  misc_feature (434)..(434): n is a, c, g, or t
gtggggtgatctagaggatcccattcactcaacctgctgcttcaggagatagaaatccaagctcctcctggtgtaccaataggttatgttattcagacttggcacccatgtctaccaaagtttacaattcaaaatgagaaaagagaggatgtactaaaaataagtggtccatgtgttgtgtgcagctgttgtggagatgttgattttgagattaaatctcttgatgaacagtgtgtggttggcaaaatttccaagcactggactggaattttgagagaggcatttacagacgctgataactttggaatccagttccctttagaccttgatgttaaaatgaaagctgtaatgattggtgcctgtttcctcattacttcatgttttttgaaagcactgcagccaggtgagtgaatgggaccggctcatagtcaccnca

SEQ ID NO: 302724 - DNA, 664 bp, Homo sapiens
  misc_feature (405)..(405): n is a, c, g, or t
tctgttccatctcatctcgggtggccgcccgatagcctcaagtcctcgttactgttcatcttcgaatctctgtcagcaacgcagagaggaccagagttattttctgtggctgaatggcctactctggaatccccagggttaaaacaactcacattcaacccttgagatgctaagttttcttgtaaagtaaaggaaatgttataagattttctgaaaccacgaacctttagcgatattgtcagaccttctccaacattttccactgcatttgtcagcaatcagagatgacctccacaccgaggcgaaccctccaccccccgacccgtctcctctctgcgtttgcagagaggacaaacccagagaggttctcgcgttgaccaaggaactgcttgctgatcctctctnaaacgcagaggatgtactaaaaataagtggtccatgtgttgtgtgcagctgttgtggagatgttgattttgagattaaatctcttgatgaacagtgtgtggttggcaaaatttccaagcactggactggaattttgagagaggcatttacagacgctgataactttggaatccagttccctttagaccttgatgttaaaatgaaagctgtaatgattggtgcctgtttcctcattaactcctctctgcgtttgggggat

SEQ ID NO: 302725 - DNA, 634 bp, Homo sapiens
aacagtagtgtacggctgagatgtggaagcctccgacatccaacccatgttctgagcaactacttacttttagggggaaattaaatatcttttcatttcctcttctattatgaaagaagtttatttgtaaaacaaattttctaacaaggtttggccatagaattctcttgtatgattgttgaccttttataatcttctgtaggctatctttcaaacactggcatcagaatattttttataagtttgtgtttaaacagcttagttggtccccccccccactcccaagagacttgggtttagttatagctttaagtaaaatttaaaaataaaatgtttttcaggaaacttcgtatctaatggtttgtaaattcaaggtgcaaaaagttgatttaaaccatttgcagagttgaactctattatgaaaataaatttgctacggtatgagatgttggaaggcctttcaacatctcatgtctccttccaacatctcatggctgcatgatcatcttaccctcattttcaatgtacaagttgagcttctctctgtctatctgccatatatagctgattctcgattggcaggtccacagtactggtcttcacttttgcctttctgggcatgacgatgcaggaa

SEQ ID NO: 302726 - DNA, 481 bp, Homo sapiens
cctcttcccaaaaggctttagaatgtgttcaccatcatgagctgaccaacaatttctaaattcctactcagaaacacagcaaggggaatgcagtcaagcacaaagggcttaaatgaccagataaggctgggctggatgaataaagaggaatatcctatgaatgtgactgtgtagttttagagtatcccgattcaactgttatatttgacttgtggccttgtagacagtgtgttaatgtcagatcttctttttcagaactgttttaatcatggacaaacaaaactcacagatgaatgcttctcacccggaaacaaacttgccagttgggtatcctcctcagtatccaccgacagcattccaagatagatcagatactgattcatcagcaaattgaacttctggaaggtatgtattcattgttttaatcctgtttctataaagagtagaagtttatgcagataaaggcacattgacctccaca

SEQ ID NO: 302727 - DNA, 7234 bp, Homo sapiens
cgactcgcccgtgctgctgccgccgccgaaggaggggcaaagctcaagatggcggacaaaacgccaggcggatctcagaaggccagttcaaagacgagatcatcagatgttcattcatctggatcttcagatgcacatatggatgcatctggaccctcagatagtgatatgccaagtcggacacgacctaagagcccaagaaaacataattataggaatgaaagtgcccgtgaaagcctttgtgattctcctcatcagaatctctcaagacctcttctggaaaacaaacttaaagcattcagtattggaaaaatgagtacagctaagcgaactttaagtaaaaaggaacaggaagaattaaagaaaaaggaggatgaaaaggcagctgctgagatttatgaggagtttcttgctgcttttgaaggaagtgatggtaataaagtgaaaacatttgtgcgagggggtgttgttaatgcagctaaagaagaacatgaaacagatgaaaaaagaggtaaaatctataagccatcttcaagatttgcagatcaaaaaaatcctccaaatcagtcttccaatgaaagaccaccatctcttcttgtgatagaaaccaaaaaacctccacttaaaaaaggagagaaagaaaagaaaaaaagcaatttggaactcttcaaagaagaattaaagcaaattcaagaggaacgtgatgagagacataaaacaaaaggcagattaagtcgatttgaacctcctcagtcagattctgatggtcagcgtcgttctatggacgcgccttcaagaagaaatagatcatctggtgttcttgatgattacgcacctggctcacatgatgtaggagatccaagcactactaatttataccttggaaacattaatccacagatgaatgaagaaatgctgtgccaagaatttggaagatttggaccgttagccagtgtgaaaatcatgtggcctagaactgatgaagaaagagccagagagagaaattgcggctttgtggcctttatgaatagaagagatgctgaaagagctttaaaaaatttgaatggaaaaatgattatgtcttttgaaatgaagttaggttggggtaaagctgtacctattcctccacatccaatatacattccgccttctatgatggaacatacgcttcccccacctccatccggactgccttttaatgcgcagcctagagagcggttaaaaaaccctaatgctcctatgttaccgccacctaaaaacaaagaggattttgagaagactctgtcgcaagccatagtcaaagtggttatcccaacagaaaggaatttgctcgccctgatacatcgaatgatagagtttgttgtacgtgaagggccaatgtttgaagctatgattatgaacagagaaatcaacaatcctatgttcaggttcttatttgaaaaccagacaccagcccatgtttactataggtggaagctttattctattctgcagggagattctccaactaaatggcggacggaagattttcgtatgttcaaaaatggatctttttggaggccaccaccattaaatccgtacttgcatggaatgtcagaagagcaagaaacagaagcttttgtagaggaacctagtaaaaagggagcacttaaggaagaacagagggataaattggaagaaatcttgcggggattaactccaaggaaaaatgatattggagatgcaatggttttctgtcttaataatgctgaagctgctgaagaaatagtggattgcattactgagtcgttgtccatcttaaagacaccccttcctaaaaagattgccagattatatttggtttctgatgttttgtacaactcttcagccaaagttgctaatgcttcatattatagaaaattttttgaaacaaagttatgtcagatattttcagacctcaatgccacctatcgtacaattcaaggccatttacaatctgaaaactttaagcaacgggtaatgacttgcttcagagcatgggaagattgggcaatttatccagaaccatttttgatcaaactacaaaatattttcttaggacttgtaaatattattgaagaaaaggaaacagaggatgttccagatgaccttgatggtgcccccatcgaggaagagcttgatggtgcacctctggaagatgtagatggaattcctattgatgctactcccatcgatgatcttgatggagtccctataaaaagtcttgatgatgatcttgatggagtgcctttggatgcaactgaagactcaaaaaagaatgagcctatatttaaagttgccccatcaaaatgggaagctgtggatgaatctgaattggaagcacaggctgttacaacttctaaatgggaattatttgaccagcatgaagaatcagaagaagaagaaaatcaaaatcaagaagaagaaagtgaagatgaagaagatactcaaagttccaaatctgaagaacatcatttgtactctaatccaatcaaagaagaaatgactgagtctaagttctctaagtactctgaaatgagtgaggaaaaacgagccaaacttcgtgaaattgagctcaaagttatgaagtttcaggatgaattggaatctgggaaaagacctaaaaaaccaggccagagttttcaggagcaagtagaacactacagagataaacttcttcaacgagagaaagagaaagagttagaaagagaacgagaaagagacaagaaagataaagaaaaattggaatctcgctccaaagacaagaaggaaaaagatgagtgtactccgacaaggaaggaaaggaagaggcgacacagtacatcccccagcccatctcgcagtagcagtggtagacgagtgaaatccccatcaccaaaatcggagcgatcagagcgttcagaaagatctcataaagagagctcacggtccaggtcatctcacaaagattctcctagagatgttagcaaaaaagccaaaagatcaccatctggttcaaggacacctaaaaggtctaggcgatcacggtctagatctcctaaaaaatcaggaaagaagtccagatcccagtccagatctccacacaggtctcataaaaagtcaaagaaaaacaaacactgacgtaaatttttaagatgctgtcacttattggaaatgcgatttgttttgtgcctgaacggtctgttttttaaaaaaacaaaaaatcaaatgaaagagcattcctggggttttttgtttgtttgtgtatgcatgtgtaaactcatgagcaactgcatctgtagatctgtcattgttttatattgtgtaaattactttcattgtggctatttctcaagatgaaatttttattgttctaatggatttcatcagaaatgtgtataatggatctgctgacagtagtagtattttgttttaggatgttgtgacttagcaaaaataatacagatgtcttccccccttttgtagctttgacaatttgaattagatttcaaataaaatctgaacagaaaactataatgttgtttttttgccccaccggtgatattaagtcccttaaagtcctactgagtttcacactactgttgtgcttcttatacctgatgcactttataagccccagtgttcaagtagcttaagttttatatttactaagatgactatccaaattaagggacctgagactcctatttggtggtttgctaaccatttgcttttgataagtttctcttgggtaatactaatacccagatatcaaagactaggtagatatggcatggcgttttgttagtggaatgcctggctaaaacatttttttcacagaagcaatatgatttccatacatccaacccatgttctgagcaactacttacttttagggggaaattaaatatcttttcatttcctcttctattatgaaagaagtttatttgtaaaacaaattttctaacaaggtttggccatagaattctcttgtatgattgttgaccttttataatcttctgtaggctatctttcaaacactggcatcagaatattttttataagtttgtgtttaaacagcttagttggtccccccccccactcccaagagacttgggtttagttatagctttaagtaaaatttaaaaataaaatgtttttcaggaaacttcgtatctaatggtttgtaaattcaaggtgcaaaaagttgatttaaaccatttgcagagttgaactctattatgaaaataaatttgctacggtatgaggaagaaataaaacttgtgtaatgttggtcataatactgctataaatataataaagggttatgtagaattgaactgacactattatttgtgaatcttgatttcagttttttatgtaggcacttcatacactggtttgatgggttttttttttcctccctaaaagagaaagtagaaaactattctaacaatggattattttgatttagcttgctttttaaaaaaatcttttcaacttgttttacttaatcttgcctagtcacaaaataagatgtgcacccatggtttggagagttcctatattagctgagcagtgagatacactatttccaaacggtgcacacctacagtagctttggaaatgagccaatcactgttttacttaatggttcttatcagcatgcaaatattgcttgaaagttatttccttattcactgttttgttagtccattttgttaggaaacattaattcctaaaaatttgttcagaataattaaaagtgaacatttggtgctgatactcaaaaacctacaaatgtagccatttaaaaagtaacatgtttttctcccctgctcattgcctgggagaatggaattttatataactacctttctttgcaaaaataacggtcgtgtcgagttggtggtgattttggcattccatcttgcactggtttctagtataggcttagaaataattggtcaggtaataatctttccagtcaagttgcaagggatgcttatttctcttcaaaaaaagacatcctgcgggattgagtagaaaattttaggtcagttttgggtgcttatttgtaatatttttcctactacattggagtttagcagttctttttttctggatccagatacaagtgtcatggtttatcttacagtgggtgaaactgactttcttttggttgggtgggtgaggatttcttaggcctgatagaatatatattctgtgaagtttgttaatgtacatattagattgtattggatttttttttcttgaattgcaaatggtattattagataggttatttccagttttacttcatgacaaattacctagagtaaacctacttaatactccaatggattctatgaaagtttaatgggatcagaaattggtgacttataagggggaagatattctaccatatttttataatagcttattattcatgtttcttgtctgaaggacactcaagttacagagcaaaatttctataggttgactagaatgttcataagcatggtcttccagttgcaggaaagatcatgttctatctgtggacacttactgtcctctaccacagctacgtgccagagttgttttccacagttcttataaagggcatgacttaggctctttaccctccaacttaatgtttatacacagggattgtttactaggttaatgacatttaactcccctctcttctgtaggtgagagaaaataagtaagtcttgatctgtttcttaccaaagagagacagacctatgatggaaaatgatcacgtctctgaattttttctttaacgttatagttccttattacagatagtaagcatatgggaatttctgagctataacatgttgagaagttagaaattaaaactaacacaacaaaaggcgctgaatcaaaagatctttgcttttatttggctcagaatgtttttggcttttctgctaaagatggcagaaattactctacacagacctgatttttctttattgcagaccattcttgtgggcttaccctgagacttttatcccaattagtgaatcttggagggaatacttgcttatttatgacttaggtatttccccccaaactttaatattcttgagcacttgaaaatacttttgagaaattttaactgtgattaaatttaggtttattagaaatattctgtacacatttgcctccatggtggcgtaagttctgaaaaattatatgaccgtgacaatagtttatcatcatcattattgttattcaaaataagggtaaataaatctctgtattgccaaagtgacttaaactgttctgatgaccacacagtgtgatttctttagcagagaaagttggttttaaaaataaatagtaccacttttctaagactgtacagtttacaaataaggtttttttctttgttgttttcctcttctattaagttttagtgaaaagcctaattacagaaaattgtgcagatactagtgaagatactagtataagtttaaaggaacatgtgactgtaaaatctcacatttacaaagtgcttgatctcttcatatttcacacgcatgttttagaatagattttagggagtgtttaattcattatccttttgacttaaaatttttgttaccaacttcctaggacttagataatatataaataagtacaaatcccaggggaagtgttgtgatgctagactaaaaggtgggaatgtgctgctgttccgtgagccttgttccattgttgaaaatttgatgcctcagtgtttattcagtaccacctcatggagcttcaatgtaaatggattatatgtataattggtaatttgtatagttttgtagattgtagattaaatgcactcatcatgtcacatgtgattgtgcttggagtatttgtgttttattcttttacttcaacgggttcttgtctgttacatctctggtgatttgaaatatcaggaaagacagtttgtcagaaatgagaataatatagttgaaatcagttgggctaaaatattctacagcaagacaatttcttttgggtgaactgattctataatttacttacttttaatgtaaggattagatttattgttgagctgctttccagatcagactgtcactttatagtttttctatataaagattatatagttgcaaacaaaggttgtgaaatttcccttttgttgtttttgacttttaattaataaaagtacattgttttcatagca

SEQ ID NO: 302728 - DNA, 7428 bp, Homo sapiens
  misc_feature (7246)..(7246): n is a, c, g, or t
  misc_feature (7261)..(7261): n is a, c, g, or t
  misc_feature (7363)..(7363): n is a, c, g, or t
  misc_feature (7377)..(7377): n is a, c, g, or t
  misc_feature (7407)..(7407): n is a, c, g, or t
cgactcgcccgtgctgctgccgccgccgaaggaggggcaaagctcaagatggcggacaaaacgccaggcggatctcagaaggccagttcaaagacgagatcatcagatgttcattcatctggatcttcagatgcacatatggatgcatctggaccctcagatagtgatatgccaagtcggacacgacctaagagcccaagaaaacataattataggaatgaaagtgcccgtgaaagcctttgtgattctcctcatcagaatctctcaagacctcttctggaaaacaaacttaaagcattcagtattggaaaaatgagtacagctaagcgaactttaagtaaaaaggaacaggaagaattaaagaaaaaggaggatgaaaaggcagctgctgagatttatgaggagtttcttgctgcttttgaaggaagtgatggtaataaagtgaaaacatttgtgcgagggggtgttgttaatgcagctaaagaagaacatgaaacagatgaaaaaagaggtaaaatctataagccatcttcaagatttgcagatcaaaaaaatcctccaaatcagtcttccaatgaaagaccaccatctcttcttgtgatagaaaccaaaaaacctccacttaaaaaaggagagaaagaaaagaaaaaaagcaatttggaactcttcaaagaagaattaaagcaaattcaagaggaacgtgatgagagacataaaacaaaaggcagattaagtcgatttgaacctcctcagtcagattctgatggtcagcgtcgttctatggacgcgccttcaagaagaaatagatcatctggtgttcttgatgattacgcacctggctcacatgatgtaggagatccaagcactactaatttataccttggaaacattaatccacagatgaatgaagaaatgctgtgccaagaatttggaagatttggaccgttagccagtgtgaaaatcatgtggcctagaactgatgaagaaagagccagagagagaaattgcggctttgtggcctttatgaatagaagagatgctgaaagagctttaaaaaatttgaatggaaaaatgattatgtcttttgaaatgaagttaggttggggtaaagctgtacctattcctccacatccaatatacattccgccttctatgatggaacatacgcttcccccacctccatccggactgccttttaatgcgcagcctagagagcggttaaaaaaccctaatgctcctatgttaccgccacctaaaaacaaagaggattttgagaagactctgtcgcaagccatagtcaaagtggttatcccaacagaaaggaatttgctcgccctgatacatcgaatgatagagtttgttgtacgtgaagggccaatgtttgaagctatgattatgaacagagaaatcaacaatcctatgttcaggttcttatttgaaaaccagacaccagcccatgtttactataggtggaagctttattctattctgcagggagattctccaactaaatggcggacggaagattttcgtatgttcaaaaatggatctttttggaggccaccaccattaaatccgtacttgcatggaatgtcagaagagcaagaaacagaagcttttgtagaggaacctagtaaaaagggagcacttaaggaagaacagagggataaattggaagaaatcttgcggggattaactccaaggaaaaatgatattggagatgcaatggttttctgtcttaataatgctgaagctgctgaagaaatagtggattgcattactgagtcgttgtccatcttaaagacaccccttcctaaaaagattgccagattatatttggtttctgatgttttgtacaactcttcagccaaagttgctaatgcttcatattatagaaaattttttgaaacaaagttatgtcagatattttcagacctcaatgccacctatcgtacaattcaaggccatttacaatctgaaaactttaagcaacgggtaatgacttgcttcagagcatgggaagattgggcaatttatccagaaccatttttgatcaaactacaaaatattttcttaggacttgtaaatattattgaagaaaaggaaacagaggatgttccagatgaccttgatggtgcccccatcgaggaagagcttgatggtgcacctctggaagatgtagatggaattcctattgatgctactcccatcgatgatcttgatggagtccctataaaaagtcttgatgatgatcttgatggagtgcctttggatgcaactgaagactcaaaaaagaatgagcctatatttaaagttgccccatcaaaatgggaagctgtggatgaatctgaattggaagcacaggctgttacaacttctaaatgggaattatttgaccagcatgaagaatcagaagaagaagaaaatcaaaatcaagaagaagaaagtgaagatgaagaagatactcaaagttccaaatctgaagaacatcatttgtactctaatccaatcaaagaagaaatgactgagtctaagttctctaagtactctgaaatgagtgaggaaaaacgagccaaacttcgtgaaattgagctcaaagttatgaagtttcaggatgaattggaatctgggaaaagacctaaaaaaccaggccagagttttcaggagcaagtagaacactacagagataaacttcttcaacgagagaaagagaaagagttagaaagagaacgagaaagagacaagaaagataaagaaaaattggaatctcgctccaaagacaagaaggaaaaagatgagtgtactccgacaaggaaggaaaggaagaggcgacacagtacatcccccagcccatctcgcagtagcagtggtagacgagtgaaatccccatcaccaaaatcggagcgatcagagcgttcagaaagatctcataaagagagctcacggtccaggtcatctcacaaagattctcctagagatgttagcaaaaaagccaaaagatcaccatctggttcaaggacacctaaaaggtctaggcgatcacggtctagatctcctaaaaaatcaggaaagaagtccagatcccagtccagatctccacacaggtctcataaaaagtcaaagaaaaacaaacactgacgtaaatttttaagatgctgtcacttattggaaatgcgatttgttttgtgcctgaacggtctgttttttaaaaaaacaaaaaatcaaatgaaagagcattcctggggttttttgtttgtttgtgtatgcatgtgtaaactcatgagcaactgcatctgtagatctgtcattgttttatattgtgtaaattactttcattgtggctatttctcaagatgaaatttttattgttctaatggatttcatcagaaatgtgtataatggatctgctgacagtagtagtattttgttttaggatgttgtgacttagcaaaaataatacagatgtcttccccccttttgtagctttgacaatttgaattagatttcaaataaaatctgaacagaaaactataatgttgtttttttgccccaccggtgatattaagtcccttaaagtcctactgagtttcacactactgttgtgcttcttatacctgatgcactttataagccccagtgttcaagtagcttaagttttatatttactaagatgactatccaaattaagggacctgagactcctatttggtggtttgctaaccatttgcttttgataagtttctcttgggtaatactaatacccagatatcaaagactaggtagatatggcatggcgttttgttagtggaatgcctggctaaaacatttttttcacagaagcaatatgatttccatacatccaacccatgttctgagcaactacttacttttagggggaaattaaatatcttttcatttcctcttctattatgaaagaagtttatttgtaaaacaaattttctaacaaggtttggccatagaattctcttgtatgattgttgaccttttataatcttctgtaggctatctttcaaacactggcatcagaatattttttataagtttgtgtttaaacagcttagttggtccccccccccactcccaagagacttgggtttagttatagctttaagtaaaatttaaaaataaaatgtttttcaggaaacttcgtatctaatggtttgtaaattcaaggtgcaaaaagttgatttaaaccatttgcagagttgaactctattatgaaaataaatttgctacggtatgaggaagaaataaaacttgtgtaatgttggtcataatactgctataaatataataaagggttatgtagaattgaactgacactattatttgtgaatcttgatttcagttttttatgtaggcacttcatacactggtttgatgggttttttttttcctccctaaaagagaaagtagaaaactattctaacaatggattattttgatttagcttgctttttaaaaaaatcttttcaacttgttttacttaatcttgcctagtcacaaaataagatgtgcacccatggtttggagagttcctatattagctgagcagtgagatacactatttccaaacggtgcacacctacagtagctttggaaatgagccaatcactgttttacttaatggttcttatcagcatgcaaatattgcttgaaagttatttccttattcactgttttgttagtccattttgttaggaaacattaattcctaaaaatttgttcagaataattaaaagtgaacatttggtgctgatactcaaaaacctacaaatgtagccatttaaaaagtaacatgtttttctcccctgctcattgcctgggagaatggaattttatataactacctttctttgcaaaaataacggtcgtgtcgagttggtggtgattttggcattccatcttgcactggtttctagtataggcttagaaataattggtcaggtaataatctttccagtcaagttgcaagggatgcttatttctcttcaaaaaaagacatcctgcgggattgagtagaaaattttaggtcagttttgggtgcttatttgtaatatttttcctactacattggagtttagcagttctttttttctggatccagatacaagtgtcatggtttatcttacagtgggtgaaactgactttcttttggttgggtgggtgaggatttcttaggcctgatagaatatatattctgtgaagtttgttaatgtacatattagattgtattggatttttttttcttgaattgcaaatggtattattagataggttatttccagttttacttcatgacaaattacctagagtaaacctacttaatactccaatggattctatgaaagtttaatgggatcagaaattggtgacttataagggggaagatattctaccatatttttataatagcttattattcatgtttcttgtctgaaggacactcaagttacagagcaaaatttctataggttgactagaatgttcataagcatggtcttccagttgcaggaaagatcatgttctatctgtggacacttactgtcctctaccacagctacgtgccagagttgttttccacagttcttataaagggcatgacttaggctctttaccctccaacttaatgtttatacacagggattgtttactaggttaatgacatttaactcccctctcttctgtaggtgagagaaaataagtaagtcttgatctgtttcttaccaaagagagacagacctatgatggaaaatgatcacgtctctgaattttttctttaacgttatagttccttattacagatagtaagcatatgggaatttctgagctataacatgttgagaagttagaaattaaaactaacacaacaaaaggcgctgaatcaaaagatctttgcttttatttggctcagaatgtttttggcttttctgctaaagatggcagaaattactctacacagacctgatttttctttattgcagaccattcttgtgggcttaccctgagacttttatcccaattagtgaatcttggagggaatacttgcttatttatgacttaggtatttccccccaaactttaatattcttgagcacttgaaaatacttttgagaaattttaactgtgattaaatttaggtttattagaaatattctgtacacatttgcctccatggtggcgtaagttctgaaaaattatatgaccgtgacaatagtttatcatcatcattattgttattcaaaataagggtaaataaatctctgtattgccaaagtgacttaaactgttctgatgaccacacagtgtgatttctttagcagagaaagttggttttaaaaataaatagtaccacttttctaagactgtacagtttacaaataaggtttttttctttgttgttttcctcttctattaagttttagtgaaaagcctaattacagaaaattgtgcagatactagtgaagatactagtataagtttaaaggaacatgtgactgtaaaatctcacatttacaaagtgcttgatctcttcatatttcacacgcatgttttagaatagattttagggagtgtttaattcattatccttttgacttaaaatttttgttaccaacttcctaggacttagataatatataaataagtacaaatcccaggggaagtgttgtgatgctagactaaaaggtgggaatgtgctgctgttccgtgagccttgttccattgttgaaaatttgatgcctcagtgtttattcagtaccacctcatggagcttcaatgtaaatggattatatgtataattggtaatttgtatagttttgtagattgtagattaaatgcactcatcatgtcacatgtgattgtgcttggagtatttgtgttttattcttttacttcaacgggttcttgtctgttacatctctggtgatttgaaatatcaggaaagacagtttgtcagaaatgagaataatatagttgaaatcagttgggctaaaatattctacagcaagacaatttcttttgggtgaactgattctataatttacttacttttaatgtaaggattagatttattgttgagctgctttccagatcagactgtcactttatagtttttctatataaagattatatagttgcaaacaaaggttgtgaaatttcccttttgttgtttttgacttttaattaataaaagtacattgttttcatagcaaacttagactgnccatgtaattttctncatattggttttccgatgccaagcccagttaataattaagttttttaacagctttctctcaagtgaaataaagtggattgtgaccatggtttatcagttatnggctaaaaaggttncactttaccatgtttaaactataatcatanggttttcatgcctaaaaggtc

SEQ ID NO: 302729 - DNA, 6156 bp, Homo sapiens
cgactcgcccgtgctgctgccgccgccgaaggaggggcaaagctcaagatggcggacaaaacgccaggcggatctcagaaggccagttcaaagacgagatcatcagatgttcattcatctggatcttcagatgcacatatggatgcatctggaccctcagatagtgatatgccaagtcggacacgacctaagagcccaagaaaacataattataggaatgaaagtgcccgtgaaagcctttgtgattctcctcatcagaatctctcaagacctcttctggaaaacaaacttaaagcattcagtattggaaaaatgagtacagctaagcgaactttaagtaaaaaggaacaggaagaattaaagaaaaaggaggatgaaaaggcagctgctgagatttatgaggagtttcttgctgcttttgaaggaagtgatggtaataaagtgaaaacatttgtgcgagggggtgttgttaatgcagctaaagaagaacatgaaacagatgaaaaaagaggtaaaatctataagccatcttcaagatttgcagatcaaaaaaatcctccaaatcagtcttccaatgaaagaccaccatctcttcttgtgatagaaaccaaaaaacctccacttaaaaaaggagagaaagaaaagaaaaaaagcaatttggaactcttcaaagaagaattaaagcaaattcaagaggaacgtgatgagagacataaaacaaaaggcagattaagtcgatttgaacctcctcagtcagattctgatggtcagcgtcgttctatggacgcgccttcaagaagaaatagatcatctggtgttcttgatgattacgcacctggctcacatgatgtaggagatccaagcactactaatttataccttggaaacattaatccacagatgaatgaagaaatgctgtgccaagaatttggaagatttggaccgttagccagtgtgaaaatcatgtggcctagaactgatgaagaaagagccagagagagaaattgcggctttgtggcctttatgaatagaagagatgctgaaagagctttaaaaaatttgaatggaaaaatgattatgtcttttgaaatgaagttaggttggggtaaagctgtacctattcctccacatccaatatacattccgccttctatgatggaacatacgcttcccccacctccatccggactgccttttaatgcgcagcctagagagcggttaaaaaaccctaatgctcctatgttaccgccacctaaaaacaaagaggattttgagaagactctgtcgcaagccatagtcaaagtggttatcccaacagaaaggaatttgctcgccctgatacatcgaatgatagagtttgttgtacgtgaagggccaatgtttgaagctatgattatgaacagagaaatcaacaatcctatgttcaggttcttatttgaaaaccagacaccagcccatgtttactataggtggaagctttattctattctgcagggagattctccaactaaatggcggacggaagattttcgtatgttcaaaaatggatctttttggaggccaccaccattaaatccgtacttgcatggaatgtcagaagagcaagaaacagaagcttttgtagaggaacctagtaaaaagggagcacttaaggaagaacagagggataaattggaagaaatcttgcggggattaactccaaggaaaaatgatattggagatgcaatggttttctgtcttaataatgctgaagctgctgaagaaatagtggattgcattactgagtcgttgtccatcttaaagacaccccttcctaaaaagattgccagattatatttggtttctgatgttttgtacaactcttcagccaaagttgctaatgcttcatattatagaaaattttttgaaacaaagttatgtcagatattttcagacctcaatgccacctatcgtacaattcaaggccatttacaatctgaaaactttaagcaacgggtaatgacttgcttcagagcatgggaagattgggcaatttatccagaaccatttttgatcaaactacaaaatattttcttaggacttgtaaatattattgaagaaaaggaaacagaggatgttccagatgaccttgatggtgcccccatcgaggaagagcttgatggtgcacctctggaagatgtagatggaattcctattgatgctactcccatcgatgatcttgatggagtccctataaaaagtcttgatgatgatcttgatggagtgcctttggatgcaactgaagactcaaaaaagaatgagcctatatttaaagttgccccatcaaaatgggaagctgtggatgaatctgaattggaagcacaggctgttacaacttctaaatgggaattatttgaccagcatgaagaatcagaagaagaagaaaatcaaaatcaagaagaagaaagtgaagatgaagaagatactcaaagttccaaatctgaagaacatcatttgtactctaatccaatcaaagaagaaatgactgagtctaagttctctaagtactctgaaatgagtgaggaaaaacgagccaaacttcgtgaaattgagctcaaagttatgaagtttcaggatgaattggaatctgggaaaagacctaaaaaaccaggccagagttttcaggagcaagtagaacactacagagataaacttcttcaacgagagaaagagaaagagttagaaagagaacgagaaagagacaagaaagataaagaaaaattggaatctcgctccaaagacaagaaggaaaaagatgagtgtactccgacaaggaaggaaaggaagaggcgacacagtacatcccccagcccatctcgcagtagcagtggtagacgagtgaaatccccatcaccaaaatcggagcgatcagagcgttcagaaagatctcataaagagagctcacggtccaggtcatctcacaaagattctcctagagatgttagcaaaaaagccaaaagatcaccatctggttcaaggacacctaaaaggtctaggcgatcacggtctagatctcctaaaaaatcaggaaagaagtccagatcccagtccagatctccacacaggtctcataaaaagtcaaagaaaaacaaacactgacgtaaatttttaagatgctgtcacttattggaaatgcgatttgttttgtgcctgaacggtctgttttttaaaaaaacaaaaaatcaaatgaaagagcattcctggggttttttgtttgtttgtgtatgcatgtgtaaactcatgagcaactgcatctgtagatctgtcattgttttatattgtgtaaattactttcattgtggctatttctcaagatgaaatttttattgttctaatggatttcatcagaaatgtgtataatggatctgctgacagtagtagtattttgttttaggatgttgtgacttagcaaaaataatacagatgtcttccccccttttgtagctttgacaatttgaattagatttcaaataaaatctgaacagaaaactataatgttgtttttttgccccaccggtgatattaagtcccttaaagtcctactgagtttcacactactgttgtgcttcttatacctgatgcactttataagccccagtgttcaagtagcttaagttttatatttactaagatgactatccaaattaagggacctgagactcctatttggtggtttgctaaccatttgcttttgataagtttctcttgggtaatactaatacccagatatcaaagactaggtagatatggcatggcgttttgttagtggaatgcctggctaaaacatttttttcacagaagcaatatgatttccatacatccaacccatgttctgagcaactacttacttttagggggaaattaaatatcttttcatttcctcttctattatgaaagaagtttatttgtaaaacaaattttctaacaaggtttggccatagaattctcttgtatgattgttgaccttttataatcttctgtaggctatctttcaaacactggcatcagaatattttttataagtttgtgtttaaacagcttagttggtccccccccccactcccaagagacttgggtttagttatagctttaagtaaaatttaaaaataaaatgtttttcaggaaacttcgtatctaatggtttgtaaattcaaggtgcaaaaagttgatttaaaccatttgcagagttgaactctattatgaaaataaatttgctacggtatgaggaagaaataaaacttgtgtaatgttggtcataatactgctataaatataataaagggttatgtagaattgaactgacactattatttgtgaatcttgatttcagttttttatgtaggcacttcatacactggtttgatgggttttttttttcctccctaaaagagaaagtagaaaactattctaacaatggattattttgatttagcttgctttttaaaaaaatcttttcaacttgttttacttaatcttgcctagtcacaaaataagatgtgcacccatggtttggagagttcctatattagctgagcagtgagatacactatttccaaacggtgcacacctacagtagctttggaaatgagccaatcactgttttacttaatggttcttatcagcatgcaaatattgcttgaaagttatttccttattcactgttttgttagtccattttgttaggaaacattaattcctaaaaatttgttcagaataattaaaagtgaacatttggtgctgatactcaaaaacctacaaatgtagccatttaaaaagtaacatgtttttctcccctgctcattgcctgggagaatggaattttatataactacctttctttgcaaaaataacggtcgtgtcgagttggtggtgattttggcattccatcttgcactggtttctagtataggcttagaaataattggtcaggtaataatctttccagtcaagttgcaagggatgcttatttctcttcaaaaaaagacatcctgcgggattgagtagaaaattttaggtcagttttgggtgcttatttgtaatatttttcctactacattggagtttagcagttctttttttctggatccagatacaagtgtcatggtttatcttacagtgggtgaaactgactttcttttggttgggtgggtgaggatttcttaggcctgatagaatatatattctgtgaagtttgttaatgtacatattagattgtattggatttttttttcttgaattgcaaatggtattattagataggttatttccagttttacttcatgacaaattacctagagtaaacctacttaatactccaatggattctatgaaagtttaatgggatcagaaattggtgacttataagggggaagatattctaccatatttttataatagcttattattcatgtttcttgtctgaaggacactcaagttacagagcaaaatttctataggttgactagaatgttcataagcatggtcttccagttgcaggaaagatcatgttctatctgtggacacttactgtcctctaccacagctacgtgccagagttgttttccacagttcttataaagggcatgacttaggctctttaccctccaacttaatgtttatacacagggattgtttactaggttaatgacatttaactcccctctcttctgtaggtgagagaaaataagtaagtcttgatctgtttcttaccaaagagagacagacctatgatggaaaatgatcacgtctctgaattttttctttaacgttatagttccttattacagatagtaagcatatgggaatttctgagctataacatgttgagaagttagaaattaaaactaacacaacaaaaggcgctgaatcaaaagatctttgcttttatttggctcagaatgtttttggcttttctgctaaagatggcagaaattactctacacagacctgatttttctttattgcagaccattcttgtgggcttaccctgagacttttatcccaattagtgaatcttggagggaatacttgcttatttatgacttaggtatttccccccaaactttaatattttcaagtgctcaagaagtcgacgcggccgcgaatttagtagtagta

SEQ ID NO: 302730 - DNA, 2196 bp, Homo sapiens
gcaccggacaaacgtctctggagtctctccaatgagcaagaaagcaagtcgggggtaggggaggggcctcacaccagggggtgggcgcagtccctcctccagctccttcaccctccagtagtctcgtgggtccccgagcgccagcgcgggaaccgggaaaaggaaaccgtgttgtgtacgtaagattcaggaaacgaaaccaggagccgcgggtgttggcgcaaaggttactcccagacccttttccggctgacttctgagaaggttgcgcagcagctgtgcccggcagtctagaggcgcagaagaggaagccatcgcctggccccggctctctggaccttgtctcgctcgggagcggaaacagcggcagccagagactcacagatgaatgcttctcacccggaaacaaacttgccagttgggtatcctcctcagtatccaccgacagcattccaaggacctccaggatatagtggctaccctgggccccaggtcagctacccacccccaccagccggccattcaggtcctggcccagctggctttcctgtcccaaatcagccagtgtataatcagccagtatataatcagccagttggagctgcaggggtaccatggatgccagcgccacagcctccattaaactgtccacctggattagaatatttaagtcagatagatcagatactgattcatcagcaaattgaacttctggaagttttaacaggttttgaaactaataacaaatatgaaattaagaacagctttggacagagggtttactttgcagcggaagatactgattgctgtacccgaaattgctgtgggccatctagaccttttaccttgaggattattgataatatgggtcaagaagtcataactctggagagaccactaagatgtagcagctgttgttgtccctgctgccttcaggagatagaaatccaagctcctcctggtgtaccaataggttatgttattcagacttggcacccatgtctaccaaagtttacaattcaaaatgagaaaagagaggatgtactaaaaataagtggtccatgtgttgtgtgcagctgttgtggagatgttgattttgagattaaatctcttgatgaacagtgtgtggttggcaaaatttccaagcactggactggaattttgagagaggcatttacagacgctgataactttggaatccagttccctttagaccttgatgttaaaatgaaagctgtaatgattggtgcctgtttcctcattgacttcatgttttttgaaagcactggcagccaggaacaaaaatcaggagtgtggtagtggattagtgaaagtctcctcaggaaatctgaagtctgtatattgattgagactatctaaactcatacctgtatgaattaagctgtaaggcctgtagctctggttgtatacttttgcttttcaaattatagtttatcttctgtataactgatttataaaggtttttgtacattttttaatactcattgtcaatttgagaaaaaggacatatgagtttttgcatttattaatgaaacttcctttgaaaaactgctttgaattatgatctctgattcattgtccattttactaccaaatattaactaaggccttattaatttttatataaattatatcttgtcctattaaatctagttacaatttatttcatgcataagagctaatgttattttgcaaatgccatatattcaaaaaagctcaaagataattttctttactattatgttcaaataatattcaatatgcatattatctttaaaaagttaaatgtttttttaatcttcaagaaatcatgctacacttaacttctcctagaagctaatctataccataatattttcatattcacaagatattaaattaccaattttcaaattattgttagtaaagaacaaaatgattctctcccaaagaaagacacattttaaatactccttcactctaaaactctggtattataacttttgaaagttaatatttctacatgaaatgtttagctcttacactctatccttcctagaaaatggtaattgagattactcagatattaattaaatacaatatcatatatatattcacagagtataaacctaaataatgatctattagattcaaatatttgaaataaaaacttgatttttttgtaaaaaaaatttt

SEQ ID NO: 302731 - DNA, 6838 bp, Homo sapiens
gctaggtgcgggctgggtggcggcaggcggatctcagaaggccagttcaaagacgagatcatcagatgttcattcatctggatcttcagatgcacatatggatgcatctggaccctcagatagtgatatgccaagtcggacacgacctaagagcccaagaaaacataattataggaatgaaagtgcccgtgaaagcctttgtgattctcctcatcagaatctctcaagacctcttctggaaaacaaacttaaagcattcagtattggaaaaatgagtacagctaagcgaactttaagtaaaaaggaacaggaagaattaaagaaaaaggaggatgaaaaggcagctgctgagatttatgaggagtttcttgctgcttttgaaggaagtgatggtaataaagtgaaaacatttgtgcgagggggtgttgttaatgcagctaaagaagaacatgaaacagatgaaaaaagaggtaaaatctataagccatcttcaagatttgcagatcaaaaaaatcctccaaatcagtcttccaatgaaagaccaccatctcttcttgtgatagaaaccaaaaaacctccacttaaaaaaggagagaaagaaaagaaaaaaagcaatttggaactcttcaaagaagaattaaagcaaattcaagaggaacgtgatgagagacataaaacaaaaggcagattaagtcgatttgaacctcctcagtcagattctgatggtcagcgtcgttctatggacgcgccttcaagaagaaatagatcatctggtgttcttgatgattacgcacctggctcacatgatgtaggagatccaagcactactaatttataccttggaaacattaatccacagatgaatgaagaaatgctgtgccaagaatttggaagatttggaccgttagccagtgtgaaaatcatgtggcctagaactgatgaagaaagagccagagagagaaattgcggctttgtggcctttatgaatagaagagatgctgaaagagctttaaaaaatttgaatggaaaaatgattatgtcttttgaaatgaagttaggttggggtaaagctgtacctattcctccacatccaatatacattccgccttctatgatggaacatacgcttcccccacctccatccggactgccttttaatgcgcagcctagagagcggttaaaaaaccctaatgctcctatgttaccgccacctaaaaacaaagaggattttgagaagactctgtcgcaagccatagtcaaagtggttatcccaacagaaaggaatttgctcgccctgatacatcgaatgatagagtttgttgtacgtgaagggccaatgtttgaagctatgattatgaacagagaaatcaacaatcctatgttcaggttcttatttgaaaaccagacaccagcccatgtttactataggtggaagctttattctattctgcagggagattctccaactaaatggcggacggaagattttcgtatgttcaaaaatggatctttttggaggccaccaccattaaatccgtacttgcatggaatgtcagaagagcaagaaacagaagcttttgtagaggaacctagtaaaaagggagcacttaaggaagaacagagggataaattggaagaaatcttgcggggattaactccaaggaaaaatgatattggagatgcaatggttttctgtcttaataatgctgaagctgctgaagaaatagtggattgcattactgagtcgttgtccatcttaaagacaccccttcctaaaaagattgccagattatatttggtttctgatgttttgtacaactcttcagccaaagttgctaatgcttcatattatagaaaattttttgaaacaaagttatgtcagatattttcagacctcaatgccacctatcgtacaattcaaggccatttacaatctgaaaactttaagcaacgggtaatgacttgcttcagagcatgggaagattgggcaatttatccagaaccatttttgatcaaactacaaaatattttcttaggacttgtaaatattattgaagaaaaggaaacagaggatgttccagatgaccttgatggtgcccccatcgaggaagagcttgatggtgcacctctggaagatgtagatggaattcctattgatgctactcccatcgatgatcttgatggagtccctataaaaagtcttgatgatgatcttgatggagtgcctttggatgcaactgaagactcaaaaaagaatgagcctatatttaaagttgccccatcaaaatgggaagctgtggatgaatctgaattggaagcacaggctgttacaacttctaaatgggaattatttgaccagcatgaagaatcagaagaagaagaaaatcaaaatcaagaagaagaaagtgaagatgaagaagatactcaaagttccaaatctgaagaacatcatttgtactctaatccaatcaaagaagaaatgactgagtctaagttctctaagtactctgaaatgagtgaggaaaaacgagccaaacttcgtgaaattgagctcaaagttatgaagtttcaggatgaattggaatctgggaaaagacctaaaaaaccaggccagagttttcaggagcaagtagaacactacagagataaacttcttcaacgagagaaagagaaagagttagaaagagaacgagaaagagacaagaaagataaagaaaaattggaatctcgctccaaagacaagaaggaaaaagatgagtgtactccgacaaggaaggaaaggaagaggcgacacagtacatcccccagcccatctcgcagtagcagtggtagacgagtgaaatccccatcaccaaaatcggagcgatcagagcgttcagaaagatctcataaagagagctcacggtccaggtcatctcacaaagattctcctagagatgttagcaaaaaagccaaaagatcaccatctggttcaaggacacctaaaaggtctaggcgatcacggtctagatctcctaaaaaatcaggaaagaagtccagatcccagtccagatctccacacaggtctcataaaaagtcaaagaaaaacaaacactgacgtaaatttttaagatgctgtcacttattggaaatgcgatttgttttgtgcctgaacggtctgttttttaaaaaaacaaaaaatcaaatgaaagagcattcctggggttttttgtttgtttgtgtatgcatgtgtaaactcatgagcaactgcatctgtagatctgtcattgttttatattgtgtaaattactttcattgtggctatttctcaagatgaaatttttattgttctaatggatttcatcagaaatgtgtataatggatctgctgacagtagtagtattttgttttaggatgttgtgacttagcaaaaataatacagatgtcttccccccttttgtagctttgacaatttgaattagatttcaaataaaatctgaacagaaaactataatgttgtttttttgccccaccggtgatattaagtcccttaaagtcctactgagtttcacactactgttgtgcttcttatacctgatgcactttataagccccagtgttcaagtagcttaagttttatatttactaagatgactatccaaattaagggacctgagactcctatttggtggtttgctaaccatttgcttttgataagtttctcttgggtaatactaatacccagatatcaaagactaggtagatatggcatggcgttttgttagtggaatgcctggctaaaacatttttttcacagaagcaatatgatttccatacatccaacccatgttctgagcaactacttacttttagggggaaattaaatatcttttcatttcctcttctattatgaaagaagtttatttgtaaaacaaattttctaacaaggtttggccatagaattctcttgtatgattgttgaccttttataatcttctgtaggctatctttcaaacactggcatcagaatattttttataagtttgtgtttaaacagcttagttggtccccccccccactcccaagagacttgggtttagttatagctttaagtaaaatttaaaaataaaatgtttttcaggaaacttcgtatctaatggtttgtaaattcaaggtgcaaaaagttgatttaaaccatttgcagagttgaactctattatgaaaataaatttgctacggtatgaggaagaaataaaacttgtgtaatgttggtcataatactgctataaatataataaagggttatgtagaattgaactgacactattatttgtgaatcttgatttcagttttttatgtaggcacttcatacactggtttgatgggttttttttttcctccctaaaagagaaagtagaaaactattctaacaatggattattttgatttagcttgctttttaaaaaaatcttttcaacttgttttacttaatcttgcctagtcacaaaataagatgtgcacccatggtttggagagttcctatattagctgagcagtgagatacactatttccaaacggtgcacacctacagtagctttggaaatgagccaatcactgttttacttaatggttcttatcagcatgcaaatattgcttgaaagttatttccttattcactgttttgttagtccattttgttaggaaacattaattcctaaaaatttgttcagaataattaaaagtgaacatttggtgctgatactcaaaaacctacaaatgtagccatttaaaaagtaacatgtttttctcccctgctcattgcctgggagaatggaattttatataactacctttctttgcaaaaataacggtcgtgtcgagttggtggtgattttggcattccatcttgcactggtttctagtataggcttagaaataattggtcaggtaataatctttccagtcaagttgcaagggatgcttatttctcttcaaaaaaagacatcctgcgggattgagtagaaaattttaggtcagttttgggtgcttatttgtaatatttttcctactacattggagtttagcagttctttttttctggatccagatacaagtgtcatggtttatcttacagtgggtgaaactgactttcttttggttgggtgggtgaggatttcttaggcctgatagaatatatattctgtgaagtttgttaatgtacatattagattgtattggatttttttttcttgaattgcaaatggtattattagataggttatttccagttttacttcatgacaaattacctagagtaaacctacttaatactccaatggattctatgaaagtttaatgggatcagaaattggtgacttataagggggaagatattctaccatatttttataatagcttattattcatgtttcttgtctgaaggacactcaagttacagagcaaaatttctataggttgactagaatgttcataagcatggtcttccagttgcaggaaagatcatgttctatctgtggacacttactgtcctctaccacagctacgtgccagagttgttttccacagttcttataaagggcatgacttaggctctttaccctccaacttaatgtttatacacagggattgtttactaggttaatgacatttaactcccctctcttctgtaggtgagagaaaataagtaagtcttgatctgtttcttaccaaagagagacagacctatgatggaaaatgatcacgtctctgaattttttctttaacgttatagttccttattacagatagtaagcatatgggaatttctgagctataacatgttgagaagttagaaattaaaactaacacaacaaaaggcgctgaatcaaaagatctttgcttttatttggctcagaatgtttttggcttttctgctaaagatggcagaaattactctacacagacctgatttttctttattgcagaccattcttgtgggcttaccctgagacttttatcccaattagtgaatcttggagggaatacttgcttatttatgacttaggtatttccccccaaactttaatattcttgagcacttgaaaatacttttgagaaattttaactgtgattaaatttaggtttattagaaatattctgtacacatttgcctccatggtggcgtaagttctgaaaaattatatgaccgtgacaatagtttatcatcatcattattgttattcaaaataagggtaaataaatctctgtattgccaaagtgacttaaactgttctgatgaccacacagtgtgatttctttagcagagaaagttggttttaaaaataaatagtaccacttttctaagactgtacagtttacaaataaggtttttttctttgttgttttcctcttctattaagttttagtgaaaagcctaattacagaaaattgtgcagatactagtgaagatactagtataagtttaaaggaacatgtgactgtaaaatctcacatttacaaagtgcttgatctcttcatatttcacacgcatgttttagaatagattttagggagtgtttaattcattatccttttgacttaaaatttttgttaccaacttcctaggacttagataatatataaataagtacaaatcccaggggaagtgttgtgatgctagactaaaaggtgggaatgtgctgctgttccgtgagccttgttccattgttgaaaatttgatgcctcagtgtttattcagtaccacctcatggagcttcaatgtaaatggattatatgtataattggtaatttgtatagttttgtagattgtagattaaatgcactcatcatgtcacatgt

SEQ ID NO: 302732 - DNA, 6825 bp, Homo sapiens
cgactcgcccgtgctgctgccgccgccgaaggaggggcaaagctcaagatggcggacaaaacgccaggcggatctcagaaggccagttcaaagacgagatcatcagatgttcattcatctggatcttcagatgcacatatggatgcatctggaccctcagatagtgatatgccaagtcggacacgacctaagagcccaagaaaacataattataggaatgaaagtgcccgtgaaagcctttgtgattctcctcatcagaatctctcaagacctcttctggaaaacaaacttaaagcattcagtattggaaaaatgagtacagctaagcgaactttaagtaaaaaggaacaggaagaattaaagaaaaaggaggatgaaaaggcagctgctgagatttatgaggagtttcttgctgcttttgaaggaagtgatggtaataaagtgaaaacatttgtgcgagggggtgttgttaatgcagctaaagaagaacatgaaacagatgaaaaaagaggtaaaatctataagccatcttcaagatttgcagatcaaaaaaatcctccaaatcagtcttccaatgaaagaccaccatctcttcttgtgatagaaaccaaaaaacctccacttaaaaaaggagagaaagaaaagaaaaaaagcaatttggaactcttcaaagaagaattaaagcaaattcaagaggaacgtgatgagagacataaaacaaaaggcagattaagtcgatttgaacctcctcagtcagattctgatggtcagcgtcgttctatggacgcgccttcaagaagaaatagatcatctggtgttcttgatgattacgcacctggctcacatgatgtaggagatccaagcactactaatttataccttggaaacattaatccacagatgaatgaagaaatgctgtgccaagaatttggaagatttggaccgttagccagtgtgaaaatcatgtggcctagaactgatgaagaaagagccagagagagaaattgcggctttgtggcctttatgaatagaagagatgctgaaagagctttaaaaaatttgaatggaaaaatgattatgtcttttgaaatgaagttaggttggggtaaagctgtacctattcctccacatccaatatacattccgccttctatgatggaacatacgcttcccccacctccatccggactgccttttaatgcgcagcctagagagcggttaaaaaaccctaatgctcctatgttaccgccacctaaaaacaaagaggattttgagaagactctgtcgcaagccatagtcaaagtggttatcccaacagaaaggaatttgctcgccctgatacatcgaatgatagagtttgttgtacgtgaagggccaatgtttgaagctatgattatgaacagagaaatcaacaatcctatgttcaggttcttatttgaaaaccagacaccagcccatgtttactataggtggaagctttattctattctgcagggagattctccaactaaatggcggacggaagattttcgtatgttcaaaaatggatctttttggaggccaccaccattaaatccgtacttgcatggaatgtcagaagagcaagaaacagaagcttttgtagaggaacctagtaaaaagggagcacttaaggaagaacagagggataaattggaagaaatcttgcggggattaactccaaggaaaaatgatattggagatgcaatggttttctgtcttaataatgctgaagctgctgaagaaatagtggattgcattactgagtcgttgtccatcttaaagacaccccttcctaaaaagattgccagattatatttggtttctgatgttttgtacaactcttcagccaaagttgctaatgcttcatattatagaaaattttttgaaacaaagttatgtcagatattttcagacctcaatgccacctatcgtacaattcaaggccatttacaatctgaaaactttaagcaacgggtaatgacttgcttcagagcatgggaagattgggcaatttatccagaaccatttttgatcaaactacaaaatattttcttaggacttgtaaatattattgaagagcttgatggtgcacctctggaagatgtagatggaattcctattgatgctactcccatcgatgatcttgatggagtccctataaaaagtcttgatgatgatcttgatggagtgcctttggatgcaactgaagactcaaaaaagaatgagcctatatttaaagttgccccatcaaaatgggaagctgtggatgaatctgaattggaagcacaggctgttacaacttctaaatgggaattatttgaccagcatgaagaatcagaagaagaagaaaatcaaaatcaagaagaagaaagtgaagatgaagaagatactcaaagttccaaatctgaagaacatcatttgtactctaatccaatcaaagaagaaatgactgagtctaagttctctaagtactctgaaatgagtgaggaaaaacgagccaaacttcgtgaaattgagctcaaagttatgaagtttcaggatgaattggaatctgggaaaagacctaaaaaaccaggccagagttttcaggagcaagtagaacactacagagataaacttcttcaacgagagaaagagaaagagttagaaagagaacgagaaagagacaagaaagataaagaaaaattggaatctcgctccaaagacaagaaggaaaaagatgagtgtactccgacaaggaaggaaaggaagaggcgacacagtacatcccccagcccatctcgcagtagcagtggtagacgagtgaaatccccatcaccaaaatcggagcgatcagagcgttcagaaagatctcataaagagagctcacggtccaggtcatctcacaaagattctcctagagatgttagcaaaaaagccaaaagatcaccatctggttcaaggacacctaaaaggtctaggcgatcacggtctagatctcctaaaaaatcaggaaagaagtccagatcccagtccagatctccacacaggtctcataaaaagtcaaagaaaaacaaacactgacgtaaatttttaagatgctgtcacttattggaaatgcgatttgttttgtgcctgaacggtctgttttttaaaaaaacaaaaaatcaaatgaaagagcattcctggggttttttgtttgtttgtgtatgcatgtgtaaactcatgagcaactgcatctgtagatctgtcattgttttatattgtgtaaattactttcattgtggctatttctcaagatgaaatttttattgttctaatggatttcatcagaaatgtgtataatggatctgctgacagtagtagtattttgttttaggatgttgtgacttagcaaaaataatacagatgtcttccccccttttgtagctttgacaatttgaattagatttcaaataaaatctgaacagaaaactataatgttgtttttttgccccaccggtgatattaagtcccttaaagtcctactgagtttcacactactgttgtgcttcttatacctgatgcactttataagccccagtgttcaagtagcttaagttttatatttactaagatgactatccaaattaagggacctgagactcctatttggtggtttgctaaccatttgcttttgataagtttctcttgggtaatactaatacccagatatcaaagactaggtagatatggcatggcgttttgttagtggaatgcctggctaaaacatttttttcacagaagcaatatgatttccatacatccaacccatgttctgagcaactacttacttttagggggaaattaaatatcttttcatttcctcttctattatgaaagaagtttatttgtaaaacaaattttctaacaaggtttggccatagaattctcttgtatgattgttgaccttttataatcttctgtaggctatctttcaaacactggcatcagaatattttttataagtttgtgtttaaacagcttagttggtccccccccccactcccaagagacttgggtttagttatagctttaagtaaaatttaaaaataaaatgtttttcaggaaacttcgtatctaatggtttgtaaattcaaggtgcaaaaagttgatttaaaccatttgcagagttgaactctattatgaaaataaatttgctacggtatgaggaagaaataaaacttgtgtaatgttggtcataatactgctataaatataataaagggttatgtagaattgaactgacactattatttgtgaatcttgatttcagttttttatgtaggcacttcatacactggtttgatgggttttttttttcctccctaaaagagaaagtagaaaactattctaacaatggattattttgatttagcttgctttttaaaaaaatcttttcaacttgttttacttaatcttgcctagtcacaaaataagatgtgcacccatggtttggagagttcctatattagctgagcagtgagatacactatttccaaacggtgcacacctacagtagctttggaaatgagccaatcactgttttacttaatggttcttatcagcatgcaaatattgcttgaaagttatttccttattcactgttttgttagtccattttgttaggaaacattaattcctaaaaatttgttcagaataattaaaagtgaacatttggtgctgatactcaaaaacctacaaatgtagccatttaaaaagtaacatgtttttctcccctgctcattgcctgggagaatggaattttatataactacctttctttgcaaaaataacggtcgtgtcgagttggtggtgattttggcattccatcttgcactggtttctagtataggcttagaaataattggtcaggtaataatctttccagtcaagttgcaagggatgcttatttctcttcaaaaaaagacatcctgcgggattgagtagaaaattttaggtcagttttgggtgcttatttgtaatatttttcctactacattggagtttagcagttctttttttctggatccagatacaagtgtcatggtttatcttacagtgggtgaaactgactttcttttggttgggtgggtgaggatttcttaggcctgatagaatatatattctgtgaagtttgttaatgtacatattagattgtattggatttttttttcttgaattgcaaatggtattattagataggttatttccagttttacttcatgacaaattacctagagtaaacctacttaatactccaatggattctatgaaagtttaatgggatcagaaattggtgacttataagggggaagatattctaccatatttttataatagcttattattcatgtttcttgtctgaaggacactcaagttacagagcaaaatttctataggttgactagaatgttcataagcatggtcttccagttgcaggaaagatcatgttctatctgtggacacttactgtcctctaccacagctacgtgccagagttgttttccacagttcttataaagggcatgacttaggctctttaccctccaacttaatgtttatacacagggattgtttactaggttaatgacatttaactcccctctcttctgtaggtgagagaaaataagtaagtcttgatctgtttcttaccaaagagagacagacctatgatggaaaatgatcacgtctctgaattttttctttaacgttatagttccttattacagatagtaagcatatgggaatttctgagctataacatgttgagaagttagaaattaaaactaacacaacaaaaggcgctgaatcaaaagatctttgcttttatttggctcagaatgtttttggcttttctgctaaagatggcagaaattactctacacagacctgatttttctttattgcagaccattcttgtgggcttaccctgagacttttatcccaattagtgaatcttggagggaatacttgcttatttatgacttaggtatttccccccaaactttaatattcttgagcacttgaaaatacttttgagaaattttaactgtgattaaatttaggtttattagaaatattctgtacacatttgcctccatggtggcgtaagttctgaaaaattatatgaccgtgacaatagtttatcatcatcattattgttattcaaaataagggtaaataaatctctgtattgccaaagtgacttaaactgttctgatgaccacacagtgtgatttctttagcagagaaagttggttttaaaaataaatagtaccacttttctaagactgtacagtttacaaataaggtttttttctttgttgttttcctcttctattaagttttagtgaaaagcctaattacagaaaattgtgcagatactagtgaagatactagtataagtttaaaggaacatgtgactgtaaaatctcacatttacaaagtgcttgatctcttcatatttcacacgcatgttttagaatagattttagggagtgtttaattcattatccttttgacttaaaatttttgttaccaacttcctaggacttagataatatataaataagtacaaatcccaggggaagtgttgtgatgctagactaaaaggtgggaatgtgctgctgttccgtgagccttgttccattgttgaaaatttgatgcctcagtgtttattcagtaccacctcatggagcttcaatgtaaatggattatatgtataattggtaatttgtatagttttgtagattgtagattaaatgcactcatcatgtcacatgt

SEQ ID NO: 302733 - DNA, 6907 bp, Homo sapiens
  misc_feature (47)..(47): n is a, c, g, or t
  misc_feature (52)..(53): n is a, c, g, or t
  misc_feature (56)..(56): n is a, c, g, or t
tctttctctccttttttaagtggaggttttttggtttctatcacaanaaggnnggnggtctttcattggaagactgatttggaggatttttttgatctgcaaatcttgaagatggcttatagattttacctcttttttcatctgtttcatgttcttctttagctgcatggatgcatctggaccctcagatagtgatatgccaagtcggacacgacctaagagcccaagaaaacataattataggaatgaaagtgcccgtgaaagcctttgtgattctcctcatcagaatctctcaagacctcttctggaaaacaaacttaaagcattcagtattggaaaaatgagtacagctaagcgaactttaagtaaaaaggaacaggaagaattaaagaaaaaggaggatgaaaaggcagctgctgagatttatgaggagtttcttgctgcttttgaaggaagtgatggtaataaagtgaaaacatttgtgcgagggggtgttgttaatgcagctaaagaagaacatgaaacagatgaaaaaagaggtaaaatctataagccatcttcaagatttgcagatcaaaaaaatcctccaaatcagtcttccaatgaaagaccaccatctcttcttgtgatagaaaccaaaaaacctccacttaaaaaaggagagaaagaaaagaaaaaaagcaatttggaactcttcaaagaagaattaaagcaaattcaagaggaacgtgatgagagacataaaacaaaaggcagattaagtcgatttgaacctcctcagtcagattctgatggtcagcgtcgttctatggacgcgccttcaagaagaaatagatcatctggtgttcttgatgattacgcacctggctcacatgatgtaggagatccaagcactactaatttataccttggaaacattaatccacagatgaatgaagaaatgctgtgccaagaatttggaagatttggaccgttagccagtgtgaaaatcatgtggcctagaactgatgaagaaagagccagagagagaaattgcggctttgtggcctttatgaatagaagagatgctgaaagagctttaaaaaatttgaatggaaaaatgattatgtcttttgaaatgaagttaggttggggtaaagctgtacctattcctccacatccaatatacattccgccttctatgatggaacatacgcttcccccacctccatccggactgccttttaatgcgcagcctagagagcggttaaaaaaccctaatgctcctatgttaccgccacctaaaaacaaagaggattttgagaagactctgtcgcaagccatagtcaaagtggttatcccaacagaaaggaatttgctcgccctgatacatcgaatgatagagtttgttgtacgtgaagggccaatgtttgaagctatgattatgaacagagaaatcaacaatcctatgttcaggttcttatttgaaaaccagacaccagcccatgtttactataggtggaagctttattctattctgcagggagattctccaactaaatggcggacggaagattttcgtatgttcaaaaatggatctttttggaggccaccaccattaaatccgtacttgcatggaatgtcagaagagcaagaaacagaagcttttgtagaggaacctagtaaaaagggagcacttaaggaagaacagagggataaattggaagaaatcttgcggggattaactccaaggaaaaatgatattggagatgcaatggttttctgtcttaataatgctgaagctgctgaagaaatagtggattgcattactgagtcgttgtccatcttaaagacaccccttcctaaaaagattgccagattatatttggtttctgatgttttgtacaactcttcagccaaagttgctaatgcttcatattatagaaaattttttgaaacaaagttatgtcagatattttcagacctcaatgccacctatcgtacaattcaaggccatttacaatctgaaaactttaagcaacgggtaatgacttgcttcagagcatgggaagattgggcaatttatccagaaccatttttgatcaaactacaaaatattttcttaggacttgtaaatattattgaagaaaaggaaacagaggatgttccagatgaccttgatggtgcccccatcgaggaagagcttgatggtgcacctctggaagatgtagatggaattcctattgatgctactcccatcgatgatcttgatggagtccctataaaaagtcttgatgatgatcttgatggagtgcctttggatgcaactgaagactcaaaaaagaatgagcctatatttaaagttgccccatcaaaatgggaagctgtggatgaatctgaattggaagcacaggctgttacaacttctaaatgggaattatttgaccagcatgaagaatcagaagaagaagaaaatcaaaatcaagaagaagaaagtgaagatgaagaagatactcaaagttccaaatctgaagaacatcatttgtactctaatccaatcaaagaagaaatgactgagtctaagttctctaagtactctgaaatgagtgaggaaaaacgagccaaacttcgtgaaattgagctcaaagttatgaagtttcaggatgaattggaatctgggaaaagacctaaaaaaccaggccagagttttcaggagcaagtagaacactacagagataaacttcttcaacgagagaaagagaaagagttagaaagagaacgagaaagagacaagaaagataaagaaaaattggaatctcgctccaaagacaagaaggaaaaagatgagtgtactccgacaaggaaggaaaggaagaggcgacacagtacatcccccagcccatctcgcagtagcagtggtagacgagtgaaatccccatcaccaaaatcggagcgatcagagcgttcagaaagatctcataaagagagctcacggtccaggtcatctcacaaagattctcctagagatgttagcaaaaaagccaaaagatcaccatctggttcaaggacacctaaaaggtctaggcgatcacggtctagatctcctaaaaaatcaggaaagaagtccagatcccagtccagatctccacacaggtctcataaaaagtcaaagaaaaacaaacactgacgtaaatttttaagatgctgtcacttattggaaatgcgatttgttttgtgcctgaacggtctgttttttaaaaaaacaaaaaatcaaatgaaagagcattcctggggttttttgtttgtttgtgtatgcatgtgtaaactcatgagcaactgcatctgtagatctgtcattgttttatattgtgtaaattactttcattgtggctatttctcaagatgaaatttttattgttctaatggatttcatcagaaatgtgtataatggatctgctgacagtagtagtattttgttttaggatgttgtgacttagcaaaaataatacagatgtcttccccccttttgtagctttgacaatttgaattagatttcaaataaaatctgaacagaaaactataatgttgtttttttgccccaccggtgatattaagtcccttaaagtcctactgagtttcacactactgttgtgcttcttatacctgatgcactttataagccccagtgttcaagtagcttaagttttatatttactaagatgactatccaaattaagggacctgagactcctatttggtggtttgctaaccatttgcttttgataagtttctcttgggtaatactaatacccagatatcaaagactaggtagatatggcatggcgttttgttagtggaatgcctggctaaaacatttttttcacagaagcaatatgatttccatacatccaacccatgttctgagcaactacttacttttagggggaaattaaatatcttttcatttcctcttctattatgaaagaagtttatttgtaaaacaaattttctaacaaggtttggccatagaattctcttgtatgattgttgaccttttataatcttctgtaggctatctttcaaacactggcatcagaatattttttataagtttgtgtttaaacagcttagttggtccccccccccactcccaagagacttgggtttagttatagctttaagtaaaatttaaaaataaaatgtttttcaggaaacttcgtatctaatggtttgtaaattcaaggtgcaaaaagttgatttaaaccatttgcagagttgaactctattatgaaaataaatttgctacggtatgaggaagaaataaaacttgtgtaatgttggtcataatactgctataaatataataaagggttatgtagaattgaactgacactattatttgtgaatcttgatttcagttttttatgtaggcacttcatacactggtttgatgggttttttttttcctccctaaaagagaaagtagaaaactattctaacaatggattattttgatttagcttgctttttaaaaaaatcttttcaacttgttttacttaatcttgcctagtcacaaaataagatgtgcacccatggtttggagagttcctatattagctgagcagtgagatacactatttccaaacggtgcacacctacagtagctttggaaatgagccaatcactgttttacttaatggttcttatcagcatgcaaatattgcttgaaagttatttccttattcactgttttgttagtccattttgttaggaaacattaattcctaaaaatttgttcagaataattaaaagtgaacatttggtgctgatactcaaaaacctacaaatgtagccatttaaaaagtaacatgtttttctcccctgctcattgcctgggagaatggaattttatataactacctttctttgcaaaaataacggtcgtgtcgagttggtggtgattttggcattccatcttgcactggtttctagtataggcttagaaataattggtcaggtaataatctttccagtcaagttgcaagggatgcttatttctcttcaaaaaaagacatcctgcgggattgagtagaaaattttaggtcagttttgggtgcttatttgtaatatttttcctactacattggagtttagcagttctttttttctggatccagatacaagtgtcatggtttatcttacagtgggtgaaactgactttcttttggttgggtgggtgaggatttcttaggcctgatagaatatatattctgtgaagtttgttaatgtacatattagattgtattggatttttttttcttgaattgcaaatggtattattagataggttatttccagttttacttcatgacaaattacctagagtaaacctacttaatactccaatggattctatgaaagtttaatgggatcagaaattggtgacttataagggggaagatattctaccatatttttataatagcttattattcatgtttcttgtctgaaggacactcaagttacagagcaaaatttctataggttgactagaatgttcataagcatggtcttccagttgcaggaaagatcatgttctatctgtggacacttactgtcctctaccacagctacgtgccagagttgttttccacagttcttataaagggcatgacttaggctctttaccctccaacttaatgtttatacacagggattgtttactaggttaatgacatttaactcccctctcttctgtaggtgagagaaaataagtaagtcttgatctgtttcttaccaaagagagacagacctatgatggaaaatgatcacgtctctgaattttttctttaacgttatagttccttattacagatagtaagcatatgggaatttctgagctataacatgttgagaagttagaaattaaaactaacacaacaaaaggcgctgaatcaaaagatctttgcttttatttggctcagaatgtttttggcttttctgctaaagatggcagaaattactctacacagacctgatttttctttattgcagaccattcttgtgggcttaccctgagacttttatcccaattagtgaatcttggagggaatacttgcttatttatgacttaggtatttccccccaaactttaatattcttgagcacttgaaaatacttttgagaaattttaactgtgattaaatttaggtttattagaaatattctgtacacatttgcctccatggtggcgtaagttctgaaaaattatatgaccgtgacaatagtttatcatcatcattattgttattcaaaataagggtaaataaatctctgtattgccaaagtgacttaaactgttctgatgaccacacagtgtgatttctttagcagagaaagttggttttaaaaataaatagtaccacttttctaagactgtacagtttacaaataaggtttttttctttgttgttttcctcttctattaagttttagtgaaaagcctaattacagaaaattgtgcagatactagtgaagatactagtataagtttaaaggaacatgtgactgtaaaatctcacatttacaaagtgcttgatctcttcatatttcacacgcatgttttagaatagattttagggagtgtttaattcattatccttttgacttaaaatttttgttaccaacttcctaggacttagataatatataaataagtacaaatcccaggggaagtgttgtgatgctagactaaaaggtgggaatgtgctgctgttccgtgagccttgttccattgttgaaaatttgatgcctcagtgtttattcagtaccacctcatggagcttcaatgtaaatggattatatgtataattggtaatttgtatagttttgtagattgtagattaaatgcactcatcatgtcacatgt

SEQ ID NO: 302734 - DNA, 2168 bp, Homo sapiens
gcaccggacaaacgtctctggagtctctccaatgagcaagaaagcaagtcgggggtaggggaggggcctcacaccagggggtgggcgcagtccctcctccagctccttcaccctccagtagtctcgtgggtccccgagcgccagcgcgggaaccgggaaaaggaaaccgtgttgtgtacgtaagattcaggaaacgaaaccaggagccgcgggtgttggcgcaaaggttactcccagacccttttccggctgacttctgagaaggttgcgcagcagctgtgcccggcagtctagaggcgcagaagaggaagccatcgcctggccccggctctctggaccttgtctcgctcgggagcggaaacagcggcagccagagaactgttttaatcatggacaaacctcctcagtatccaccgacagcattccaaggacctccaggatatagtggctaccctgggccccaggtcagctacccacccccaccagccggccattcaggtcctggcccagctggctttcctgtcccaaatcagccagtgtataatcagccagtatataatcagccagttggagctgcaggggtaccatggatgccagcgccacagcctccattaaactgtccacctggattagaatatttaagtcagatagatcagatactgattcatcagcaaattgaacttctggaagttttaacaggttttgaaactaataacaaatatgaaattaagaacagctttggacagagggtttactttgcagcggaagatactgattgctgtacccgaaattgctgtgggccatctagaccttttaccttgaggattattgataatatgggtcaagaagtcataactctggagagaccactaagatgtagcagctgttgttgtccctgctgccttcaggagatagaaatccaagctcctcctggtgtaccaataggttatgttattcagacttggcacccatgtctaccaaagtttacaattcaaaatgagaaaagagaggatgtactaaaaataagtggtccatgtgttgtgtgcagctgttgtggagatgttgattttgagattaaatctcttgatgaacagtgtgtggttggcaaaatttccaagcactggactggaattttgagagaggcatttacagacgctgataactttggaatccagttccctttagaccttgatgttaaaatgaaagctgtaatgattggtgcctgtttcctcattgacttcatgttttttgaaagcactggcagccaggaacaaaaatcaggagtgtggtagtggattagtgaaagtctcctcaggaaatctgaagtctgtatattgattgagactatctaaactcatacctgtatgaattaagctgtaaggcctgtagctctggttgtatacttttgcttttcaaattatagtttatcttctgtataactgatttataaaggtttttgtacattttttaatactcattgtcaatttgagaaaaaggacatatgagtttttgcatttattaatgaaacttcctttgaaaaactgctttgaattatgatctctgattcattgtccattttactaccaaatattaactaaggccttattaatttttatataaattatatcttgtcctattaaatctagttacaatttatttcatgcataagagctaatgttattttgcaaatgccatatattcaaaaaagctcaaagataattttctttactattatgttcaaataatattcaatatgcatattatctttaaaaagttaaatgtttttttaatcttcaagaaatcatgctacacttaacttctcctagaagctaatctataccataatattttcatattcacaagatattaaattaccaattttcaaattattgttagtaaagaacaaaatgattctctcccaaagaaagacacattttaaatactccttcactctaaaactctggtattataacttttgaaagttaatatttctacatgaaatgtttagctcttacactctatccttcctagaaaatggtaattgagattactcagatattaattaaatacaatatcatatatatattcacagagtataaacctaaataatgatctattagattcaaatatttgaaataaaaacttgatttttttgtaaaaaaaatttt

SEQ ID NO: 302735 - DNA, 6651 bp, Homo sapiens
  misc_feature (32)..(32): n is a, c, g, or t
ggagaagtgccctgaagccgtgctcctcatcngatctctcagcctcttctggaaaacaaacttaaagcattcagtattggaaaaatgagtacagctaagcgaactttaagtaaaaaggaacaggaagaattaaagaaaaaggaggatgaaaaggcagctgctgagatttatgaggagtttcttgctgcttttgaaggaagtgatggtaataaagtgaaaacatttgtgcgagggggtgttgttaatgcagctaaagaagaacatgaaacagatgaaaaaagaggtaaaatctataagccatcttcaagatttgcagatcaaaaaaatcctccaaatcagtcttccaatgaaagaccaccatctcttcttgtgatagaaaccaaaaaacctccacttaaaaaaggagagaaagaaaagaaaaaaagcaatttggaactcttcaaagaagaattaaagcaaattcaagaggaacgtgatgagagacataaaacaaaaggcagattaagtcgatttgaacctcctcagtcagattctgatggtcagcgtcgttctatggacgcgccttcaagaagaaatagatcatctggtgttcttgatgattacgcacctggctcacatgatgtaggagatccaagcactactaatttataccttggaaacattaatccacagatgaatgaagaaatgctgtgccaagaatttggaagatttggaccgttagccagtgtgaaaatcatgtggcctagaactgatgaagaaagagccagagagagaaattgcggctttgtggcctttatgaatagaagagatgctgaaagagctttaaaaaatttgaatggaaaaatgattatgtcttttgaaatgaagttaggttggggtaaagctgtacctattcctccacatccaatatacattccgccttctatgatggaacatacgcttcccccacctccatccggactgccttttaatgcgcagcctagagagcggttaaaaaaccctaatgctcctatgttaccgccacctaaaaacaaagaggattttgagaagactctgtcgcaagccatagtcaaagtggttatcccaacagaaaggaatttgctcgccctgatacatcgaatgatagagtttgttgtacgtgaagggccaatgtttgaagctatgattatgaacagagaaatcaacaatcctatgttcaggttcttatttgaaaaccagacaccagcccatgtttactataggtggaagctttattctattctgcagggagattctccaactaaatggcggacggaagattttcgtatgttcaaaaatggatctttttggaggccaccaccattaaatccgtacttgcatggaatgtcagaagagcaagaaacagaagcttttgtagaggaacctagtaaaaagggagcacttaaggaagaacagagggataaattggaagaaatcttgcggggattaactccaaggaaaaatgatattggagatgcaatggttttctgtcttaataatgctgaagctgctgaagaaatagtggattgcattactgagtcgttgtccatcttaaagacaccccttcctaaaaagattgccagattatatttggtttctgatgttttgtacaactcttcagccaaagttgctaatgcttcatattatagaaaattttttgaaacaaagttatgtcagatattttcagacctcaatgccacctatcgtacaattcaaggccatttacaatctgaaaactttaagcaacgggtaatgacttgcttcagagcatgggaagattgggcaatttatccagaaccatttttgatcaaactacaaaatattttcttaggacttgtaaatattattgaagaaaaggaaacagaggatgttccagatgaccttgatggtgcccccatcgaggaagagcttgatggtgcacctctggaagatgtagatggaattcctattgatgctactcccatcgatgatcttgatggagtccctataaaaagtcttgatgatgatcttgatggagtgcctttggatgcaactgaagactcaaaaaagaatgagcctatatttaaagttgccccatcaaaatgggaagctgtggatgaatctgaattggaagcacaggctgttacaacttctaaatgggaattatttgaccagcatgaagaatcagaagaagaagaaaatcaaaatcaagaagaagaaagtgaagatgaagaagatactcaaagttccaaatctgaagaacatcatttgtactctaatccaatcaaagaagaaatgactgagtctaagttctctaagtactctgaaatgagtgaggaaaaacgagccaaacttcgtgaaattgagctcaaagttatgaagtttcaggatgaattggaatctgggaaaagacctaaaaaaccaggccagagttttcaggagcaagtagaacactacagagataaacttcttcaacgagagaaagagaaagagttagaaagagaacgagaaagagacaagaaagataaagaaaaattggaatctcgctccaaagacaagaaggaaaaagatgagtgtactccgacaaggaaggaaaggaagaggcgacacagtacatcccccagcccatctcgcagtagcagtggtagacgagtgaaatccccatcaccaaaatcggagcgatcagagcgttcagaaagatctcataaagagagctcacggtccaggtcatctcacaaagattctcctagagatgttagcaaaaaagccaaaagatcaccatctggttcaaggacacctaaaaggtctaggcgatcacggtctagatctcctaaaaaatcaggaaagaagtccagatcccagtccagatctccacacaggtctcataaaaagtcaaagaaaaacaaacactgacgtaaatttttaagatgctgtcacttattggaaatgcgatttgttttgtgcctgaacggtctgttttttaaaaaaacaaaaaatcaaatgaaagagcattcctggggttttttgtttgtttgtgtatgcatgtgtaaactcatgagcaactgcatctgtagatctgtcattgttttatattgtgtaaattactttcattgtggctatttctcaagatgaaatttttattgttctaatggatttcatcagaaatgtgtataatggatctgctgacagtagtagtattttgttttaggatgttgtgacttagcaaaaataatacagatgtcttccccccttttgtagctttgacaatttgaattagatttcaaataaaatctgaacagaaaactataatgttgtttttttgccccaccggtgatattaagtcccttaaagtcctactgagtttcacactactgttgtgcttcttatacctgatgcactttataagccccagtgttcaagtagcttaagttttatatttactaagatgactatccaaattaagggacctgagactcctatttggtggtttgctaaccatttgcttttgataagtttctcttgggtaatactaatacccagatatcaaagactaggtagatatggcatggcgttttgttagtggaatgcctggctaaaacatttttttcacagaagcaatatgatttccatacatccaacccatgttctgagcaactacttacttttagggggaaattaaatatcttttcatttcctcttctattatgaaagaagtttatttgtaaaacaaattttctaacaaggtttggccatagaattctcttgtatgattgttgaccttttataatcttctgtaggctatctttcaaacactggcatcagaatattttttataagtttgtgtttaaacagcttagttggtccccccccccactcccaagagacttgggtttagttatagctttaagtaaaatttaaaaataaaatgtttttcaggaaacttcgtatctaatggtttgtaaattcaaggtgcaaaaagttgatttaaaccatttgcagagttgaactctattatgaaaataaatttgctacggtatgaggaagaaataaaacttgtgtaatgttggtcataatactgctataaatataataaagggttatgtagaattgaactgacactattatttgtgaatcttgatttcagttttttatgtaggcacttcatacactggtttgatgggttttttttttcctccctaaaagagaaagtagaaaactattctaacaatggattattttgatttagcttgctttttaaaaaaatcttttcaacttgttttacttaatcttgcctagtcacaaaataagatgtgcacccatggtttggagagttcctatattagctgagcagtgagatacactatttccaaacggtgcacacctacagtagctttggaaatgagccaatcactgttttacttaatggttcttatcagcatgcaaatattgcttgaaagttatttccttattcactgttttgttagtccattttgttaggaaacattaattcctaaaaatttgttcagaataattaaaagtgaacatttggtgctgatactcaaaaacctacaaatgtagccatttaaaaagtaacatgtttttctcccctgctcattgcctgggagaatggaattttatataactacctttctttgcaaaaataacggtcgtgtcgagttggtggtgattttggcattccatcttgcactggtttctagtataggcttagaaataattggtcaggtaataatctttccagtcaagttgcaagggatgcttatttctcttcaaaaaaagacatcctgcgggattgagtagaaaattttaggtcagttttgggtgcttatttgtaatatttttcctactacattggagtttagcagttctttttttctggatccagatacaagtgtcatggtttatcttacagtgggtgaaactgactttcttttggttgggtgggtgaggatttcttaggcctgatagaatatatattctgtgaagtttgttaatgtacatattagattgtattggatttttttttcttgaattgcaaatggtattattagataggttatttccagttttacttcatgacaaattacctagagtaaacctacttaatactccaatggattctatgaaagtttaatgggatcagaaattggtgacttataagggggaagatattctaccatatttttataatagcttattattcatgtttcttgtctgaaggacactcaagttacagagcaaaatttctataggttgactagaatgttcataagcatggtcttccagttgcaggaaagatcatgttctatctgtggacacttactgtcctctaccacagctacgtgccagagttgttttccacagttcttataaagggcatgacttaggctctttaccctccaacttaatgtttatacacagggattgtttactaggttaatgacatttaactcccctctcttctgtaggtgagagaaaataagtaagtcttgatctgtttcttaccaaagagagacagacctatgatggaaaatgatcacgtctctgaattttttctttaacgttatagttccttattacagatagtaagcatatgggaatttctgagctataacatgttgagaagttagaaattaaaactaacacaacaaaaggcgctgaatcaaaagatctttgcttttatttggctcagaatgtttttggcttttctgctaaagatggcagaaattactctacacagacctgatttttctttattgcagaccattcttgtgggcttaccctgagacttttatcccaattagtgaatcttggagggaatacttgcttatttatgacttaggtatttccccccaaactttaatattcttgagcacttgaaaatacttttgagaaattttaactgtgattaaatttaggtttattagaaatattctgtacacatttgcctccatggtggcgtaagttctgaaaaattatatgaccgtgacaatagtttatcatcatcattattgttattcaaaataagggtaaataaatctctgtattgccaaagtgacttaaactgttctgatgaccacacagtgtgatttctttagcagagaaagttggttttaaaaataaatagtaccacttttctaagactgtacagtttacaaataaggtttttttctttgttgttttcctcttctattaagttttagtgaaaagcctaattacagaaaattgtgcagatactagtgaagatactagtataagtttaaaggaacatgtgactgtaaaatctcacatttacaaagtgcttgatctcttcatatttcacacgcatgttttagaatagattttagggagtgtttaattcattatccttttgacttaaaatttttgttaccaacttcctaggacttagataatatataaataagtacaaatcccaggggaagtgttgtgatgctagactaaaaggtgggaatgtgctgctgttccgtgagccttgttccattgttgaaaatttgatgcctcagtgtttattcagtaccacctcatggagcttcaatgtaaatggattatatgtataattggtaatttgtatagttttgtagattgtagattaaatgcactcatcatgtcacatgt

SEQ ID NO: 302736 - DNA, 6754 bp, Homo sapiens
gtccaacttcatttttctgtatgtagatattcagttgtccaagcaccatttgttgaaaagattattcttccctattaaattatgttggcacttctaaaagaaggattccaaaagtagattaagaagcagttttaaaagaggattccaaagatgttacttactgttccagtaactcatgtcctccagaggtgatttttgaagagtgcgtatttttggcagttactttccatggcagttcagttacttcatgttcattaatttccctgactactggttgtcattttaattgtttaattgtagtaataatttaattgtttgttattttgaaggaaggggaagggaggttcaatgataagaaaagcattcttcctttttaatttaaataattagaacatacaatttgtactgaaatgatgtaaaaaggctcttattattgaatcattggttttgcttatccttttgtttgaagtataacttgtcatatcctttatagccacttaaaaaaggagagaaagaaaagaaaaaaagcaatttggaactcttcaaagaagaattaaagcaaattcaagaggaacgtgatgagagacataaaacaaaaggcagattaagtcgatttgaacctcctcagtcagattctgatggtcagcgtcgttctatggacgcgccttcaagaagaaatagatcatctggtgttcttgatgattacgcacctggctcacatgatgtaggagatccaagcactactaatttataccttggaaacattaatccacagatgaatgaagaaatgctgtgccaagaatttggaagatttggaccgttagccagtgtgaaaatcatgtggcctagaactgatgaagaaagagccagagagagaaattgcggctttgtggcctttatgaatagaagagatgctgaaagagctttaaaaaatttgaatggaaaaatgattatgtcttttgaaatgaagttaggttggggtaaagctgtacctattcctccacatccaatatacattccgccttctatgatggaacatacgcttcccccacctccatccggactgccttttaatgcgcagcctagagagcggttaaaaaaccctaatgctcctatgttaccgccacctaaaaacaaagaggattttgagaagactctgtcgcaagccatagtcaaagtggttatcccaacagaaaggaatttgctcgccctgatacatcgaatgatagagtttgttgtacgtgaagggccaatgtttgaagctatgattatgaacagagaaatcaacaatcctatgttcaggttcttatttgaaaaccagacaccagcccatgtttactataggtggaagctttattctattctgcagggagattctccaactaaatggcggacggaagattttcgtatgttcaaaaatggatctttttggaggccaccaccattaaatccgtacttgcatggaatgtcagaagagcaagaaacagaagcttttgtagaggaacctagtaaaaagggagcacttaaggaagaacagagggataaattggaagaaatcttgcggggattaactccaaggaaaaatgatattggagatgcaatggttttctgtcttaataatgctgaagctgctgaagaaatagtggattgcattactgagtcgttgtccatcttaaagacaccccttcctaaaaagattgccagattatatttggtttctgatgttttgtacaactcttcagccaaagttgctaatgcttcatattatagaaaattttttgaaacaaagttatgtcagatattttcagacctcaatgccacctatcgtacaattcaaggccatttacaatctgaaaactttaagcaacgggtaatgacttgcttcagagcatgggaagattgggcaatttatccagaaccatttttgatcaaactacaaaatattttcttaggacttgtaaatattattgaagaaaaggaaacagaggatgttccagatgaccttgatggtgcccccatcgaggaagagcttgatggtgcacctctggaagatgtagatggaattcctattgatgctactcccatcgatgatcttgatggagtccctataaaaagtcttgatgatgatcttgatggagtgcctttggatgcaactgaagactcaaaaaagaatgagcctatatttaaagttgccccatcaaaatgggaagctgtggatgaatctgaattggaagcacaggctgttacaacttctaaatgggaattatttgaccagcatgaagaatcagaagaagaagaaaatcaaaatcaagaagaagaaagtgaagatgaagaagatactcaaagttccaaatctgaagaacatcatttgtactctaatccaatcaaagaagaaatgactgagtctaagttctctaagtactctgaaatgagtgaggaaaaacgagccaaacttcgtgaaattgagctcaaagttatgaagtttcaggatgaattggaatctgggaaaagacctaaaaaaccaggccagagttttcaggagcaagtagaacactacagagataaacttcttcaacgagagaaagagaaagagttagaaagagaacgagaaagagacaagaaagataaagaaaaattggaatctcgctccaaagacaagaaggaaaaagatgagtgtactccgacaaggaaggaaaggaagaggcgacacagtacatcccccagcccatctcgcagtagcagtggtagacgagtgaaatccccatcaccaaaatcggagcgatcagagcgttcagaaagatctcataaagagagctcacggtccaggtcatctcacaaagattctcctagagatgttagcaaaaaagccaaaagatcaccatctggttcaaggacacctaaaaggtctaggcgatcacggtctagatctcctaaaaaatcaggaaagaagtccagatcccagtccagatctccacacaggtctcataaaaagtcaaagaaaaacaaacactgacgtaaatttttaagatgctgtcacttattggaaatgcgatttgttttgtgcctgaacggtctgttttttaaaaaaacaaaaaatcaaatgaaagagcattcctggggttttttgtttgtttgtgtatgcatgtgtaaactcatgagcaactgcatctgtagatctgtcattgttttatattgtgtaaattactttcattgtggctatttctcaagatgaaatttttattgttctaatggatttcatcagaaatgtgtataatggatctgctgacagtagtagtattttgttttaggatgttgtgacttagcaaaaataatacagatgtcttccccccttttgtagctttgacaatttgaattagatttcaaataaaatctgaacagaaaactataatgttgtttttttgccccaccggtgatattaagtcccttaaagtcctactgagtttcacactactgttgtgcttcttatacctgatgcactttataagccccagtgttcaagtagcttaagttttatatttactaagatgactatccaaattaagggacctgagactcctatttggtggtttgctaaccatttgcttttgataagtttctcttgggtaatactaatacccagatatcaaagactaggtagatatggcatggcgttttgttagtggaatgcctggctaaaacatttttttcacagaagcaatatgatttccatacatccaacccatgttctgagcaactacttacttttagggggaaattaaatatcttttcatttcctcttctattatgaaagaagtttatttgtaaaacaaattttctaacaaggtttggccatagaattctcttgtatgattgttgaccttttataatcttctgtaggctatctttcaaacactggcatcagaatattttttataagtttgtgtttaaacagcttagttggtccccccccccactcccaagagacttgggtttagttatagctttaagtaaaatttaaaaataaaatgtttttcaggaaacttcgtatctaatggtttgtaaattcaaggtgcaaaaagttgatttaaaccatttgcagagttgaactctattatgaaaataaatttgctacggtatgaggaagaaataaaacttgtgtaatgttggtcataatactgctataaatataataaagggttatgtagaattgaactgacactattatttgtgaatcttgatttcagttttttatgtaggcacttcatacactggtttgatgggttttttttttcctccctaaaagagaaagtagaaaactattctaacaatggattattttgatttagcttgctttttaaaaaaatcttttcaacttgttttacttaatcttgcctagtcacaaaataagatgtgcacccatggtttggagagttcctatattagctgagcagtgagatacactatttccaaacggtgcacacctacagtagctttggaaatgagccaatcactgttttacttaatggttcttatcagcatgcaaatattgcttgaaagttatttccttattcactgttttgttagtccattttgttaggaaacattaattcctaaaaatttgttcagaataattaaaagtgaacatttggtgctgatactcaaaaacctacaaatgtagccatttaaaaagtaacatgtttttctcccctgctcattgcctgggagaatggaattttatataactacctttctttgcaaaaataacggtcgtgtcgagttggtggtgattttggcattccatcttgcactggtttctagtataggcttagaaataattggtcaggtaataatctttccagtcaagttgcaagggatgcttatttctcttcaaaaaaagacatcctgcgggattgagtagaaaattttaggtcagttttgggtgcttatttgtaatatttttcctactacattggagtttagcagttctttttttctggatccagatacaagtgtcatggtttatcttacagtgggtgaaactgactttcttttggttgggtgggtgaggatttcttaggcctgatagaatatatattctgtgaagtttgttaatgtacatattagattgtattggatttttttttcttgaattgcaaatggtattattagataggttatttccagttttacttcatgacaaattacctagagtaaacctacttaatactccaatggattctatgaaagtttaatgggatcagaaattggtgacttataagggggaagatattctaccatatttttataatagcttattattcatgtttcttgtctgaaggacactcaagttacagagcaaaatttctataggttgactagaatgttcataagcatggtcttccagttgcaggaaagatcatgttctatctgtggacacttactgtcctctaccacagctacgtgccagagttgttttccacagttcttataaagggcatgacttaggctctttaccctccaacttaatgtttatacacagggattgtttactaggttaatgacatttaactcccctctcttctgtaggtgagagaaaataagtaagtcttgatctgtttcttaccaaagagagacagacctatgatggaaaatgatcacgtctctgaattttttctttaacgttatagttccttattacagatagtaagcatatgggaatttctgagctataacatgttgagaagttagaaattaaaactaacacaacaaaaggcgctgaatcaaaagatctttgcttttatttggctcagaatgtttttggcttttctgctaaagatggcagaaattactctacacagacctgatttttctttattgcagaccattcttgtgggcttaccctgagacttttatcccaattagtgaatcttggagggaatacttgcttatttatgacttaggtatttccccccaaactttaatattcttgagcacttgaaaatacttttgagaaattttaactgtgattaaatttaggtttattagaaatattctgtacacatttgcctccatggtggcgtaagttctgaaaaattatatgaccgtgacaatagtttatcatcatcattattgttattcaaaataagggtaaataaatctctgtattgccaaagtgacttaaactgttctgatgaccacacagtgtgatttctttagcagagaaagttggttttaaaaataaatagtaccacttttctaagactgtacagtttacaaataaggtttttttctttgttgttttcctcttctattaagttttagtgaaaagcctaattacagaaaattgtgcagatactagtgaagatactagtataagtttaaaggaacatgtgactgtaaaatctcacatttacaaagtgcttgatctcttcatatttcacacgcatgttttagaatagattttagggagtgtttaattcattatccttttgacttaaaatttttgttaccaacttcctaggacttagataatatataaataagtacaaatcccaggggaagtgttgtgatgctagactaaaaggtgggaatgtgctgctgttccgtgagccttgttccattgttgaaaatttgatgcctcagtgtttattcagtaccacctcatggagcttcaatgtaaatggattatatgtataattggtaatttgtatagttttgtagattgtagattaaatgcactcatcatgtcacatgt

SEQ ID NO: 302737 - DNA, 2150 bp, Homo sapiens
gcaccggacaaacgtctctggagtctctccaatgagcaagaaagcaagtcgggggtaggggaggggcctcacaccagggggtgggcgcagtccctcctccagctccttcaccctccagtagtctcgtgggtccccgagcgccagcgcgggaaccgggaaaaggaaaccgtgttgtgtacgtaagattcaggaaacgaaaccaggagccgcgggtgttggcgcaaaggttactcccagacccttttccggctgacttctgagaaggttgcgcagcagctgtgcccggcagtctagaggcgcagaagaggaagccatcgcctggccccggctctctggaccttgtctcgctcgggagcggaaacagcggcagccagagaactgttttaatcatggacaaacaaaactcacagatgaatgcttctcacccggaaacaaacttgccagttgggtatcctcctcagtatccaccgacagcattccaaggacctccaggatatagtggctaccctgggccccaggtcagctacccacccccaccagccggccattcaggtcctggcccagctggctttcctgtcccaaatcagccagtgtataatcagccagtatataatcagccagttggagctgcaggggtaccatggatgccagcgccacagcctccattaaactgtccacctggattagaatatttaagtcagatagatcagatactgattcatcagcaaattgaacttctggaagcggaagatactgattgctgtacccgaaattgctgtgggccatctagaccttttaccttgaggattattgataatatgggtcaagaagtcataactctggagagaccactaagatgtagcagctgttgttgtccctgctgccttcaggagatagaaatccaagctcctcctggtgtaccaataggttatgttattcagacttggcacccatgtctaccaaagtttacaattcaaaatgagaaaagagaggatgtactaaaaataagtggtccatgtgttgtgtgcagctgttgtggagatgttgattttgagattaaatctcttgatgaacagtgtgtggttggcaaaatttccaagcactggactggaattttgagagaggcatttacagacgctgataactttggaatccagttccctttagaccttgatgttaaaatgaaagctgtaatgattggtgcctgtttcctcattgacttcatgttttttgaaagcactggcagccaggaacaaaaatcaggagtgtggtagtggattagtgaaagtctcctcaggaaatctgaagtctgtatattgattgagactatctaaactcatacctgtatgaattaagctgtaaggcctgtagctctggttgtatacttttgcttttcaaattatagtttatcttctgtataactgatttataaaggtttttgtacattttttaatactcattgtcaatttgagaaaaaggacatatgagtttttgcatttattaatgaaacttcctttgaaaaactgctttgaattatgatctctgattcattgtccattttactaccaaatattaactaaggccttattaatttttatataaattatatcttgtcctattaaatctagttacaatttatttcatgcataagagctaatgttattttgcaaatgccatatattcaaaaaagctcaaagataattttctttactattatgttcaaataatattcaatatgcatattatctttaaaaagttaaatgtttttttaatcttcaagaaatcatgctacacttaacttctcctagaagctaatctataccataatattttcatattcacaagatattaaattaccaattttcaaattattgttagtaaagaacaaaatgattctctcccaaagaaagacacattttaaatactccttcactctaaaactctggtattataacttttgaaagttaatatttctacatgaaatgtttagctcttacactctatccttcctagaaaatggtaattgagattactcagatattaattaaatacaatatcatatatatattcacagagtataaacctaaataatgatctattagattcaaatatttgaaataaaaacttgatttttttgtaaaaaaaatttt

SEQ ID NO: 302738 - DNA, 6419 bp, Homo sapiens
  misc_feature (47)..(47): n is a, c, g, or t
  misc_feature (52)..(53): n is a, c, g, or t
  misc_feature (56)..(56): n is a, c, g, or t
tctttctctccttttttaagtggaggttttttggtttctatcacaanaaggnnggnggtctttcattggaagactgatttgcagatcaaaaaaatcctccaaatcagtcttccaatgaaagaccaccatctcttcttgtgatagaaaccaaaaaacctccacttaaaaaaggagagaaagaaaagaaaaaaagcaatttggaactcttcaaagaagaattaaagcaaattcaagaggaacgtgatgagagacataaaacaaaaggcagattaagtcgatttgaacctcctcagtcagattctgatggtcagcgtcgttctatggacgcgccttcaagaagaaatagatcatctggtgttcttgatgattacgcacctggctcacatgatgtaggagatccaagcactactaatttataccttggaaacattaatccacagatgaatgaagaaatgctgtgccaagaatttggaagatttggaccgttagccagtgtgaaaatcatgtggcctagaactgatgaagaaagagccagagagagaaattgcggctttgtggcctttatgaatagaagagatgctgaaagagctttaaaaaatttgaatggaaaaatgattatgtcttttgaaatgaagttaggttggggtaaagctgtacctattcctccacatccaatatacattccgccttctatgatggaacatacgcttcccccacctccatccggactgccttttaatgcgcagcctagagagcggttaaaaaaccctaatgctcctatgttaccgccacctaaaaacaaagaggattttgagaagactctgtcgcaagccatagtcaaagtggttatcccaacagaaaggaatttgctcgccctgatacatcgaatgatagagtttgttgtacgtgaagggccaatgtttgaagctatgattatgaacagagaaatcaacaatcctatgttcaggttcttatttgaaaaccagacaccagcccatgtttactataggtggaagctttattctattctgcagggagattctccaactaaatggcggacggaagattttcgtatgttcaaaaatggatctttttggaggccaccaccattaaatccgtacttgcatggaatgtcagaagagcaagaaacagaagcttttgtagaggaacctagtaaaaagggagcacttaaggaagaacagagggataaattggaagaaatcttgcggggattaactccaaggaaaaatgatattggagatgcaatggttttctgtcttaataatgctgaagctgctgaagaaatagtggattgcattactgagtcgttgtccatcttaaagacaccccttcctaaaaagattgccagattatatttggtttctgatgttttgtacaactcttcagccaaagttgctaatgcttcatattatagaaaattttttgaaacaaagttatgtcagatattttcagacctcaatgccacctatcgtacaattcaaggccatttacaatctgaaaactttaagcaacgggtaatgacttgcttcagagcatgggaagattgggcaatttatccagaaccatttttgatcaaactacaaaatattttcttaggacttgtaaatattattgaagaaaaggaaacagaggatgttccagatgaccttgatggtgcccccatcgaggaagagcttgatggtgcacctctggaagatgtagatggaattcctattgatgctactcccatcgatgatcttgatggagtccctataaaaagtcttgatgatgatcttgatggagtgcctttggatgcaactgaagactcaaaaaagaatgagcctatatttaaagttgccccatcaaaatgggaagctgtggatgaatctgaattggaagcacaggctgttacaacttctaaatgggaattatttgaccagcatgaagaatcagaagaagaagaaaatcaaaatcaagaagaagaaagtgaagatgaagaagatactcaaagttccaaatctgaagaacatcatttgtactctaatccaatcaaagaagaaatgactgagtctaagttctctaagtactctgaaatgagtgaggaaaaacgagccaaacttcgtgaaattgagctcaaagttatgaagtttcaggatgaattggaatctgggaaaagacctaaaaaaccaggccagagttttcaggagcaagtagaacactacagagataaacttcttcaacgagagaaagagaaagagttagaaagagaacgagaaagagacaagaaagataaagaaaaattggaatctcgctccaaagacaagaaggaaaaagatgagtgtactccgacaaggaaggaaaggaagaggcgacacagtacatcccccagcccatctcgcagtagcagtggtagacgagtgaaatccccatcaccaaaatcggagcgatcagagcgttcagaaagatctcataaagagagctcacggtccaggtcatctcacaaagattctcctagagatgttagcaaaaaagccaaaagatcaccatctggttcaaggacacctaaaaggtctaggcgatcacggtctagatctcctaaaaaatcaggaaagaagtccagatcccagtccagatctccacacaggtctcataaaaagtcaaagaaaaacaaacactgacgtaaatttttaagatgctgtcacttattggaaatgcgatttgttttgtgcctgaacggtctgttttttaaaaaaacaaaaaatcaaatgaaagagcattcctggggttttttgtttgtttgtgtatgcatgtgtaaactcatgagcaactgcatctgtagatctgtcattgttttatattgtgtaaattactttcattgtggctatttctcaagatgaaatttttattgttctaatggatttcatcagaaatgtgtataatggatctgctgacagtagtagtattttgttttaggatgttgtgacttagcaaaaataatacagatgtcttccccccttttgtagctttgacaatttgaattagatttcaaataaaatctgaacagaaaactataatgttgtttttttgccccaccggtgatattaagtcccttaaagtcctactgagtttcacactactgttgtgcttcttatacctgatgcactttataagccccagtgttcaagtagcttaagttttatatttactaagatgactatccaaattaagggacctgagactcctatttggtggtttgctaaccatttgcttttgataagtttctcttgggtaatactaatacccagatatcaaagactaggtagatatggcatggcgttttgttagtggaatgcctggctaaaacatttttttcacagaagcaatatgatttccatacatccaacccatgttctgagcaactacttacttttagggggaaattaaatatcttttcatttcctcttctattatgaaagaagtttatttgtaaaacaaattttctaacaaggtttggccatagaattctcttgtatgattgttgaccttttataatcttctgtaggctatctttcaaacactggcatcagaatattttttataagtttgtgtttaaacagcttagttggtccccccccccactcccaagagacttgggtttagttatagctttaagtaaaatttaaaaataaaatgtttttcaggaaacttcgtatctaatggtttgtaaattcaaggtgcaaaaagttgatttaaaccatttgcagagttgaactctattatgaaaataaatttgctacggtatgaggaagaaataaaacttgtgtaatgttggtcataatactgctataaatataataaagggttatgtagaattgaactgacactattatttgtgaatcttgatttcagttttttatgtaggcacttcatacactggtttgatgggttttttttttcctccctaaaagagaaagtagaaaactattctaacaatggattattttgatttagcttgctttttaaaaaaatcttttcaacttgttttacttaatcttgcctagtcacaaaataagatgtgcacccatggtttggagagttcctatattagctgagcagtgagatacactatttccaaacggtgcacacctacagtagctttggaaatgagccaatcactgttttacttaatggttcttatcagcatgcaaatattgcttgaaagttatttccttattcactgttttgttagtccattttgttaggaaacattaattcctaaaaatttgttcagaataattaaaagtgaacatttggtgctgatactcaaaaacctacaaatgtagccatttaaaaagtaacatgtttttctcccctgctcattgcctgggagaatggaattttatataactacctttctttgcaaaaataacggtcgtgtcgagttggtggtgattttggcattccatcttgcactggtttctagtataggcttagaaataattggtcaggtaataatctttccagtcaagttgcaagggatgcttatttctcttcaaaaaaagacatcctgcgggattgagtagaaaattttaggtcagttttgggtgcttatttgtaatatttttcctactacattggagtttagcagttctttttttctggatccagatacaagtgtcatggtttatcttacagtgggtgaaactgactttcttttggttgggtgggtgaggatttcttaggcctgatagaatatatattctgtgaagtttgttaatgtacatattagattgtattggatttttttttcttgaattgcaaatggtattattagataggttatttccagttttacttcatgacaaattacctagagtaaacctacttaatactccaatggattctatgaaagtttaatgggatcagaaattggtgacttataagggggaagatattctaccatatttttataatagcttattattcatgtttcttgtctgaaggacactcaagttacagagcaaaatttctataggttgactagaatgttcataagcatggtcttccagttgcaggaaagatcatgttctatctgtggacacttactgtcctctaccacagctacgtgccagagttgttttccacagttcttataaagggcatgacttaggctctttaccctccaacttaatgtttatacacagggattgtttactaggttaatgacatttaactcccctctcttctgtaggtgagagaaaataagtaagtcttgatctgtttcttaccaaagagagacagacctatgatggaaaatgatcacgtctctgaattttttctttaacgttatagttccttattacagatagtaagcatatgggaatttctgagctataacatgttgagaagttagaaattaaaactaacacaacaaaaggcgctgaatcaaaagatctttgcttttatttggctcagaatgtttttggcttttctgctaaagatggcagaaattactctacacagacctgatttttctttattgcagaccattcttgtgggcttaccctgagacttttatcccaattagtgaatcttggagggaatacttgcttatttatgacttaggtatttccccccaaactttaatattcttgagcacttgaaaatacttttgagaaattttaactgtgattaaatttaggtttattagaaatattctgtacacatttgcctccatggtggcgtaagttctgaaaaattatatgaccgtgacaatagtttatcatcatcattattgttattcaaaataagggtaaataaatctctgtattgccaaagtgacttaaactgttctgatgaccacacagtgtgatttctttagcagagaaagttggttttaaaaataaatagtaccacttttctaagactgtacagtttacaaataaggtttttttctttgttgttttcctcttctattaagttttagtgaaaagcctaattacagaaaattgtgcagatactagtgaagatactagtataagtttaaaggaacatgtgactgtaaaatctcacatttacaaagtgcttgatctcttcatatttcacacgcatgttttagaatagattttagggagtgtttaattcattatccttttgacttaaaatttttgttaccaacttcctaggacttagataatatataaataagtacaaatcccaggggaagtgttgtgatgctagactaaaaggtgggaatgtgctgctgttccgtgagccttgttccattgttgaaaatttgatgcctcagtgtttattcagtaccacctcatggagcttcaatgtaaatggattatatgtataattggtaatttgtatagttttgtagattgtagattaaatgcactcatcatgtcacatgt

SEQ ID NO: 302739 - DNA, 6800 bp, Homo sapiens
tacatatgaaattacacactattagtcacatattcttattcgtatgtgcaacatcagacttgtctagatccattctacaaggatgaatcaagtacacttgagtatcctggatctattctgacatcgagaaattctgaagggaaaggaaatacaacagtgtacacattaccacttgcatctatcatttaatgatgcttgagcttagaagcctattaaggtttatttttcaatttatgagataatgtgatagccggctatcacattatccaaaattgtgtttggagtctaataaaatatcacatgattttaggacccagcttcagataaagacttcctgtgagttcagtcaataaaatgactgtactaaaaaattactcacatatgtttatttttggtaaaatattggaaaataattgttacagaaaatgggaagggcatctcaccgtgtaccccattttgcaatattttggaaagagtagtactccattcacttaaggctttggcaacataatttcttcattgattgatagtgtacaggcatatcaatctcttgttttggagggaaaaaagatatataaaggcagaattatctatttcatgaattgtgaactagtttgaagtgtggtccaaagggatgttgcctcattaaaggtcagatttaataaaaaatgcatctggtgtgtgtaccagaaaaacacaggagttggatggattttttattaaatcaggccttaaacttgttaaatagttttgcatttttataaattatagtcatggttataacatttcagtagcaccataaaagtgcttggtttaggaattttttttttttaaactgagatagtgtgtaaatttctagatggctgtaataacatgcaggctctaagttactgattttatatatcaatatttgcagctttctaattagttgtgatttataatttaatgttttacttttggaaaataagtgacatttagaaaattaaatattactatgaggctgtattgtggtttcctaccctccctcacctttccatcccctcccacttccctactcccactgccccacaccctcttaatgcacaaggcattaacatatgctccaggttacttttttggtattaaattcggtgttagtcagcagaataatcattttctgcacaattatagtaacttaggtcaagtgtagttttatatagtggtaggtctgaatccattttctttaactgtgttgttgttgtaggaatttgctcgccctgatacatcgaatgatagagtttgttgtacgtgaagggccaatgtttgaagctatgattatgaacagagaaatcaacaatcctatgttcaggttcttatttgaaaaccagacaccagcccatgtttactataggtggaagctttattctattctgcagggagattctccaactaaatggcggacggaagattttcgtatgttcaaaaatggatctttttggaggccaccaccattaaatccgtacttgcatggaatgtcagaagagcaagaaacagaagcttttgtagaggaacctagtaaaaagggagcacttaaggaagaacagagggataaattggaagaaatcttgcggggattaactccaaggaaaaatgatattggagatgcaatggttttctgtcttaataatgctgaagctgctgaagaaatagtggattgcattactgagtcgttgtccatcttaaagacaccccttcctaaaaagattgccagattatatttggtttctgatgttttgtacaactcttcagccaaagttgctaatgcttcatattatagaaaattttttgaaacaaagttatgtcagatattttcagacctcaatgccacctatcgtacaattcaaggccatttacaatctgaaaactttaagcaacgggtaatgacttgcttcagagcatgggaagattgggcaatttatccagaaccatttttgatcaaactacaaaatattttcttaggacttgtaaatattattgaagaaaaggaaacagaggatgttccagatgaccttgatggtgcccccatcgaggaagagcttgatggtgcacctctggaagatgtagatggaattcctattgatgctactcccatcgatgatcttgatggagtccctataaaaagtcttgatgatgatcttgatggagtgcctttggatgcaactgaagactcaaaaaagaatgagcctatatttaaagttgccccatcaaaatgggaagctgtggatgaatctgaattggaagcacaggctgttacaacttctaaatgggaattatttgaccagcatgaagaatcagaagaagaagaaaatcaaaatcaagaagaagaaagtgaagatgaagaagatactcaaagttccaaatctgaagaacatcatttgtactctaatccaatcaaagaagaaatgactgagtctaagttctctaagtactctgaaatgagtgaggaaaaacgagccaaacttcgtgaaattgagctcaaagttatgaagtttcaggatgaattggaatctgggaaaagacctaaaaaaccaggccagagttttcaggagcaagtagaacactacagagataaacttcttcaacgagagaaagagaaagagttagaaagagaacgagaaagagacaagaaagataaagaaaaattggaatctcgctccaaagacaagaaggaaaaagatgagtgtactccgacaaggaaggaaaggaagaggcgacacagtacatcccccagcccatctcgcagtagcagtggtagacgagtgaaatccccatcaccaaaatcggagcgatcagagcgttcagaaagatctcataaagagagctcacggtccaggtcatctcacaaagattctcctagagatgttagcaaaaaagccaaaagatcaccatctggttcaaggacacctaaaaggtctaggcgatcacggtctagatctcctaaaaaatcaggaaagaagtccagatcccagtccagatctccacacaggtctcataaaaagtcaaagaaaaacaaacactgacgtaaatttttaagatgctgtcacttattggaaatgcgatttgttttgtgcctgaacggtctgttttttaaaaaaacaaaaaatcaaatgaaagagcattcctggggttttttgtttgtttgtgtatgcatgtgtaaactcatgagcaactgcatctgtagatctgtcattgttttatattgtgtaaattactttcattgtggctatttctcaagatgaaatttttattgttctaatggatttcatcagaaatgtgtataatggatctgctgacagtagtagtattttgttttaggatgttgtgacttagcaaaaataatacagatgtcttccccccttttgtagctttgacaatttgaattagatttcaaataaaatctgaacagaaaactataatgttgtttttttgccccaccggtgatattaagtcccttaaagtcctactgagtttcacactactgttgtgcttcttatacctgatgcactttataagccccagtgttcaagtagcttaagttttatatttactaagatgactatccaaattaagggacctgagactcctatttggtggtttgctaaccatttgcttttgataagtttctcttgggtaatactaatacccagatatcaaagactaggtagatatggcatggcgttttgttagtggaatgcctggctaaaacatttttttcacagaagcaatatgatttccatacatccaacccatgttctgagcaactacttacttttagggggaaattaaatatcttttcatttcctcttctattatgaaagaagtttatttgtaaaacaaattttctaacaaggtttggccatagaattctcttgtatgattgttgaccttttataatcttctgtaggctatctttcaaacactggcatcagaatattttttataagtttgtgtttaaacagcttagttggtccccccccccactcccaagagacttgggtttagttatagctttaagtaaaatttaaaaataaaatgtttttcaggaaacttcgtatctaatggtttgtaaattcaaggtgcaaaaagttgatttaaaccatttgcagagttgaactctattatgaaaataaatttgctacggtatgaggaagaaataaaacttgtgtaatgttggtcataatactgctataaatataataaagggttatgtagaattgaactgacactattatttgtgaatcttgatttcagttttttatgtaggcacttcatacactggtttgatgggttttttttttcctccctaaaagagaaagtagaaaactattctaacaatggattattttgatttagcttgctttttaaaaaaatcttttcaacttgttttacttaatcttgcctagtcacaaaataagatgtgcacccatggtttggagagttcctatattagctgagcagtgagatacactatttccaaacggtgcacacctacagtagctttggaaatgagccaatcactgttttacttaatggttcttatcagcatgcaaatattgcttgaaagttatttccttattcactgttttgttagtccattttgttaggaaacattaattcctaaaaatttgttcagaataattaaaagtgaacatttggtgctgatactcaaaaacctacaaatgtagccatttaaaaagtaacatgtttttctcccctgctcattgcctgggagaatggaattttatataactacctttctttgcaaaaataacggtcgtgtcgagttggtggtgattttggcattccatcttgcactggtttctagtataggcttagaaataattggtcaggtaataatctttccagtcaagttgcaagggatgcttatttctcttcaaaaaaagacatcctgcgggattgagtagaaaattttaggtcagttttgggtgcttatttgtaatatttttcctactacattggagtttagcagttctttttttctggatccagatacaagtgtcatggtttatcttacagtgggtgaaactgactttcttttggttgggtgggtgaggatttcttaggcctgatagaatatatattctgtgaagtttgttaatgtacatattagattgtattggatttttttttcttgaattgcaaatggtattattagataggttatttccagttttacttcatgacaaattacctagagtaaacctacttaatactccaatggattctatgaaagtttaatgggatcagaaattggtgacttataagggggaagatattctaccatatttttataatagcttattattcatgtttcttgtctgaaggacactcaagttacagagcaaaatttctataggttgactagaatgttcataagcatggtcttccagttgcaggaaagatcatgttctatctgtggacacttactgtcctctaccacagctacgtgccagagttgttttccacagttcttataaagggcatgacttaggctctttaccctccaacttaatgtttatacacagggattgtttactaggttaatgacatttaactcccctctcttctgtaggtgagagaaaataagtaagtcttgatctgtttcttaccaaagagagacagacctatgatggaaaatgatcacgtctctgaattttttctttaacgttatagttccttattacagatagtaagcatatgggaatttctgagctataacatgttgagaagttagaaattaaaactaacacaacaaaaggcgctgaatcaaaagatctttgcttttatttggctcagaatgtttttggcttttctgctaaagatggcagaaattactctacacagacctgatttttctttattgcagaccattcttgtgggcttaccctgagacttttatcccaattagtgaatcttggagggaatacttgcttatttatgacttaggtatttccccccaaactttaatattcttgagcacttgaaaatacttttgagaaattttaactgtgattaaatttaggtttattagaaatattctgtacacatttgcctccatggtggcgtaagttctgaaaaattatatgaccgtgacaatagtttatcatcatcattattgttattcaaaataagggtaaataaatctctgtattgccaaagtgacttaaactgttctgatgaccacacagtgtgatttctttagcagagaaagttggttttaaaaataaatagtaccacttttctaagactgtacagtttacaaataaggtttttttctttgttgttttcctcttctattaagttttagtgaaaagcctaattacagaaaattgtgcagatactagtgaagatactagtataagtttaaaggaacatgtgactgtaaaatctcacatttacaaagtgcttgatctcttcatatttcacacgcatgttttagaatagattttagggagtgtttaattcattatccttttgacttaaaatttttgttaccaacttcctaggacttagataatatataaataagtacaaatcccaggggaagtgttgtgatgctagactaaaaggtgggaatgtgctgctgttccgtgagccttgttccattgttgaaaatttgatgcctcagtgtttattcagtaccacctcatggagcttcaatgtaaatggattatatgtataattggtaatttgtatagttttgtagattgtagattaaatgcactcatcatgtcacatgt

SEQ ID NO: 302740 - DNA, 6039 bp, Homo sapiens
ataaaaccaacttaatttcaagttataagaattcgttggttctattatgaattaattacacttaaaatgacagggctggttttaaaggcttgggaacaaagtagcgaactgtatggtcagaggcaaacagttaattatttcacaaattaaaatctttatctgataattctcagtgtagtacctatttcagtgcattgatgtgcattctggcaggaatgttctgattctttgcatttggtgaacgtttattgttcactgaacacatccatttgcatttatgtaattgcttagtgtataatgacttcaaatgcagtgattgcctgcaaaacttgtgattagatatgtagtattttcaatgcatatgtatatttttgcttgttacttgttaacaatactcacatattctatgtttattatctgatgtgacttcatatacagactctgtcgcaagccatagtcaaagtggttatcccaacagaaaggaatttgctcgccctgatacatcgaatgatagagtttgttgtacgtgaagggccaatgtttgaagctatgattatgaacagagaaatcaacaatcctatgttcaggttcttatttgaaaaccagacaccagcccatgtttactataggtggaagctttattctattctgcagggagattctccaactaaatggcggacggaagattttcgtatgttcaaaaatggatctttttggaggccaccaccattaaatccgtacttgcatggaatgtcagaagagcaagaaacagaagcttttgtagaggaacctagtaaaaagggagcacttaaggaagaacagagggataaattggaagaaatcttgcggggattaactccaaggaaaaatgatattggagatgcaatggttttctgtcttaataatgctgaagctgctgaagaaatagtggattgcattactgagtcgttgtccatcttaaagacaccccttcctaaaaagattgccagattatatttggtttctgatgttttgtacaactcttcagccaaagttgctaatgcttcatattatagaaaattttttgaaacaaagttatgtcagatattttcagacctcaatgccacctatcgtacaattcaaggccatttacaatctgaaaactttaagcaacgggtaatgacttgcttcagagcatgggaagattgggcaatttatccagaaccatttttgatcaaactacaaaatattttcttaggacttgtaaatattattgaagaaaaggaaacagaggatgttccagatgaccttgatggtgcccccatcgaggaagagcttgatggtgcacctctggaagatgtagatggaattcctattgatgctactcccatcgatgatcttgatggagtccctataaaaagtcttgatgatgatcttgatggagtgcctttggatgcaactgaagactcaaaaaagaatgagcctatatttaaagttgccccatcaaaatgggaagctgtggatgaatctgaattggaagcacaggctgttacaacttctaaatgggaattatttgaccagcatgaagaatcagaagaagaagaaaatcaaaatcaagaagaagaaagtgaagatgaagaagatactcaaagttccaaatctgaagaacatcatttgtactctaatccaatcaaagaagaaatgactgagtctaagttctctaagtactctgaaatgagtgaggaaaaacgagccaaacttcgtgaaattgagctcaaagttatgaagtttcaggatgaattggaatctgggaaaagacctaaaaaaccaggccagagttttcaggagcaagtagaacactacagagataaacttcttcaacgagagaaagagaaagagttagaaagagaacgagaaagagacaagaaagataaagaaaaattggaatctcgctccaaagacaagaaggaaaaagatgagtgtactccgacaaggaaggaaaggaagaggcgacacagtacatcccccagcccatctcgcagtagcagtggtagacgagtgaaatccccatcaccaaaatcggagcgatcagagcgttcagaaagatctcataaagagagctcacggtccaggtcatctcacaaagattctcctagagatgttagcaaaaaagccaaaagatcaccatctggttcaaggacacctaaaaggtctaggcgatcacggtctagatctcctaaaaaatcaggaaagaagtccagatcccagtccagatctccacacaggtctcataaaaagtcaaagaaaaacaaacactgacgtaaatttttaagatgctgtcacttattggaaatgcgatttgttttgtgcctgaacggtctgttttttaaaaaaacaaaaaatcaaatgaaagagcattcctggggttttttgtttgtttgtgtatgcatgtgtaaactcatgagcaactgcatctgtagatctgtcattgttttatattgtgtaaattactttcattgtggctatttctcaagatgaaatttttattgttctaatggatttcatcagaaatgtgtataatggatctgctgacagtagtagtattttgttttaggatgttgtgacttagcaaaaataatacagatgtcttccccccttttgtagctttgacaatttgaattagatttcaaataaaatctgaacagaaaactataatgttgtttttttgccccaccggtgatattaagtcccttaaagtcctactgagtttcacactactgttgtgcttcttatacctgatgcactttataagccccagtgttcaagtagcttaagttttatatttactaagatgactatccaaattaagggacctgagactcctatttggtggtttgctaaccatttgcttttgataagtttctcttgggtaatactaatacccagatatcaaagactaggtagatatggcatggcgttttgttagtggaatgcctggctaaaacatttttttcacagaagcaatatgatttccatacatccaacccatgttctgagcaactacttacttttagggggaaattaaatatcttttcatttcctcttctattatgaaagaagtttatttgtaaaacaaattttctaacaaggtttggccatagaattctcttgtatgattgttgaccttttataatcttctgtaggctatctttcaaacactggcatcagaatattttttataagtttgtgtttaaacagcttagttggtccccccccccactcccaagagacttgggtttagttatagctttaagtaaaatttaaaaataaaatgtttttcaggaaacttcgtatctaatggtttgtaaattcaaggtgcaaaaagttgatttaaaccatttgcagagttgaactctattatgaaaataaatttgctacggtatgaggaagaaataaaacttgtgtaatgttggtcataatactgctataaatataataaagggttatgtagaattgaactgacactattatttgtgaatcttgatttcagttttttatgtaggcacttcatacactggtttgatgggttttttttttcctccctaaaagagaaagtagaaaactattctaacaatggattattttgatttagcttgctttttaaaaaaatcttttcaacttgttttacttaatcttgcctagtcacaaaataagatgtgcacccatggtttggagagttcctatattagctgagcagtgagatacactatttccaaacggtgcacacctacagtagctttggaaatgagccaatcactgttttacttaatggttcttatcagcatgcaaatattgcttgaaagttatttccttattcactgttttgttagtccattttgttaggaaacattaattcctaaaaatttgttcagaataattaaaagtgaacatttggtgctgatactcaaaaacctacaaatgtagccatttaaaaagtaacatgtttttctcccctgctcattgcctgggagaatggaattttatataactacctttctttgcaaaaataacggtcgtgtcgagttggtggtgattttggcattccatcttgcactggtttctagtataggcttagaaataattggtcaggtaataatctttccagtcaagttgcaagggatgcttatttctcttcaaaaaaagacatcctgcgggattgagtagaaaattttaggtcagttttgggtgcttatttgtaatatttttcctactacattggagtttagcagttctttttttctggatccagatacaagtgtcatggtttatcttacagtgggtgaaactgactttcttttggttgggtgggtgaggatttcttaggcctgatagaatatatattctgtgaagtttgttaatgtacatattagattgtattggatttttttttcttgaattgcaaatggtattattagataggttatttccagttttacttcatgacaaattacctagagtaaacctacttaatactccaatggattctatgaaagtttaatgggatcagaaattggtgacttataagggggaagatattctaccatatttttataatagcttattattcatgtttcttgtctgaaggacactcaagttacagagcaaaatttctataggttgactagaatgttcataagcatggtcttccagttgcaggaaagatcatgttctatctgtggacacttactgtcctctaccacagctacgtgccagagttgttttccacagttcttataaagggcatgacttaggctctttaccctccaacttaatgtttatacacagggattgtttactaggttaatgacatttaactcccctctcttctgtaggtgagagaaaataagtaagtcttgatctgtttcttaccaaagagagacagacctatgatggaaaatgatcacgtctctgaattttttctttaacgttatagttccttattacagatagtaagcatatgggaatttctgagctataacatgttgagaagttagaaattaaaactaacacaacaaaaggcgctgaatcaaaagatctttgcttttatttggctcagaatgtttttggcttttctgctaaagatggcagaaattactctacacagacctgatttttctttattgcagaccattcttgtgggcttaccctgagacttttatcccaattagtgaatcttggagggaatacttgcttatttatgacttaggtatttccccccaaactttaatattcttgagcacttgaaaatacttttgagaaattttaactgtgattaaatttaggtttattagaaatattctgtacacatttgcctccatggtggcgtaagttctgaaaaattatatgaccgtgacaatagtttatcatcatcattattgttattcaaaataagggtaaataaatctctgtattgccaaagtgacttaaactgttctgatgaccacacagtgtgatttctttagcagagaaagttggttttaaaaataaatagtaccacttttctaagactgtacagtttacaaataaggtttttttctttgttgttttcctcttctattaagttttagtgaaaagcctaattacagaaaattgtgcagatactagtgaagatactagtataagtttaaaggaacatgtgactgtaaaatctcacatttacaaagtgcttgatctcttcatatttcacacgcatgttttagaatagattttagggagtgtttaattcattatccttttgacttaaaatttttgttaccaacttcctaggacttagataatatataaataagtacaaatcccaggggaagtgttgtgatgctagactaaaaggtgggaatgtgctgctgttccgtgagccttgttccattgttgaaaatttgatgcctcagtgtttattcagtaccacctcatggagcttcaatgtaaatggattatatgtataattggtaatttgtatagttttgtagattgtagattaaatgcactcatcatgtcacatgt

SEQ ID NO: 302741 - DNA, 6702 bp, Homo sapiens
cgactcgcccgtgctgctgccgccgccgaaggaggggcaaagctcaagatggcggacaaaacgccaggcggatctcagaaggccagttcaaagacgagatcatcagatgttcattcatctggatcttcagatgcacatatggatgcatctggaccctcagatagtgatatgccaagtcggacacgacctaagagcccaagaaaacataattataggaatgaaagtgcccgtgaaagcctttgtgattctcctcatcagaatctctcaagacctcttctggaaaacaaacttaaagcattcagtattggaaaaatgagtacagctaagcgaactttaagtaaaaaggaacaggaagaattaaagaaaaaggaggatgaaaaggcagctgctgagatttatgaggagtttcttgctgcttttgaaggaagtgatggtaataaagtgaaaacatttgtgcgagggggtgttgttaatgcagctaaagaagaacatgaaacagatgaaaaaagaggtaaaatctataagccatcttcaagatttgcagatcaaaaaaatcctccaaatcagtcttccaatgaaagaccaccatctcttcttgtgatagaaaccaaaaaacctccacttaaaaaaggagagaaagaaaagaaaaaaagcaatttggaactcttcaaagaagaattaaagcaaattcaagaggaacgtgatgagagacataaaacaaaaggcagattaagtcgatttgaacctcctcagtcagattctgatggtcagcgtcgttctatggacgcgccttcaagaagaaatagatcatctggtgttcttgatgattacgcacctggctcacatgatgtaggagatccaagcactactaatttataccttggaaacattaatccacagatgaatgaagaaatgctgtgccaagaatttggaagatttggaccgttagccagtgtgaaaatcatgtggcctagaactgatgaagaaagagccagagagagaaattgcggctttgtggcctttatgaatagaagagatgctgaaagagctttaaaaaatttgaatggaaaaatgattatgtcttttgaaatgaagttaggttggggtaaagctgtacctattcctccacatccaatatacattccgccttctatgatggaacatacgcttcccccacctccatccggactgccttttaatgcgcagcctagagagcggttaaaaaaccctaatgctcctatgttaccgccacctaaaaacaaagaggattttgagaagactctgtcgcaagccatagtcaaagtggttatcccaacagaaaggaatttgctcgccctgatacatcgaatgatagagtttgttgtacgtgaagggccaatgtttgaagctatgattatgaacagagaaatcaacaatcctatgttcaggttcttatttgaaaaccagacaccagcccatgtttactataggtggaagctttattctattctgcagggagattctccaactaaatggcggacggaagattttcgtatgttcaaaaatggatctttttggaggccaccaccattaaatccgtacttgcatggaatgtcagaagagcaagaaacagaagcttttgtagaggaacctagtaaaaagggagcacttaaggaagaacagagggataaattggaagaaatcttgcggggattaactccaaggaaaaatgatattggagatgcaatggttttctgtcttaataatgctgaagctgctgaagaaatagtggattgcattactgagtcgttgtccatcttaaagacaccccttcctaaaaagattgccagattatatttggtttctgatgttttgtacaactcttcagccaaagttgctaatgcttcatattatagaaaattttttgaaacaaagttatgtcagatattttcagacctcaatgccacctatcgtacaattcaaggccatttacaatctgaaaactttaagcaacgggtaatgacttgcttcagagcatgggaagattgggcaatttatccagaaccatttttgatcaaactacaaaatattttcttaggacttgtaaatattattgaagaaaaggaaacagaggatgttccagatgaccttgatggtgcccccatcgaggaagagcttgatggtgcacctctggaagatgtagatggaattcctattgatgctactcccatcgatgatcttgatggagtccctataaaaagtcttgatgatgatcttgatggagtgcctttggatgcaactgaagactcaaaaaagaatgagcctatatttaaagttgccccatcaaaatgggaagctgtggatgaatctgaattggaagcacaggctgttacaacttctaaatgggaattatttgaccagcatgaagaatcagaagaagaagaaaatcaaaatcaagaagaagaaagtgaagatgaagaagatactcaaagttccaaatctgaagaacatcatttgtactctaatccaatcaaagaagaaatgactgagtctaagttctctaagtactctgaaatgagtgaggaaaaacgagccaaacttcgtgaaattgagctcaaagttatgaagtttcaggatgaattggaatctgggaaaagacctaaaaaaccaggccagagttttcaggagcaagtagaacactacagagataaacttcttcaacgagagaaagagaaagagttagaaagagaacgagaaagagacaagaaagataaagaaaaattggaatctcgctccaaagacaagaaggaaaaagatgagtgtactccgacaaggaaggaaagatcaccatctggttcaaggacacctaaaaggtctaggcgatcacggtctagatctcctaaaaaatcaggaaagaagtccagatcccagtccagatctccacacaggtctcataaaaagtcaaagaaaaacaaacactgacgtaaatttttaagatgctgtcacttattggaaatgcgatttgttttgtgcctgaacggtctgttttttaaaaaaacaaaaaatcaaatgaaagagcattcctggggttttttgtttgtttgtgtatgcatgtgtaaactcatgagcaactgcatctgtagatctgtcattgttttatattgtgtaaattactttcattgtggctatttctcaagatgaaatttttattgttctaatggatttcatcagaaatgtgtataatggatctgctgacagtagtagtattttgttttaggatgttgtgacttagcaaaaataatacagatgtcttccccccttttgtagctttgacaatttgaattagatttcaaataaaatctgaacagaaaactataatgttgtttttttgccccaccggtgatattaagtcccttaaagtcctactgagtttcacactactgttgtgcttcttatacctgatgcactttataagccccagtgttcaagtagcttaagttttatatttactaagatgactatccaaattaagggacctgagactcctatttggtggtttgctaaccatttgcttttgataagtttctcttgggtaatactaatacccagatatcaaagactaggtagatatggcatggcgttttgttagtggaatgcctggctaaaacatttttttcacagaagcaatatgatttccatacatccaacccatgttctgagcaactacttacttttagggggaaattaaatatcttttcatttcctcttctattatgaaagaagtttatttgtaaaacaaattttctaacaaggtttggccatagaattctcttgtatgattgttgaccttttataatcttctgtaggctatctttcaaacactggcatcagaatattttttataagtttgtgtttaaacagcttagttggtccccccccccactcccaagagacttgggtttagttatagctttaagtaaaatttaaaaataaaatgtttttcaggaaacttcgtatctaatggtttgtaaattcaaggtgcaaaaagttgatttaaaccatttgcagagttgaactctattatgaaaataaatttgctacggtatgaggaagaaataaaacttgtgtaatgttggtcataatactgctataaatataataaagggttatgtagaattgaactgacactattatttgtgaatcttgatttcagttttttatgtaggcacttcatacactggtttgatgggttttttttttcctccctaaaagagaaagtagaaaactattctaacaatggattattttgatttagcttgctttttaaaaaaatcttttcaacttgttttacttaatcttgcctagtcacaaaataagatgtgcacccatggtttggagagttcctatattagctgagcagtgagatacactatttccaaacggtgcacacctacagtagctttggaaatgagccaatcactgttttacttaatggttcttatcagcatgcaaatattgcttgaaagttatttccttattcactgttttgttagtccattttgttaggaaacattaattcctaaaaatttgttcagaataattaaaagtgaacatttggtgctgatactcaaaaacctacaaatgtagccatttaaaaagtaacatgtttttctcccctgctcattgcctgggagaatggaattttatataactacctttctttgcaaaaataacggtcgtgtcgagttggtggtgattttggcattccatcttgcactggtttctagtataggcttagaaataattggtcaggtaataatctttccagtcaagttgcaagggatgcttatttctcttcaaaaaaagacatcctgcgggattgagtagaaaattttaggtcagttttgggtgcttatttgtaatatttttcctactacattggagtttagcagttctttttttctggatccagatacaagtgtcatggtttatcttacagtgggtgaaactgactttcttttggttgggtgggtgaggatttcttaggcctgatagaatatatattctgtgaagtttgttaatgtacatattagattgtattggatttttttttcttgaattgcaaatggtattattagataggttatttccagttttacttcatgacaaattacctagagtaaacctacttaatactccaatggattctatgaaagtttaatgggatcagaaattggtgacttataagggggaagatattctaccatatttttataatagcttattattcatgtttcttgtctgaaggacactcaagttacagagcaaaatttctataggttgactagaatgttcataagcatggtcttccagttgcaggaaagatcatgttctatctgtggacacttactgtcctctaccacagctacgtgccagagttgttttccacagttcttataaagggcatgacttaggctctttaccctccaacttaatgtttatacacagggattgtttactaggttaatgacatttaactcccctctcttctgtaggtgagagaaaataagtaagtcttgatctgtttcttaccaaagagagacagacctatgatggaaaatgatcacgtctctgaattttttctttaacgttatagttccttattacagatagtaagcatatgggaatttctgagctataacatgttgagaagttagaaattaaaactaacacaacaaaaggcgctgaatcaaaagatctttgcttttatttggctcagaatgtttttggcttttctgctaaagatggcagaaattactctacacagacctgatttttctttattgcagaccattcttgtgggcttaccctgagacttttatcccaattagtgaatcttggagggaatacttgcttatttatgacttaggtatttccccccaaactttaatattcttgagcacttgaaaatacttttgagaaattttaactgtgattaaatttaggtttattagaaatattctgtacacatttgcctccatggtggcgtaagttctgaaaaattatatgaccgtgacaatagtttatcatcatcattattgttattcaaaataagggtaaataaatctctgtattgccaaagtgacttaaactgttctgatgaccacacagtgtgatttctttagcagagaaagttggttttaaaaataaatagtaccacttttctaagactgtacagtttacaaataaggtttttttctttgttgttttcctcttctattaagttttagtgaaaagcctaattacagaaaattgtgcagatactagtgaagatactagtataagtttaaaggaacatgtgactgtaaaatctcacatttacaaagtgcttgatctcttcatatttcacacgcatgttttagaatagattttagggagtgtttaattcattatccttttgacttaaaatttttgttaccaacttcctaggacttagataatatataaataagtacaaatcccaggggaagtgttgtgatgctagactaaaaggtgggaatgtgctgctgttccgtgagccttgttccattgttgaaaatttgatgcctcagtgtttattcagtaccacctcatggagcttcaatgtaaatggattatatgtataattggtaatttgtatagttttgtagattgtagattaaatgcactcatcatgtcacatgt

SEQ ID NO: 302742 - DNA, 5067 bp, Homo sapiens
cccacccctgcaaaacaacagcaaaaacctttaccaggctctataacagggggaccaaacttgtttttgctcatcattgcctcacaaggtacctggcaccagtgagcacttggtaaatattagataaatgcacaactgactgcttctttagcaaactggatgatagaatatgttcttacattgtacctcagattgtgggtatccagttatgttggcttgtactggattacaaattaatcttacaagcaatgtgacttcagcaagcaaaggaaaatgttataatagtacacatttccataggatgttccagatgaccttgatggtgcccccatcgaggaagagcttgatggtgcacctctggaagatgtagatggaattcctattgatgctactcccatcgatgatcttgatggagtccctataaaaagtcttgatgatgatcttgatggagtgcctttggatgcaactgaagactcaaaaaagaatgagcctatatttaaagttgccccatcaaaatgggaagctgtggatgaatctgaattggaagcacaggctgttacaacttctaaatgggaattatttgaccagcatgaagaatcagaagaagaagaaaatcaaaatcaagaagaagaaagtgaagatgaagaagatactcaaagttccaaatctgaagaacatcatttgtactctaatccaatcaaagaagaaatgactgagtctaagttctctaagtactctgaaatgagtgaggaaaaacgagccaaacttcgtgaaattgagctcaaagttatgaagtttcaggatgaattggaatctgggaaaagacctaaaaaaccaggccagagttttcaggagcaagtagaacactacagagataaacttcttcaacgagagaaagagaaagagttagaaagagaacgagaaagagacaagaaagataaagaaaaattggaatctcgctccaaagacaagaaggaaaaagatgagtgtactccgacaaggaaggaaaggaagaggcgacacagtacatcccccagcccatctcgcagtagcagtggtagacgagtgaaatccccatcaccaaaatcggagcgatcagagcgttcagaaagatctcataaagagagctcacggtccaggtcatctcacaaagattctcctagagatgttagcaaaaaagccaaaagatcaccatctggttcaaggacacctaaaaggtctaggcgatcacggtctagatctcctaaaaaatcaggaaagaagtccagatcccagtccagatctccacacaggtctcataaaaagtcaaagaaaaacaaacactgacgtaaatttttaagatgctgtcacttattggaaatgcgatttgttttgtgcctgaacggtctgttttttaaaaaaacaaaaaatcaaatgaaagagcattcctggggttttttgtttgtttgtgtatgcatgtgtaaactcatgagcaactgcatctgtagatctgtcattgttttatattgtgtaaattactttcattgtggctatttctcaagatgaaatttttattgttctaatggatttcatcagaaatgtgtataatggatctgctgacagtagtagtattttgttttaggatgttgtgacttagcaaaaataatacagatgtcttccccccttttgtagctttgacaatttgaattagatttcaaataaaatctgaacagaaaactataatgttgtttttttgccccaccggtgatattaagtcccttaaagtcctactgagtttcacactactgttgtgcttcttatacctgatgcactttataagccccagtgttcaagtagcttaagttttatatttactaagatgactatccaaattaagggacctgagactcctatttggtggtttgctaaccatttgcttttgataagtttctcttgggtaatactaatacccagatatcaaagactaggtagatatggcatggcgttttgttagtggaatgcctggctaaaacatttttttcacagaagcaatatgatttccatacatccaacccatgttctgagcaactacttacttttagggggaaattaaatatcttttcatttcctcttctattatgaaagaagtttatttgtaaaacaaattttctaacaaggtttggccatagaattctcttgtatgattgttgaccttttataatcttctgtaggctatctttcaaacactggcatcagaatattttttataagtttgtgtttaaacagcttagttggtccccccccccactcccaagagacttgggtttagttatagctttaagtaaaatttaaaaataaaatgtttttcaggaaacttcgtatctaatggtttgtaaattcaaggtgcaaaaagttgatttaaaccatttgcagagttgaactctattatgaaaataaatttgctacggtatgaggaagaaataaaacttgtgtaatgttggtcataatactgctataaatataataaagggttatgtagaattgaactgacactattatttgtgaatcttgatttcagttttttatgtaggcacttcatacactggtttgatgggttttttttttcctccctaaaagagaaagtagaaaactattctaacaatggattattttgatttagcttgctttttaaaaaaatcttttcaacttgttttacttaatcttgcctagtcacaaaataagatgtgcacccatggtttggagagttcctatattagctgagcagtgagatacactatttccaaacggtgcacacctacagtagctttggaaatgagccaatcactgttttacttaatggttcttatcagcatgcaaatattgcttgaaagttatttccttattcactgttttgttagtccattttgttaggaaacattaattcctaaaaatttgttcagaataattaaaagtgaacatttggtgctgatactcaaaaacctacaaatgtagccatttaaaaagtaacatgtttttctcccctgctcattgcctgggagaatggaattttatataactacctttctttgcaaaaataacggtcgtgtcgagttggtggtgattttggcattccatcttgcactggtttctagtataggcttagaaataattggtcaggtaataatctttccagtcaagttgcaagggatgcttatttctcttcaaaaaaagacatcctgcgggattgagtagaaaattttaggtcagttttgggtgcttatttgtaatatttttcctactacattggagtttagcagttctttttttctggatccagatacaagtgtcatggtttatcttacagtgggtgaaactgactttcttttggttgggtgggtgaggatttcttaggcctgatagaatatatattctgtgaagtttgttaatgtacatattagattgtattggatttttttttcttgaattgcaaatggtattattagataggttatttccagttttacttcatgacaaattacctagagtaaacctacttaatactccaatggattctatgaaagtttaatgggatcagaaattggtgacttataagggggaagatattctaccatatttttataatagcttattattcatgtttcttgtctgaaggacactcaagttacagagcaaaatttctataggttgactagaatgttcataagcatggtcttccagttgcaggaaagatcatgttctatctgtggacacttactgtcctctaccacagctacgtgccagagttgttttccacagttcttataaagggcatgacttaggctctttaccctccaacttaatgtttatacacagggattgtttactaggttaatgacatttaactcccctctcttctgtaggtgagagaaaataagtaagtcttgatctgtttcttaccaaagagagacagacctatgatggaaaatgatcacgtctctgaattttttctttaacgttatagttccttattacagatagtaagcatatgggaatttctgagctataacatgttgagaagttagaaattaaaactaacacaacaaaaggcgctgaatcaaaagatctttgcttttatttggctcagaatgtttttggcttttctgctaaagatggcagaaattactctacacagacctgatttttctttattgcagaccattcttgtgggcttaccctgagacttttatcccaattagtgaatcttggagggaatacttgcttatttatgacttaggtatttccccccaaactttaatattcttgagcacttgaaaatacttttgagaaattttaactgtgattaaatttaggtttattagaaatattctgtacacatttgcctccatggtggcgtaagttctgaaaaattatatgaccgtgacaatagtttatcatcatcattattgttattcaaaataagggtaaataaatctctgtattgccaaagtgacttaaactgttctgatgaccacacagtgtgatttctttagcagagaaagttggttttaaaaataaatagtaccacttttctaagactgtacagtttacaaataaggtttttttctttgttgttttcctcttctattaagttttagtgaaaagcctaattacagaaaattgtgcagatactagtgaagatactagtataagtttaaaggaacatgtgactgtaaaatctcacatttacaaagtgcttgatctcttcatatttcacacgcatgttttagaatagattttagggagtgtttaattcattatccttttgacttaaaatttttgttaccaacttcctaggacttagataatatataaataagtacaaatcccaggggaagtgttgtgatgctagactaaaaggtgggaatgtgctgctgttccgtgagccttgttccattgttgaaaatttgatgcctcagtgtttattcagtaccacctcatggagcttcaatgtaaatggattatatgtataattggtaatttgtatagttttgtagattgtagattaaatgcactcatcatgtcacatgt

SEQ ID NO: 302743 - DNA, 1622 bp, Homo sapiens
gcaccggacaaacgtctctggagtctctccaatgagcaagaaagcaagtcgggggtaggggaggggcctcacaccagggggtgggcgcagtccctcctccagctccttcaccctccagtagtctcgtgggtccccgagcgccagcgcgggaaccgggaaaaggaaaccgtgttgtgtacgtaagattcaggaaacgaaaccaggagccgcgggtgttggcgcaaaggttactcccagacccttttccggctgacttctgagaaggttgcgcagcagctgtgcccggcagtctagaggcgcagaagaggaagccatcgcctggccccggctctctggaccttgtctcgctcgggagcggaaacagcggcagccagagaactgttttaatcatggacaaacaaaactcacagatgaatgcttctcacccggaaacaaacttgccagttgggtatcctcctcagtatccaccgacagcattccaaggacctccaggatatagtggctaccctgggccccaggtcagctacccacccccaccagccggccattcaggtcctggcccagctggctttcctgtcccaaatcagccagtgtataatcagccagtatataatcagccagttggagctgcaggggtaccatggatgccagcgccacagcctccattaaactgtccacctggattagaatatttaagtcagatagatcagatactgattcatcagcaaattgaacttctggaagttttaacaggttttgaaactaataacaaatatgaaattaagaacagctttggacagagggtttactttgcagcggaagatactgattgctgtacccgaaattgctgtgggccatctagaccttttaccttgaggattattgataatatgggtcaagaagtcataactctggagagaccactaagatgtagcagctgttgttgtccctgctgccttcaggagatagaaatccaagctcctcctggtgtaccaataggttatgttattcagacttggcacccatgtctaccaaagtttacaattcaaaatgagaaaagagaggatgtactaaaaataagtggtccatgtgttgtgtgcagctgttgtggagatgttgattttgagattaaatctcttgatgaacagtgtgtggttggcaaaatttccaagcactggactggaattttgagagaggcatttacagacgctgataactttggaatccagttccctttagaccttgatgttaaaatgaaagctgtaatgattggtgcctgtttcctcattgacttcatgttttttgaaagcactggcagccaggaacaaaaatcaggagtgtggtagtggattagtgaaagtctcctcaggaaatctgaagtctgtatattgattgagactatctaaactcatacctgtatgaattaagctgtaaggcctgtagctctggttgtatacttttgcttttcaaattatagtttatcttctgtataactgatttataaaggtttttgtacattttttaatactcattgtcaatttgagaaaaaggacatatgagtttttgcatttattaatgaaactatggcctcgttggcctcagcggtggagctctgccggccg

SEQ ID NO: 302744 - DNA, 6899 bp, Homo sapiens
  misc_feature (3435)..(3435): n is a, c, g, or t
cgactcgcccgtgctgctgccgccgccgaaggaggggcaaagctcaagatggcggacaaaacgccaggcggatctcagaaggccagttcaaagacgagatcatcagatgttcattcatctggatcttcagatgcacatatggatgcatctggaccctcagatagtgatatgccaagtcggacacgacctaagagcccaagaaaacataattataggaatgaaagtgcccgtgaaagcctttgtgattctcctcatcagaatctctcaagacctcttctggaaaacaaacttaaagcattcagtattggaaaaatgagtacagctaagcgaactttaagtaaaaaggaacaggaagaattaaagaaaaaggaggatgaaaaggcagctgctgagatttatgaggagtttcttgctgcttttgaaggaagtgatggtaataaagtgaaaacatttgtgcgagggggtgttgttaatgcagctaaagaagaacatgaaacagatgaaaaaagaggtaaaatctataagccatcttcaagatttgcagatcaaaaaaatcctccaaatcagtcttccaatgaaagaccaccatctcttcttgtgatagaaaccaaaaaacctccacttaaaaaaggagagaaagaaaagaaaaaaagcaatttggaactcttcaaagaagaattaaagcaaattcaagaggaacgtgatgagagacataaaacaaaaggcagattaagtcgatttgaacctcctcagtcagattctgatggtcagcgtcgttctatggacgcgccttcaagaagaaatagatcatctggtgttcttgatgattacgcacctggctcacatgatgtaggagatccaagcactactaatttataccttggaaacattaatccacagatgaatgaagaaatgctgtgccaagaatttggaagatttggaccgttagccagtgtgaaaatcatgtggcctagaactgatgaagaaagagccagagagagaaattgcggctttgtggcctttatgaatagaagagatgctgaaagagctttaaaaaatttgaatggaaaaatgattatgtcttttgaaatgaagttaggttggggtaaagctgtacctattcctccacatccaatatacattccgccttctatgatggaacatacgcttcccccacctccatccggactgccttttaatgcgcagcctagagagcggttaaaaaaccctaatgctcctatgttaccgccacctaaaaacaaagaggattttgagaagactctgtcgcaagccatagtcaaagtggttatcccaacagaaaggaatttgctcgccctgatacatcgaatgatagagtttgttgtacgtgaagggccaatgtttgaagctatgattatgaacagagaaatcaacaatcctatgttcaggttcttatttgaaaaccagacaccagcccatgtttactataggtggaagctttattctattctgcagggagattctccaactaaatggcggacggaagattttcgtatgttcaaaaatggatctttttggaggccaccaccattaaatccgtacttgcatggaatgtcagaagagcaagaaacagaagcttttgtagaggaacctagtaaaaagggagcacttaaggaagaacagagggataaattggaagaaatcttgcggggattaactccaaggaaaaatgatattggagatgcaatggttttctgtcttaataatgctgaagctgctgaagaaatagtggattgcattactgagtcgttgtccatcttaaagacaccccttcctaaaaagattgccagattatatttggtttctgatgttttgtacaactcttcagccaaagttgctaatgcttcatattatagaaaattttttgaaacaaagttatgtcagatattttcagacctcaatgccacctatcgtacaattcaaggccatttacaatctgaaaactttaagcaacgggtaatgacttgcttcagagcatgggaagattgggcaatttatccagaaccatttttgatcaaactacaaaatattttcttaggacttgtaaatattattgaagaaaaggaaacagaggatgttccagatgaccttgatggtgcccccatcgaggaagagcttgatggtgcacctctggaagatgtagatggaattcctattgatgctactcccatcgatgatcttgatggagtccctataaaaagtcttgatgatgatcttgatggagtgcctttggatgcaactgaagactcaaaaaagaatgagcctatatttaaagttgccccatcaaaatgggaagctgtggatgaatctgaattggaagcacaggctgttacaacttctaaatgggaattatttgaccagcatgaagaatcagaagaagaagaaaatcaaaatcaagaagaagaaagtgaagatgaagaagatactcaaagttccaaatctgaagaacatcatttgtactctaatccaatcaaagaagaaatgactgagtctaagttctctaagtactctgaaatgagtgaggaaaaacgagccaaacttcgtgaaattgagctcaaagttatgaagtttcaggatgaattggaatctgggaaaagacctaaaaaaccaggccagagttttcaggagcaagtagaacactacagagataaacttcttcaacgagagaaagagaaagagttagaaagagaacgagaaagagacaagaaagataaagaaaaattggaatctcgctccaaagacaagaaggaaaaagatgagtgtactccgacaaggaaggaaaggaagaggcgacacagtacatcccccagcccatctcgcagtagcagtggtagacgagtgaaatccccatcaccaaaatcggagcgatcagagcgttcagaaagatctcataaagagagctcacggtccaggtcatctcacaaagattctcctagagatgttagcaaaaaagccaaaagatcaccatctggttcaaggacacctaaaaggtctaggcgatcacggtctagatctcctaaaaaatcaggaaagaagtccagatcccagtccagatctccacacaggtctcataaaaagtcaaagaaaaacaaacactgacgtaaatttttaagattgagaaccctttttttttcgccccccaccggtttttttttttaaaaaaccccaaaacttccaaaagggagaccccctcccggggttttttttttttttttttaaccccctttttaacacaagaaccccttccccctggaaaaccccggcccctttttttaaaaatgtggaaaaacccccttcccgggggggtttttttcccaaaaagggattttttttgtgttaaaagggggttctccccccaaaaaattgttaaaaaaaggggttcccgcctgccagtanggtagtattttgttttaggatgttgtgacttagcaaaaataatacagatgtcttccccccttttgtagctttgacaatttgaattagatttcaaataaaatctgaacagaaaactataatgttgtttttttgccccaccggtgatattaagtcccttaaagtcctactgagtttcacactactgttgtgcttcttatacctgatgcactttataagccccagtgttcaagtagcttaagttttatatttactaagatgactatccaaattaagggacctgagactcctatttggtggtttgctaaccatttgcttttgataagtttctcttgggtaatactaatacccagatatcaaagactaggtagatatggcatggcgttttgttagtggaatgcctggctaaaacatttttttcacagaagcaatatgatttccatacatccaacccatgttctgagcaactacttacttttagggggaaattaaatatcttttcatttcctcttctattatgaaagaagtttatttgtaaaacaaattttctaacaaggtttggccatagaattctcttgtatgattgttgaccttttataatcttctgtaggctatctttcaaacactggcatcagaatattttttataagtttgtgtttaaacagcttagttggtccccccccccactcccaagagacttgggtttagttatagctttaagtaaaatttaaaaataaaatgtttttcaggaaacttcgtatctaatggtttgtaaattcaaggtgcaaaaagttgatttaaaccatttgcagagttgaactctattatgaaaataaatttgctacggtatgaggaagaaataaaacttgtgtaatgttggtcataatactgctataaatataataaagggttatgtagaattgaactgacactattatttgtgaatcttgatttcagttttttatgtaggcacttcatacactggtttgatgggttttttttttcctccctaaaagagaaagtagaaaactattctaacaatggattattttgatttagcttgctttttaaaaaaatcttttcaacttgttttacttaatcttgcctagtcacaaaataagatgtgcacccatggtttggagagttcctatattagctgagcagtgagatacactatttccaaacggtgcacacctacagtagctttggaaatgagccaatcactgttttacttaatggttcttatcagcatgcaaatattgcttgaaagttatttccttattcactgttttgttagtccattttgttaggaaacattaattcctaaaaatttgttcagaataattaaaagtgaacatttggtgctgatactcaaaaacctacaaatgtagccatttaaaaagtaacatgtttttctcccctgctcattgcctgggagaatggaattttatataactacctttctttgcaaaaataacggtcgtgtcgagttggtggtgattttggcattccatcttgcactggtttctagtataggcttagaaataattggtcaggtaataatctttccagtcaagttgcaagggatgcttatttctcttcaaaaaaagacatcctgcgggattgagtagaaaattttaggtcagttttgggtgcttatttgtaatatttttcctactacattggagtttagcagttctttttttctggatccagatacaagtgtcatggtttatcttacagtgggtgaaactgactttcttttggttgggtgggtgaggatttcttaggcctgatagaatatatattctgtgaagtttgttaatgtacatattagattgtattggatttttttttcttgaattgcaaatggtattattagataggttatttccagttttacttcatgacaaattacctagagtaaacctacttaatactccaatggattctatgaaagtttaatgggatcagaaattggtgacttataagggggaagatattctaccatatttttataatagcttattattcatgtttcttgtctgaaggacactcaagttacagagcaaaatttctataggttgactagaatgttcataagcatggtcttccagttgcaggaaagatcatgttctatctgtggacacttactgtcctctaccacagctacgtgccagagttgttttccacagttcttataaagggcatgacttaggctctttaccctccaacttaatgtttatacacagggattgtttactaggttaatgacatttaactcccctctcttctgtaggtgagagaaaataagtaagtcttgatctgtttcttaccaaagagagacagacctatgatggaaaatgatcacgtctctgaattttttctttaacgttatagttccttattacagatagtaagcatatgggaatttctgagctataacatgttgagaagttagaaattaaaactaacacaacaaaaggcgctgaatcaaaagatctttgcttttatttggctcagaatgtttttggcttttctgctaaagatggcagaaattactctacacagacctgatttttctttattgcagaccattcttgtgggcttaccctgagacttttatcccaattagtgaatcttggagggaatacttgcttatttatgacttaggtatttccccccaaactttaatattcttgagcacttgaaaatacttttgagaaattttaactgtgattaaatttaggtttattagaaatattctgtacacatttgcctccatggtggcgtaagttctgaaaaattatatgaccgtgacaatagtttatcatcatcattattgttattcaaaataagggtaaataaatctctgtattgccaaagtgacttaaactgttctgatgaccacacagtgtgatttctttagcagagaaagttggttttaaaaataaatagtaccacttttctaagactgtacagtttacaaataaggtttttttctttgttgttttcctcttctattaagttttagtgaaaagcctaattacagaaaattgtgcagatactagtgaagatactagtataagtttaaaggaacatgtgactgtaaaatctcacatttacaaagtgcttgatctcttcatatttcacacgcatgttttagaatagattttagggagtgtttaattcattatccttttgacttaaaatttttgttaccaacttcctaggacttagataatatataaataagtacaaatcccaggggaagtgttgtgatgctagactaaaaggtgggaatgtgctgctgttccgtgagccttgttccattgttgaaaatttgatgcctcagtgtttattcagtaccacctcatggagcttcaatgtaaatggattatatgtataattggtaatttgtatagttttgtagattgtagattaaatgcactcatcatgtcacatgt

SEQ ID NO: 302745 - DNA, 4650 bp, Homo sapiens
gatgaaggaacatgaaaggagagaatatttaaaaacattgaatgaagaagaagagaaaagaagaagagtctgaatttgaagaaatgaagaaaaagcatgaaaatcaccctaaagttaatcacccaggaagcacaggctgttacaacttctaaatgggaattatttgaccagcatgaagaatcagaagaagaagaaaatcaaaatcaagaagaagaaagtgaagatgaagaagatactcaaagttccaaatctgaagaacatcatttgtactctaatccaatcaaagaagaaatgactgagtctaagttctctaagtactctgaaatgagtgaggaaaaacgagccaaacttcgtgaaattgagctcaaagttatgaagtttcaggatgaattggaatctgggaaaagacctaaaaaaccaggccagagttttcaggagcaagtagaacactacagagataaacttcttcaacgagagaaagagaaagagttagaaagagaacgagaaagagacaagaaagataaagaaaaattggaatctcgctccaaagacaagaaggaaaaagatgagtgtactccgacaaggaaggaaaggaagaggcgacacagtacatcccccagcccatctcgcagtagcagtggtagacgagtgaaatccccatcaccaaaatcggagcgatcagagcgttcagaaagatctcataaagagagctcacggtccaggtcatctcacaaagattctcctagagatgttagcaaaaaagccaaaagatcaccatctggttcaaggacacctaaaaggtctaggcgatcacggtctagatctcctaaaaaatcaggaaagaagtccagatcccagtccagatctccacacaggtctcataaaaagtcaaagaaaaacaaacactgacgtaaatttttaagatgctgtcacttattggaaatgcgatttgttttgtgcctgaacggtctgttttttaaaaaaacaaaaaatcaaatgaaagagcattcctggggttttttgtttgtttgtgtatgcatgtgtaaactcatgagcaactgcatctgtagatctgtcattgttttatattgtgtaaattactttcattgtggctatttctcaagatgaaatttttattgttctaatggatttcatcagaaatgtgtataatggatctgctgacagtagtagtattttgttttaggatgttgtgacttagcaaaaataatacagatgtcttccccccttttgtagctttgacaatttgaattagatttcaaataaaatctgaacagaaaactataatgttgtttttttgccccaccggtgatattaagtcccttaaagtcctactgagtttcacactactgttgtgcttcttatacctgatgcactttataagccccagtgttcaagtagcttaagttttatatttactaagatgactatccaaattaagggacctgagactcctatttggtggtttgctaaccatttgcttttgataagtttctcttgggtaatactaatacccagatatcaaagactaggtagatatggcatggcgttttgttagtggaatgcctggctaaaacatttttttcacagaagcaatatgatttccatacatccaacccatgttctgagcaactacttacttttagggggaaattaaatatcttttcatttcctcttctattatgaaagaagtttatttgtaaaacaaattttctaacaaggtttggccatagaattctcttgtatgattgttgaccttttataatcttctgtaggctatctttcaaacactggcatcagaatattttttataagtttgtgtttaaacagcttagttggtccccccccccactcccaagagacttgggtttagttatagctttaagtaaaatttaaaaataaaatgtttttcaggaaacttcgtatctaatggtttgtaaattcaaggtgcaaaaagttgatttaaaccatttgcagagttgaactctattatgaaaataaatttgctacggtatgaggaagaaataaaacttgtgtaatgttggtcataatactgctataaatataataaagggttatgtagaattgaactgacactattatttgtgaatcttgatttcagttttttatgtaggcacttcatacactggtttgatgggttttttttttcctccctaaaagagaaagtagaaaactattctaacaatggattattttgatttagcttgctttttaaaaaaatcttttcaacttgttttacttaatcttgcctagtcacaaaataagatgtgcacccatggtttggagagttcctatattagctgagcagtgagatacactatttccaaacggtgcacacctacagtagctttggaaatgagccaatcactgttttacttaatggttcttatcagcatgcaaatattgcttgaaagttatttccttattcactgttttgttagtccattttgttaggaaacattaattcctaaaaatttgttcagaataattaaaagtgaacatttggtgctgatactcaaaaacctacaaatgtagccatttaaaaagtaacatgtttttctcccctgctcattgcctgggagaatggaattttatataactacctttctttgcaaaaataacggtcgtgtcgagttggtggtgattttggcattccatcttgcactggtttctagtataggcttagaaataattggtcaggtaataatctttccagtcaagttgcaagggatgcttatttctcttcaaaaaaagacatcctgcgggattgagtagaaaattttaggtcagttttgggtgcttatttgtaatatttttcctactacattggagtttagcagttctttttttctggatccagatacaagtgtcatggtttatcttacagtgggtgaaactgactttcttttggttgggtgggtgaggatttcttaggcctgatagaatatatattctgtgaagtttgttaatgtacatattagattgtattggatttttttttcttgaattgcaaatggtattattagataggttatttccagttttacttcatgacaaattacctagagtaaacctacttaatactccaatggattctatgaaagtttaatgggatcagaaattggtgacttataagggggaagatattctaccatatttttataatagcttattattcatgtttcttgtctgaaggacactcaagttacagagcaaaatttctataggttgactagaatgttcataagcatggtcttccagttgcaggaaagatcatgttctatctgtggacacttactgtcctctaccacagctacgtgccagagttgttttccacagttcttataaagggcatgacttaggctctttaccctccaacttaatgtttatacacagggattgtttactaggttaatgacatttaactcccctctcttctgtaggtgagagaaaataagtaagtcttgatctgtttcttaccaaagagagacagacctatgatggaaaatgatcacgtctctgaattttttctttaacgttatagttccttattacagatagtaagcatatgggaatttctgagctataacatgttgagaagttagaaattaaaactaacacaacaaaaggcgctgaatcaaaagatctttgcttttatttggctcagaatgtttttggcttttctgctaaagatggcagaaattactctacacagacctgatttttctttattgcagaccattcttgtgggcttaccctgagacttttatcccaattagtgaatcttggagggaatacttgcttatttatgacttaggtatttccccccaaactttaatattcttgagcacttgaaaatacttttgagaaattttaactgtgattaaatttaggtttattagaaatattctgtacacatttgcctccatggtggcgtaagttctgaaaaattatatgaccgtgacaatagtttatcatcatcattattgttattcaaaataagggtaaataaatctctgtattgccaaagtgacttaaactgttctgatgaccacacagtgtgatttctttagcagagaaagttggttttaaaaataaatagtaccacttttctaagactgtacagtttacaaataaggtttttttctttgttgttttcctcttctattaagttttagtgaaaagcctaattacagaaaattgtgcagatactagtgaagatactagtataagtttaaaggaacatgtgactgtaaaatctcacatttacaaagtgcttgatctcttcatatttcacacgcatgttttagaatagattttagggagtgtttaattcattatccttttgacttaaaatttttgttaccaacttcctaggacttagataatatataaataagtacaaatcccaggggaagtgttgtgatgctagactaaaaggtgggaatgtgctgctgttccgtgagccttgttccattgttgaaaatttgatgcctcagtgtttattcagtaccacctcatggagcttcaatgtaaatggattatatgtataattggtaatttgtatagttttgtagattgtagattaaatgcactcatcatgtcacatgt

SEQ ID NO: 302746 - DNA, 4367 bp, Homo sapiens
tgtttatggtcttagatattggagtagaggggggggggggtttagctggagacgactctcttaattttccaccgctacagctcaaagttatgaagtttcaggatgaattggaatctgggaaaagacctaaaaaaccaggccagagttttcaggagcaagtagaacactacagagataaacttcttcaacgagagaaagagaaagagttagaaagagaacgagaaagagacaagaaagataaagaaaaattggaatctcgctccaaagacaagaaggaaaaagatgagtgtactccgacaaggaaggaaaggaagaggcgacacagtacatcccccagcccatctcgcagtagcagtggtagacgagtgaaatccccatcaccaaaatcggagcgatcagagcgttcagaaagatctcataaagagagctcacggtccaggtcatctcacaaagattctcctagagatgttagcaaaaaagccaaaagatcaccatctggttcaaggacacctaaaaggtctaggcgatcacggtctagatctcctaaaaaatcaggaaagaagtccagatcccagtccagatctccacacaggtctcataaaaagtcaaagaaaaacaaacactgacgtaaatttttaagatgctgtcacttattggaaatgcgatttgttttgtgcctgaacggtctgttttttaaaaaaacaaaaaatcaaatgaaagagcattcctggggttttttgtttgtttgtgtatgcatgtgtaaactcatgagcaactgcatctgtagatctgtcattgttttatattgtgtaaattactttcattgtggctatttctcaagatgaaatttttattgttctaatggatttcatcagaaatgtgtataatggatctgctgacagtagtagtattttgttttaggatgttgtgacttagcaaaaataatacagatgtcttccccccttttgtagctttgacaatttgaattagatttcaaataaaatctgaacagaaaactataatgttgtttttttgccccaccggtgatattaagtcccttaaagtcctactgagtttcacactactgttgtgcttcttatacctgatgcactttataagccccagtgttcaagtagcttaagttttatatttactaagatgactatccaaattaagggacctgagactcctatttggtggtttgctaaccatttgcttttgataagtttctcttgggtaatactaatacccagatatcaaagactaggtagatatggcatggcgttttgttagtggaatgcctggctaaaacatttttttcacagaagcaatatgatttccatacatccaacccatgttctgagcaactacttacttttagggggaaattaaatatcttttcatttcctcttctattatgaaagaagtttatttgtaaaacaaattttctaacaaggtttggccatagaattctcttgtatgattgttgaccttttataatcttctgtaggctatctttcaaacactggcatcagaatattttttataagtttgtgtttaaacagcttagttggtccccccccccactcccaagagacttgggtttagttatagctttaagtaaaatttaaaaataaaatgtttttcaggaaacttcgtatctaatggtttgtaaattcaaggtgcaaaaagttgatttaaaccatttgcagagttgaactctattatgaaaataaatttgctacggtatgaggaagaaataaaacttgtgtaatgttggtcataatactgctataaatataataaagggttatgtagaattgaactgacactattatttgtgaatcttgatttcagttttttatgtaggcacttcatacactggtttgatgggttttttttttcctccctaaaagagaaagtagaaaactattctaacaatggattattttgatttagcttgctttttaaaaaaatcttttcaacttgttttacttaatcttgcctagtcacaaaataagatgtgcacccatggtttggagagttcctatattagctgagcagtgagatacactatttccaaacggtgcacacctacagtagctttggaaatgagccaatcactgttttacttaatggttcttatcagcatgcaaatattgcttgaaagttatttccttattcactgttttgttagtccattttgttaggaaacattaattcctaaaaatttgttcagaataattaaaagtgaacatttggtgctgatactcaaaaacctacaaatgtagccatttaaaaagtaacatgtttttctcccctgctcattgcctgggagaatggaattttatataactacctttctttgcaaaaataacggtcgtgtcgagttggtggtgattttggcattccatcttgcactggtttctagtataggcttagaaataattggtcaggtaataatctttccagtcaagttgcaagggatgcttatttctcttcaaaaaaagacatcctgcgggattgagtagaaaattttaggtcagttttgggtgcttatttgtaatatttttcctactacattggagtttagcagttctttttttctggatccagatacaagtgtcatggtttatcttacagtgggtgaaactgactttcttttggttgggtgggtgaggatttcttaggcctgatagaatatatattctgtgaagtttgttaatgtacatattagattgtattggatttttttttcttgaattgcaaatggtattattagataggttatttccagttttacttcatgacaaattacctagagtaaacctacttaatactccaatggattctatgaaagtttaatgggatcagaaattggtgacttataagggggaagatattctaccatatttttataatagcttattattcatgtttcttgtctgaaggacactcaagttacagagcaaaatttctataggttgactagaatgttcataagcatggtcttccagttgcaggaaagatcatgttctatctgtggacacttactgtcctctaccacagctacgtgccagagttgttttccacagttcttataaagggcatgacttaggctctttaccctccaacttaatgtttatacacagggattgtttactaggttaatgacatttaactcccctctcttctgtaggtgagagaaaataagtaagtcttgatctgtttcttaccaaagagagacagacctatgatggaaaatgatcacgtctctgaattttttctttaacgttatagttccttattacagatagtaagcatatgggaatttctgagctataacatgttgagaagttagaaattaaaactaacacaacaaaaggcgctgaatcaaaagatctttgcttttatttggctcagaatgtttttggcttttctgctaaagatggcagaaattactctacacagacctgatttttctttattgcagaccattcttgtgggcttaccctgagacttttatcccaattagtgaatcttggagggaatacttgcttatttatgacttaggtatttccccccaaactttaatattcttgagcacttgaaaatacttttgagaaattttaactgtgattaaatttaggtttattagaaatattctgtacacatttgcctccatggtggcgtaagttctgaaaaattatatgaccgtgacaatagtttatcatcatcattattgttattcaaaataagggtaaataaatctctgtattgccaaagtgacttaaactgttctgatgaccacacagtgtgatttctttagcagagaaagttggttttaaaaataaatagtaccacttttctaagactgtacagtttacaaataaggtttttttctttgttgttttcctcttctattaagttttagtgaaaagcctaattacagaaaattgtgcagatactagtgaagatactagtataagtttaaaggaacatgtgactgtaaaatctcacatttacaaagtgcttgatctcttcatatttcacacgcatgttttagaatagattttagggagtgtttaattcattatccttttgacttaaaatttttgttaccaacttcctaggacttagataatatataaataagtacaaatcccaggggaagtgttgtgatgctagactaaaaggtgggaatgtgctgctgttccgtgagccttgttccattgttgaaaatttgatgcctcagtgtttattcagtaccacctcatggagcttcaatgtaaatggattatatgtataattggtaatttgtatagttttgtagattgtagattaaatgcactcatcatgtcacatgt

SEQ ID NO: 302747 - DNA, 1336 bp, Homo sapiens
gtggggtgatctagaggatcccattcactcaacctgctgcttcaggagagtgatttcactcaacctgctgcttcaggagatagaaatccaagctcctcctggtgtaccaataggttatgttattcagacttggcacccatgtctaccaaagtttacaattcaaaatgagaaaagagaggatgtactaaaaataagtggtccatgtgttgtgtgcagctgttgtggagatgttgattttgagattaaatctcttgatgaacagtgtgtggttggcaaaatttccaagcactggactggaattttgagagaggcatttacagacgctgataactttggaatccagttccctttagaccttgatgttaaaatgaaagctgtaatgattggtgcctgtttcctcattgacttcatgttttttgaaagcactggcagccaggaacaaaaatcaggagtgtggtagtggattagtgaaagtctcctcaggaaatctgaagtctgtatattgattgagactatctaaactcatacctgtatgaattaagctgtaaggcctgtagctctggttgtatacttttgcttttcaaattatagtttatcttctgtataactgatttataaaggtttttgtacattttttaatactcattgtcaatttgagaaaaaggacatatgagtttttgcatttattaatgaaacttcctttgaaaaactgctttgaattatgatctctgattcattgtccattttactaccaaatattaactaaggccttattaatttttatataaattatatcttgtcctattaaatctagttacaatttatttcatgcataagagctaatgttattttgcaaatgccatatattcaaaaaagctcaaagataattttctttactattatgttcaaataatattcaatatgcatattatctttaaaaagttaaatgtttttttaatcttcaagaaatcatgctacacttaacttctcctagaagctaatctataccataatattttcatattcacaagatattaaattaccaattttcaaattattgttagtaaagaacaaaatgattctctcccaaagaaagacacattttaaatactccttcactctaaaactctggtattataacttttgaaagttaatatttctacatgaaatgtttagctcttacactctatccttcctagaaaatggtaattgagattactcagatattaattaaatacaatatcatatatatattcacagagtataaacctaaataatgatctattagattcaaatatttgaaataaaaacttgatttttttgtaaaaaaaatttt

SEQ ID NO: 302748 - DNA, 3575 bp, Homo sapiens
cgactcgcccgtgctgctgccgccgccgaaggaggggcaaagctcaagatggcggacaaaacgccaggcggatctcagaaggccagttcaaagacgagatcatcagatgttcattcatctggatcttcagatgcacatatggatgcatctggaccctcagatagtgatatgccaagtcggacacgacctaagagcccaagaaaacataattataggaatgaaagtgcccgtgaaagcctttgtgattctcctcatcagaatctctcaagacctcttctggaaaacaaacttaaagcattcagtattggaaaaatgagtacagctaagcgaactttaagtaaaaaggaacaggaagaattaaagaaaaaggaggatgaaaaggcagctgctgagatttatgaggagtttcttgctgcttttgaaggaagtgatggtaataaagtgaaaacatttgtgcgagggggtgttgttaatgcagctaaagaagaacatgaaacagatgaaaaaagaggtaaaatctataagccatcttcaagatttgcagatcaaaaaaatcctccaaatcagtcttccaatgaaagaccaccatctcttcttgtgatagaaaccaaaaaacctccacttaaaaaaggagagaaagaaaagaaaaaaagcaatttggaactcttcaaagaagaattaaagcaaattcaagaggaacgtgatgagagacataaaacaaaaggcagattaagtcgatttgaacctcctcagtcagattctgatggtcagcgtcgttctatggacgcgccttcaagaagaaatagatcatctggtgttcttgatgattacgcacctggctcacatgatgtaggagatccaagcactactaatttataccttggaaacattaatccacagatgaatgaagaaatgctgtgccaagaatttggaagatttggaccgttagccagtgtgaaaatcatgtggcctagaactgatgaagaaagagccagagagagaaattgcggctttgtggcctttatgaatagaagagatgctgaaagagctttaaaaaatttgaatggaaaaatgattatgtcttttgaaatgaagttaggttggggtaaagctgtacctattcctccacatccaatatacattccgccttctatgatggaacatacgcttcccccacctccatccggactgccttttaatgcgcagcctagagagcggttaaaaaaccctaatgctcctatgttaccgccacctaaaaacaaagaggattttgagaagactctgtcgcaagccatagtcaaagtggttatcccaacagaaaggaatttgctcgccctgatacatcgaatgatagagtttgttgtacgtgaagggccaatgtttgaagctatgattatgaacagagaaatcaacaatcctatgttcaggttcttatttgaaaaccagacaccagcccatgtttactataggtggaagctttattctattctgcagggagattctccaactaaatggcggacggaagattttcgtatgttcaaaaatggatctttttggaggccaccaccattaaatccgtacttgcatggaatgtcagaagagcaagaaacagaagcttttgtagaggaacctagtaaaaagggagcacttaaggaagaacagagggataaattggaagaaatcttgcggggattaactccaaggaaaaatgatattggagatgcaatggttttctgtcttaataatgctgaagctgctgaagaaatagtggattgcattactgagtcgttgtccatcttaaagacaccccttcctaaaaagattgccagattatatttggtttctgatgttttgtacaactcttcagccaaagttgctaatgcttcatattatagaaaattttttgaaacaaagttatgtcagatattttcagacctcaatgccacctatcgtacaattcaaggccatttacaatctgaaaactttaagcaacgggtaatgacttgcttcagagcatgggaagattgggcaatttatccagaaccatttttgatcaaactacaaaatattttcttaggacttgtaaatattattgaagaaaaggaaacagaggatgttccagatgaccttgatggtgcccccatcgaggaagagcttgatggtgcacctctggaagatgtagatggaattcctattgatgctactcccatcgatgatcttgatggagtccctataaaaagtcttgatgatgatcttgatggagtgcctttggatgcaactgaagactcaaaaaagaatgagcctatatttaaagttgccccatcaaaatgggaagctgtggatgaatctgaattggaagcacaggctgttacaacttctaaatgggaattatttgaccagcatgaagaatcagaagaagaagaaaatcaaaatcaagaagaagaaagtgaagatgaagaagatactcaaagttccaaatctgaagaacatcatttgtactctaatccaatcaaagaagaaatgactgagtctaagttctctaagtactctgaaatgagtgaggaaaaacgagccaaacttcgtgaaattgagctcaaagttatgaagtttcaggatgaattggaatctgggaaaagacctaaaaaaccaggccagagttttcaggagcaagtagaacactacagagataaacttcttcaacgagagaaagagaaagagttagaaagagaacgagaaagagacaagaaagataaagaaaaattggaatctcgctccaaagacaagaaggaaaaagatgagtgtactccgacaaggaaggaaaggaagaggcgacacagtacatcccccagcccatctcgcagtagcagtggtagacgagtgaaatccccatcaccaaaatcggagcgatcagagcgttcagaaagatctcataaagagagctcacggtccaggtcatctcacaaagattctcctagagatgttagcaaaaaagccaaaagatcaccatctggttcaaggacacctaaaaggtctaggcgatcacggtctagatctcctaaaaaatcaggaaagaagtccagatcccagtccagatctccacacaggtctcataaaaagtcaaagaaaaacaaacactgacgtaaatttttaagatgctgtcacttattggaaatgcgatttgttttgtgcctgaacggtctgttttttaaaaaaacaaaaaatcaaatgaaagagcattcctggggttttttgtttgtttgtgtatgcatgtgtaaactcatgagcaactgcatctgtagatctgtcattgttttatattgtgtaaattactttcattgtggctatttctcaagatgaaatttttattgttctaatggatttcatcagaaatgtgtataatggatctgctgacagtagtagtattttgttttaggatgttgtgacttagcaaaaataatacagatgtcttccccccttttgtagctttgacaatttgaattagatttcaaataaatagctgcagccgggccggacacacatcgccacgttaaatttatgtatctgcaaacattaga

SEQ ID NO: 302749 - DNA, 1292 bp, Homo sapiens
ggtcggtaccatccatcatcaggctgcttcaggagatagaaatccaagctcctcctggtgtaccaataggttatgttattcagacttggcacccatgtctaccaaagtttacaattcaaaatgagaaaagagaggatgtactaaaaataagtggtccatgtgttgtgtgcagctgttgtggagatgttgattttgagattaaatctcttgatgaacagtgtgtggttggcaaaatttccaagcactggactggaattttgagagaggcatttacagacgctgataactttggaatccagttccctttagaccttgatgttaaaatgaaagctgtaatgattggtgcctgtttcctcattgacttcatgttttttgaaagcactggcagccaggaacaaaaatcaggagtgtggtagtggattagtgaaagtctcctcaggaaatctgaagtctgtatattgattgagactatctaaactcatacctgtatgaattaagctgtaaggcctgtagctctggttgtatacttttgcttttcaaattatagtttatcttctgtataactgatttataaaggtttttgtacattttttaatactcattgtcaatttgagaaaaaggacatatgagtttttgcatttattaatgaaacttcctttgaaaaactgctttgaattatgatctctgattcattgtccattttactaccaaatattaactaaggccttattaatttttatataaattatatcttgtcctattaaatctagttacaatttatttcatgcataagagctaatgttattttgcaaatgccatatattcaaaaaagctcaaagataattttctttactattatgttcaaataatattcaatatgcatattatctttaaaaagttaaatgtttttttaatcttcaagaaatcatgctacacttaacttctcctagaagctaatctataccataatattttcatattcacaagatattaaattaccaattttcaaattattgttagtaaagaacaaaatgattctctcccaaagaaagacacattttaaatactccttcactctaaaactctggtattataacttttgaaagttaatatttctacatgaaatgtttagctcttacactctatccttcctagaaaatggtaattgagattactcagatattaattaaatacaatatcatatatatattcacagagtataaacctaaataatgatctattagattcaaatatttgaaataaaaacttgatttttttgtaaaaaaaatttt

SEQ ID NO: 302750 - DNA, 3953 bp, Homo sapiens
gatcgtttaaggataaacagttttgatcacatgagtactttatcaattgggatttttttgtttgtttccttagatcaccatctggttcaaggacacctaaaaggtctaggcgatcacggtctagatctcctaaaaaatcaggaaagaagtccagatcccagtccagatctccacacaggtctcataaaaagtcaaagaaaaacaaacactgacgtaaatttttaagatgctgtcacttattggaaatgcgatttgttttgtgcctgaacggtctgttttttaaaaaaacaaaaaatcaaatgaaagagcattcctggggttttttgtttgtttgtgtatgcatgtgtaaactcatgagcaactgcatctgtagatctgtcattgttttatattgtgtaaattactttcattgtggctatttctcaagatgaaatttttattgttctaatggatttcatcagaaatgtgtataatggatctgctgacagtagtagtattttgttttaggatgttgtgacttagcaaaaataatacagatgtcttccccccttttgtagctttgacaatttgaattagatttcaaataaaatctgaacagaaaactataatgttgtttttttgccccaccggtgatattaagtcccttaaagtcctactgagtttcacactactgttgtgcttcttatacctgatgcactttataagccccagtgttcaagtagcttaagttttatatttactaagatgactatccaaattaagggacctgagactcctatttggtggtttgctaaccatttgcttttgataagtttctcttgggtaatactaatacccagatatcaaagactaggtagatatggcatggcgttttgttagtggaatgcctggctaaaacatttttttcacagaagcaatatgatttccatacatccaacccatgttctgagcaactacttacttttagggggaaattaaatatcttttcatttcctcttctattatgaaagaagtttatttgtaaaacaaattttctaacaaggtttggccatagaattctcttgtatgattgttgaccttttataatcttctgtaggctatctttcaaacactggcatcagaatattttttataagtttgtgtttaaacagcttagttggtccccccccccactcccaagagacttgggtttagttatagctttaagtaaaatttaaaaataaaatgtttttcaggaaacttcgtatctaatggtttgtaaattcaaggtgcaaaaagttgatttaaaccatttgcagagttgaactctattatgaaaataaatttgctacggtatgaggaagaaataaaacttgtgtaatgttggtcataatactgctataaatataataaagggttatgtagaattgaactgacactattatttgtgaatcttgatttcagttttttatgtaggcacttcatacactggtttgatgggttttttttttcctccctaaaagagaaagtagaaaactattctaacaatggattattttgatttagcttgctttttaaaaaaatcttttcaacttgttttacttaatcttgcctagtcacaaaataagatgtgcacccatggtttggagagttcctatattagctgagcagtgagatacactatttccaaacggtgcacacctacagtagctttggaaatgagccaatcactgttttacttaatggttcttatcagcatgcaaatattgcttgaaagttatttccttattcactgttttgttagtccattttgttaggaaacattaattcctaaaaatttgttcagaataattaaaagtgaacatttggtgctgatactcaaaaacctacaaatgtagccatttaaaaagtaacatgtttttctcccctgctcattgcctgggagaatggaattttatataactacctttctttgcaaaaataacggtcgtgtcgagttggtggtgattttggcattccatcttgcactggtttctagtataggcttagaaataattggtcaggtaataatctttccagtcaagttgcaagggatgcttatttctcttcaaaaaaagacatcctgcgggattgagtagaaaattttaggtcagttttgggtgcttatttgtaatatttttcctactacattggagtttagcagttctttttttctggatccagatacaagtgtcatggtttatcttacagtgggtgaaactgactttcttttggttgggtgggtgaggatttcttaggcctgatagaatatatattctgtgaagtttgttaatgtacatattagattgtattggatttttttttcttgaattgcaaatggtattattagataggttatttccagttttacttcatgacaaattacctagagtaaacctacttaatactccaatggattctatgaaagtttaatgggatcagaaattggtgacttataagggggaagatattctaccatatttttataatagcttattattcatgtttcttgtctgaaggacactcaagttacagagcaaaatttctataggttgactagaatgttcataagcatggtcttccagttgcaggaaagatcatgttctatctgtggacacttactgtcctctaccacagctacgtgccagagttgttttccacagttcttataaagggcatgacttaggctctttaccctccaacttaatgtttatacacagggattgtttactaggttaatgacatttaactcccctctcttctgtaggtgagagaaaataagtaagtcttgatctgtttcttaccaaagagagacagacctatgatggaaaatgatcacgtctctgaattttttctttaacgttatagttccttattacagatagtaagcatatgggaatttctgagctataacatgttgagaagttagaaattaaaactaacacaacaaaaggcgctgaatcaaaagatctttgcttttatttggctcagaatgtttttggcttttctgctaaagatggcagaaattactctacacagacctgatttttctttattgcagaccattcttgtgggcttaccctgagacttttatcccaattagtgaatcttggagggaatacttgcttatttatgacttaggtatttccccccaaactttaatattcttgagcacttgaaaatacttttgagaaattttaactgtgattaaatttaggtttattagaaatattctgtacacatttgcctccatggtggcgtaagttctgaaaaattatatgaccgtgacaatagtttatcatcatcattattgttattcaaaataagggtaaataaatctctgtattgccaaagtgacttaaactgttctgatgaccacacagtgtgatttctttagcagagaaagttggttttaaaaataaatagtaccacttttctaagactgtacagtttacaaataaggtttttttctttgttgttttcctcttctattaagttttagtgaaaagcctaattacagaaaattgtgcagatactagtgaagatactagtataagtttaaaggaacatgtgactgtaaaatctcacatttacaaagtgcttgatctcttcatatttcacacgcatgttttagaatagattttagggagtgtttaattcattatccttttgacttaaaatttttgttaccaacttcctaggacttagataatatataaataagtacaaatcccaggggaagtgttgtgatgctagactaaaaggtgggaatgtgctgctgttccgtgagccttgttccattgttgaaaatttgatgcctcagtgtttattcagtaccacctcatggagcttcaatgtaaatggattatatgtataattggtaatttgtatagttttgtagattgtagattaaatgcactcatcatgtcacatgt

SEQ ID NO: 302751 - DNA, 3402 bp, Homo sapiens
cgactcgcccgtgctgctgccgccgccgaaggaggggcaaagctcaagatggcggacaaaacgccaggcggatctcagaaggccagttcaaagacgagatcatcagatgttcattcatctggatcttcagatgcacatatggatgcatctggaccctcagatagtgatatgccaagtcggacacgacctaagagcccaagaaaacataattataggaatgaaagtgcccgtgaaagcctttgtgattctcctcatcagaatctctcaagacctcttctggaaaacaaacttaaagcattcagtattggaaaaatgagtacagctaagcgaactttaagtaaaaaggaacaggaagaattaaagaaaaaggaggatgaaaaggcagctgctgagatttatgaggagtttcttgctgcttttgaaggaagtgatggtaataaagtgaaaacatttgtgcgagggggtgttgttaatgcagctaaagaagaacatgaaacagatgaaaaaagaggtaaaatctataagccatcttcaagatttgcagatcaaaaaaatcctccaaatcagtcttccaatgaaagaccaccatctcttcttgtgatagaaaccaaaaaacctccacttaaaaaaggagagaaagaaaagaaaaaaagcaatttggaactcttcaaagaagaattaaagcaaattcaagaggaacgtgatgagagacataaaacaaaaggcagattaagtcgatttgaacctcctcagtcagattctgatggtcagcgtcgttctatggacgcgccttcaagaagaaatagatcatctggtgttcttgatgattacgcacctggctcacatgatgtaggagatccaagcactactaatttataccttggaaacattaatccacagatgaatgaagaaatgctgtgccaagaatttggaagatttggaccgttagccagtgtgaaaatcatgtggcctagaactgatgaagaaagagccagagagagaaattgcggctttgtggcctttatgaatagaagagatgctgaaagagctttaaaaaatttgaatggaaaaatgattatgtcttttgaaatgaagttaggttggggtaaagctgtacctattcctccacatccaatatacattccgccttctatgatggaacatacgcttcccccacctccatccggactgccttttaatgcgcagcctagagagcggttaaaaaaccctaatgctcctatgttaccgccacctaaaaacaaagaggattttgagaagactctgtcgcaagccatagtcaaagtggttatcccaacagaaaggaatttgctcgccctgatacatcgaatgatagagtttgttgtacgtgaagggccaatgtttgaagctatgattatgaacagagaaatcaacaatcctatgttcaggttcttatttgaaaaccagacaccagcccatgtttactataggtggaagctttattctattctgcagggagattctccaactaaatggcggacggaagattttcgtatgttcaaaaatggatctttttggaggccaccaccattaaatccgtacttgcatggaatgtcagaagagcaagaaacagaagcttttgtagaggaacctagtaaaaagggagcacttaaggaagaacagagggataaattggaagaaatcttgcggggattaactccaaggaaaaatgatattggagatgcaatggttttctgtcttaataatgctgaagctgctgaagaaatagtggattgcattactgagtcgttgtccatcttaaagacaccccttcctaaaaagattgccagattatatttggtttctgatgttttgtacaactcttcagccaaagttgctaatgcttcatattatagaaaattttttgaaacaaagttatgtcagatattttcagacctcaatgccacctatcgtacaattcaaggccatttacaatctgaaaactttaagcaacgggtaatgacttgcttcagagcatgggaagattgggcaatttatccagaaccatttttgatcaaactacaaaatattttcttaggacttgtaaatattattgaagaaaaggaaacagaggatgttccagatgaccttgatggtgcccccatcgaggaagagcttgatggtgcacctctggaagatgtagatggaattcctattgatgctactcccatcgatgatcttgatggagtccctataaaaagtcttgatgatgatcttgatggagtgcctttggatgcaactgaagactcaaaaaagaatgagcctatatttaaagttgccccatcaaaatgggaagctgtggatgaatctgaattggaagcacaggctgttacaacttctaaatgggaattatttgaccagcatgaagaatcagaagaagaagaaaatcaaaatcaagaagaagaaagtgaagatgaagaagatactcaaagttccaaatctgaagaacatcatttgtactctaatccaatcaaagaagaaatgactgagtctaagttctctaagtactctgaaatgagtgaggaaaaacgagccaaacttcgtgaaattgagctcaaagttatgaagtttcaggatgaattggaatctgggaaaagacctaaaaaaccaggccagagttttcaggagcaagtagaacactacagagataaacttcttcaacgagagaaagagaaagagttagaaagagaacgagaaagagacaagaaagataaagaaaaattggaatctcgctccaaagacaagaaggaaaaagatgagtgtactccgacaaggaaggaaagatcaccatctggttcaaggacacctaaaaggtctaggcgatcacggtctagatctcctaaaaaatcaggaaagaagtccagatcccagtccagatctccacacaggtctcataaaaagtcaaagaaaaacaaacactgacgtaaatttttaagatgctgtcacttattggaaatgcgatttgttttgtgcctgaacggtctgttttttaaaaaaacaaaaaatcaaatgaaagagcattcctggggttttttgtttgtttgtgtatgcatgtgtaaactcatgagcaactgcatctgtagatctgtcattgttttatattgtgtaaattactttcattgtggctatttctcaagatgaaatttttattgttctaatggatttcatcagaaatgtgtataatggatctgctgacagtagtagtattttgttttaggatgttgtgacttagcaaaaataatacagatgtcttccccccttttgtagctttgacaatttgaattagatttcaaataaatagatgcggcggtttcctttctgagggaacttctgaccctcctcctgcctctcggctcggtgttg

SEQ ID NO: 302752 - DNA, 1573 bp, Homo sapiens
  misc_feature (405)..(405): n is a, c, g, or t
tctgttccatctcatctcgggtggccgcccgatagcctcaagtcctcgttactgttcatcttcgaatctctgtcagcaacgcagagaggaccagagttattttctgtggctgaatggcctactctggaatccccagggttaaaacaactcacattcaacccttgagatgctaagttttcttgtaaagtaaaggaaatgttataagattttctgaaaccacgaacctttagcgatattgtcagaccttctccaacattttccactgcatttgtcagcaatcagagatgacctccacaccgaggcgaaccctccaccccccgacccgtctcctctctgcgtttgcagagaggacaaacccagagaggttctcgcgttgaccaaggaactgcttgctgatcctctctnaaacgcagaggatgtactaaaaataagtggtccatgtgttgtgtgcagctgttgtggagatgttgattttgagattaaatctcttgatgaacagtgtgtggttggcaaaatttccaagcactggactggaattttgagagaggcatttacagacgctgataactttggaatccagttccctttagaccttgatgttaaaatgaaagctgtaatgattggtgcctgtttcctcattgacttcatgttttttgaaagcactggcagccaggaacaaaaatcaggagtgtggtagtggattagtgaaagtctcctcaggaaatctgaagtctgtatattgattgagactatctaaactcatacctgtatgaattaagctgtaaggcctgtagctctggttgtatacttttgcttttcaaattatagtttatcttctgtataactgatttataaaggtttttgtacattttttaatactcattgtcaatttgagaaaaaggacatatgagtttttgcatttattaatgaaacttcctttgaaaaactgctttgaattatgatctctgattcattgtccattttactaccaaatattaactaaggccttattaatttttatataaattatatcttgtcctattaaatctagttacaatttatttcatgcataagagctaatgttattttgcaaatgccatatattcaaaaaagctcaaagataattttctttactattatgttcaaataatattcaatatgcatattatctttaaaaagttaaatgtttttttaatcttcaagaaatcatgctacacttaacttctcctagaagctaatctataccataatattttcatattcacaagatattaaattaccaattttcaaattattgttagtaaagaacaaaatgattctctcccaaagaaagacacattttaaatactccttcactctaaaactctggtattataacttttgaaagttaatatttctacatgaaatgtttagctcttacactctatccttcctagaaaatggtaattgagattactcagatattaattaaatacaatatcatatatatattcacagagtataaacctaaataatgatctattagattcaaatatttgaaataaaaacttgatttttttgtaaaaaaaatttt

SEQ ID NO: 302753 - DNA, 3266 bp, Homo sapiens
cgactcgcccgtgctgctgccgccgccgaaggaggggcaaagctcaagatggcggacaaaacgccaggcggatctcagaaggccagttcaaagacgagatcatcagatgttcattcatctggatcttcagatgcacatatggatgcatctggaccctcagatagtgatatgccaagtcggacacgacctaagagcccaagaaaacataattataggaatgaaagtgcccgtgaaagcctttgtgattctcctcatcagaatctctcaagacctcttctggaaaacaaacttaaagcattcagtattggaaaaatgagtacagctaagcgaactttaagtaaaaaggaacaggaagaattaaagaaaaaggaggatgaaaaggcagctgctgagatttatgaggagtttcttgctgcttttgaaggaagtgatggtaataaagtgaaaacatttgtgcgagggggtgttgttaatgcagctaaagaagaacatgaaacagatgaaaaaagaggtaaaatctataagccatcttcaagatttgcagatcaaaaaaatcctccaaatcagtcttccaatgaaagaccaccatctcttcttgtgatagaaaccaaaaaacctccacttaaaaaaggagagaaagaaaagaaaaaaagcaatttggaactcttcaaagaagaattaaagcaaattcaagaggaacgtgatgagagacataaaacaaaaggcagattaagtcgatttgaacctcctcagtcagattctgatggtcagcgtcgttctatggacgcgccttcaagaagaaatagatcatctggtgttcttgatgattacgcacctggctcacatgatgtaggagatccaagcactactaatttataccttggaaacattaatccacagatgaatgaagaaatgctgtgccaagaatttggaagatttggaccgttagccagtgtgaaaatcatgtggcctagaactgatgaagaaagagccagagagagaaattgcggctttgtggcctttatgaatagaagagatgctgaaagagctttaaaaaatttgaatggaaaaatgattatgtcttttgaaatgaagttaggttggggtaaagctgtacctattcctccacatccaatatacattccgccttctatgatggaacatacgcttcccccacctccatccggactgccttttaatgcgcagcctagagagcggttaaaaaaccctaatgctcctatgttaccgccacctaaaaacaaagaggattttgagaagactctgtcgcaagccatagtcaaagtggttatcccaacagaaaggaatttgctcgccctgatacatcgaatgatagagtttgttgtacgtgaagggccaatgtttgaagctatgattatgaacagagaaatcaacaatcctatgttcaggttcttatttgaaaaccagacaccagcccatgtttactataggtggaagctttattctattctgcagggagattctccaactaaatggcggacggaagattttcgtatgttcaaaaatggatctttttggaggccaccaccattaaatccgtacttgcatggaatgtcagaagagcaagaaacagaagcttttgtagaggaacctagtaaaaagggagcacttaaggaagaacagagggataaattggaagaaatcttgcggggattaactccaaggaaaaatgatattggagatgcaatggttttctgtcttaataatgctgaagctgctgaagaaatagtggattgcattactgagtcgttgtccatcttaaagacaccccttcctaaaaagattgccagattatatttggtttctgatgttttgtacaactcttcagccaaagttgctaatgcttcatattatagaaaattttttgaaacaaagttatgtcagatattttcagacctcaatgccacctatcgtacaattcaaggccatttacaatctgaaaactttaagcaacgggtaatgacttgcttcagagcatgggaagattgggcaatttatccagaaccatttttgatcaaactacaaaatattttcttaggacttgtaaatattattgaagaaaaggaaacagaggatgttccagatgaccttgatggtgcccccatcgaggaagagcttgatggtgcacctctggaagatgtagatggaattcctattgatgctactcccatcgatgatcttgatggagtccctataaaaagtcttgatgatgatcttgatggagtgcctttggatgcaactgaagactcaaaaaagaatgagcctatatttaaagttgccccatcaaaatgggaagctgtggatgaatctgaattggaagcacaggctgttacaacttctaaatgggaattatttgaccagcatgaagaatcagaagaagaagaaaatcaaaatcaagaagaagaaagtgaagatgaagaagatactcaaagttccaaatctgaagaacatcatttgtactctaatccaatcaaagaagaaatgactgagtctaagttctctaagtactctgaaatgagtgaggaaaaacgagccaaacttcgtgaaattgagctcaaagttatgaagtttcaggatgaattggaatctgggaaaagacctaaaaaaccaggccagagttttcaggagcaagtagaacactacagagataaacttcttcaacgagtaaggaataagtatacccaataatacacatattttgaagttatttatttgacttcctagaatactggtatacctaaagatgatttcaaattatatcctttgtataaattttgaatactagtagggcaatcagaaacatttgaaatttgatattttaaaagtattttgattggaaaggagcttaaaggcagcagcacactattttattctgagtattacctgtggacaagaagattaattctgctaagagcatgctttcaaaactggaaaacccttcaggacaagtcacattttgtgacagtgagacgccaacaaccctgagaggtagtacagaaagaaaaagatggaggcagggtttgggaagttctggtgttgagaagtttattttcatttctcatggtttccagggagggacagcaagtggtagaatacctcattggtgagctctgagtgtttgagggactttatattctcgtgcatcacaaaatttataggcatgtgcagagaattttagaaccaggaacctcaggaattttgttgagactgtcgttgcaaaaaaaaaa

SEQ ID NO: 302754 - DNA, 1461 bp, Homo sapiens
aggagttttgttcattaacttcctgatggcttctagaaatgtcatcaaagaaacatttcatatttatatccttttttgcttaaattttcttttgggtcaattcaaataatttattaatgtctatattaatataaaatagaaattgttaaatatttcaggaaaactttctgaaatataatttctccgtacaatgaaacagtttttttcatatatctataaatagatacaggagcctccagttatctaatgagggttacatatggtgcataattttaataccatatttgtttcatcttacttcaaatttgaaagtacttttgctataagtttcctaaaagtatttaatacttttttttttcaatttagattaaatctcttgatgaacagtgtgtggttggcaaaatttccaagcactggactggaattttgagagaggcatttacagacgctgataactttggaatccagttccctttagaccttgatgttaaaatgaaagctgtaatgattggtgcctgtttcctcattgacttcatgttttttgaaagcactggcagccaggaacaaaaatcaggagtgtggtagtggattagtgaaagtctcctcaggaaatctgaagtctgtatattgattgagactatctaaactcatacctgtatgaattaagctgtaaggcctgtagctctggttgtatacttttgcttttcaaattatagtttatcttctgtataactgatttataaaggtttttgtacattttttaatactcattgtcaatttgagaaaaaggacatatgagtttttgcatttattaatgaaacttcctttgaaaaactgctttgaattatgatctctgattcattgtccattttactaccaaatattaactaaggccttattaatttttatataaattatatcttgtcctattaaatctagttacaatttatttcatgcataagagctaatgttattttgcaaatgccatatattcaaaaaagctcaaagataattttctttactattatgttcaaataatattcaatatgcatattatctttaaaaagttaaatgtttttttaatcttcaagaaatcatgctacacttaacttctcctagaagctaatctataccataatattttcatattcacaagatattaaattaccaattttcaaattattgttagtaaagaacaaaatgattctctcccaaagaaagacacattttaaatactccttcactctaaaactctggtattataacttttgaaagttaatatttctacatgaaatgtttagctcttacactctatccttcctagaaaatggtaattgagattactcagatattaattaaatacaatatcatatatatattcacagagtataaacctaaataatgatctattagattcaaatatttgaaataaaaacttgatttttttgtaaaaaaaatttt

SEQ ID NO: 302755 - DNA, 1621 bp, Homo sapiens
gcaccggacaaacgtctctggagtctctccaatgagcaagaaagcaagtcgggggtaggggaggggcctcacaccagggggtgggcgcagtccctcctccagctccttcaccctccagtagtctcgtgggtccccgagcgccagcgcgggaaccgggaaaaggaaaccgtgttgtgtacgtaagattcaggaaacgaaaccaggagccgcgggtgttggcgcaaaggttactcccagacccttttccggctgacttctgagaaggttgcgcagcagctgtgcccggcagtctagaggcgcagaagaggaagccatcgcctggccccggctctctggaccttgtctcgctcgggagcggaaacagcggcagccagagaactgttttaatcatggacaaacaaaactcacagatgaatgcttctcacccggaaacaaacttgccagttgggtatcctcctcagtatccaccgacagcattccaagatagatcagatactgattcatcagcaaattgaacttctggaagattaaatctcttgatgaacagtgtgtggttggcaaaatttccaagcactggactggaattttgagagaggcatttacagacgctgataactttggaatccagttccctttagaccttgatgttaaaatgaaagctgtaatgattggtgcctgtttcctcattgacttcatgttttttgaaagcactggcagccaggaacaaaaatcaggagtgtggtagtggattagtgaaagtctcctcaggaaatctgaagtctgtatattgattgagactatctaaactcatacctgtatgaattaagctgtaaggcctgtagctctggttgtatacttttgcttttcaaattatagtttatcttctgtataactgatttataaaggtttttgtacattttttaatactcattgtcaatttgagaaaaaggacatatgagtttttgcatttattaatgaaacttcctttgaaaaactgctttgaattatgatctctgattcattgtccattttactaccaaatattaactaaggccttattaatttttatataaattatatcttgtcctattaaatctagttacaatttatttcatgcataagagctaatgttattttgcaaatgccatatattcaaaaaagctcaaagataattttctttactattatgttcaaataatattcaatatgcatattatctttaaaaagttaaatgtttttttaatcttcaagaaatcatgctacacttaacttctcctagaagctaatctataccataatattttcatattcacaagatattaaattaccaattttcaaattattgttagtaaagaacaaaatgattctctcccaaagaaagacacattttaaatactccttcactctaaaactctggtattataacttttgaaagttaatatttctacatgaaatgtttagctcttacactctatccttcctagaaaatggtaattgagattactcagatattaattaaatacaatatcatatatatattcacagagtataaacctaaataatgatctattagattcaaatatttgaaataaaaacttgatttttttgtaaaaaaaatttt

SEQ ID NO: 302756 - DNA, 1717 bp, Homo sapiens
gcaccggacaaacgtctctggagtctctccaatgagcaagaaagcaagtcgggggtaggggaggggcctcacaccagggggtgggcgcagtccctcctccagctccttcaccctccagtagtctcgtgggtccccgagcgccagcgcgggaaccgggaaaaggaaaccgtgttgtgtacgtaagattcaggaaacgaaaccaggagccgcgggtgttggcgcaaaggttactcccagacccttttccggctgacttctgagaaggttgcgcagcagctgtgcccggcagtctagaggcgcagaagaggaagccatcgcctggccccggctctctggaccttgtctcgctcgggagcggaaacagcggcagccagagcataaaatacacaagaggatttttatggaatggctccttgttacaaggaccacataaacccattttgaattattcaaccattgctgaacttcttgaaactgttttaatcatggacaaacaaaactcacagatgaatgcttctcacccggaaacaaacttgccagttgggtatcctcctcagtatccaccgacagcattccaagatagatcagatactgattcatcagcaaattgaacttctggaagattaaatctcttgatgaacagtgtgtggttggcaaaatttccaagcactggactggaattttgagagaggcatttacagacgctgataactttggaatccagttccctttagaccttgatgttaaaatgaaagctgtaatgattggtgcctgtttcctcattgacttcatgttttttgaaagcactggcagccaggaacaaaaatcaggagtgtggtagtggattagtgaaagtctcctcaggaaatctgaagtctgtatattgattgagactatctaaactcatacctgtatgaattaagctgtaaggcctgtagctctggttgtatacttttgcttttcaaattatagtttatcttctgtataactgatttataaaggtttttgtacattttttaatactcattgtcaatttgagaaaaaggacatatgagtttttgcatttattaatgaaacttcctttgaaaaactgctttgaattatgatctctgattcattgtccattttactaccaaatattaactaaggccttattaatttttatataaattatatcttgtcctattaaatctagttacaatttatttcatgcataagagctaatgttattttgcaaatgccatatattcaaaaaagctcaaagataattttctttactattatgttcaaataatattcaatatgcatattatctttaaaaagttaaatgtttttttaatcttcaagaaatcatgctacacttaacttctcctagaagctaatctataccataatattttcatattcacaagatattaaattaccaattttcaaattattgttagtaaagaacaaaatgattctctcccaaagaaagacacattttaaatactccttcactctaaaactctggtattataacttttgaaagttaatatttctacatgaaatgtttagctcttacactctatccttcctagaaaatggtaattgagattactcagatattaattaaatacaatatcatatatatattcacagagtataaacctaaataatgatctattagattcaaatatttgaaataaaaacttgatttttttgtaaaaaaaatttt

SEQ ID NO: 302757 - DNA, 2579 bp, Homo sapiens
  misc_feature (2542)..(2542): n is a, c, g, or t
cgactcgcccgtgctgctgccgccgccgaaggaggggcaaagctcaagatggcggacaaaacgccaggcggatctcagaaggccagttcaaagacgagatcatcagatgttcattcatctggatcttcagatgcacatatggatgcatctggaccctcagatagtgatatgccaagtcggacacgacctaagagcccaagaaaacataattataggaatgaaagtgcccgtgaaagcctttgtgattctcctcatcagaatctctcaagacctcttctggaaaacaaacttaaagcattcagtattggaaaaatgagtacagctaagcgaactttaagtaaaaaggaacaggaagaattaaagaaaaaggaggatgaaaaggcagctgctgagatttatgaggagtttcttgctgcttttgaaggaagtgatggtaataaagtgaaaacatttgtgcgagggggtgttgttaatgcagctaaagaagaacatgaaacagatgaaaaaagaggtaaaatctataagccatcttcaagatttgcagatcaaaaaaatcctccaaatcagtcttccaatgaaagaccaccatctcttcttgtgatagaaaccaaaaaacctccacttaaaaaaggagagaaagaaaagaaaaaaagcaatttggaactcttcaaagaagaattaaagcaaattcaagaggaacgtgatgagagacataaaacaaaaggcagattaagtcgatttgaacctcctcagtcagattctgatggtcagcgtcgttctatggacgcgccttcaagaagaaatagatcatctggtgttcttgatgattacgcacctggctcacatgatgtaggagatccaagcactactaatttataccttggaaacattaatccacagatgaatgaagaaatgctgtgccaagaatttggaagatttggaccgttagccagtgtgaaaatcatgtggcctagaactgatgaagaaagagccagagagagaaattgcggctttgtggcctttatgaatagaagagatgctgaaagagctttaaaaaatttgaatggaaaaatgattatgtcttttgaaatgaagttaggttggggtaaagctgtacctattcctccacatccaatatacattccgccttctatgatggaacatacgcttcccccacctccatccggactgccttttaatgcgcagcctagagagcggttaaaaaaccctaatgctcctatgttaccgccacctaaaaacaaagaggattttgagaagactctgtcgcaagccatagtcaaagtggttatcccaacagaaaggaatttgctcgccctgatacatcgaatgatagagtttgttgtacgtgaagggccaatgtttgaagctatgattatgaacagagaaatcaacaatcctatgttcaggttcttatttgaaaaccagacaccagcccatgtttactataggtggaagctttattctattctgcagggagattctccaactaaatggcggacggaagattttcgtatgttcaaaaatggatctttttggaggccaccaccattaaatccgtacttgcatggaatgtcagaagagcaagaaacagaagcttttgtagaggaacctagtaaaaagggagcacttaaggaagaacagagggataaattggaagaaatcttgcggggattaactccaaggaaaaatgatattggagatgcaatggttttctgtcttaataatgctgaagctgctgaagaaatagtggattgcattactgagtcgttgtccatcttaaagacaccccttcctaaaaagattgccagattatatttggtttctgatgttttgtacaactcttcagccaaagttgctaatgcttcatattatagaaaattttttgaaacaaagttatgtcagatattttcagacctcaatgccacctatcgtacaattcaaggccatttacaatctgaaaactttaagcaacgggtaatgacttgcttcagagcatgggaagattgggcaatttatccagaaccatttttgatcaaactacaaaatattttcttaggacttgtaaatattattgaagaaaaggaaacagaggatgttccagatgaccttgatggtgcccccatcgaggaagagcttgatggtgcacctctggaagatgtagatggaattcctattgatgctactcccatcgatgatcttgatggagtccctataaaaagtcttgatgatgatcttgatggagtgcctttggatgcaactgaagactcaaaaaagaatgagcctatatttaaagttgccccatcaaaatgggaagctgtggatgaatctgaattggaagcacaggctgttacaacttctaaatgggaattatttgaccagcatgaagaatcagaagaagaagaaaatcaaaatcaagaagaagaaagtgaagatgaagaagatactcaaagttccaaatctgaagaacatcatttgtactctaatccaatcaaagaagaaatgactgaggtgcctcccaacntccgcccacgctgacaataaagttgctctgagtttgg

SEQ ID NO: 302758 - DNA, 1857 bp, Homo sapiens
gcaccggacaaacgtctctggagtctctccaatgagcaagaaagcaagtcgggggtaggggaggggcctcacaccagggggtgggcgcagtccctcctccagctccttcaccctccagtagtctcgtgggtccccgagcgccagcgcgggaaccgggaaaaggaaaccgtgttgtgtacgtaagattcaggaaacgaaaccaggagccgcgggtgttggcgcaaaggttactcccagacccttttccggctgacttctgagaaggttgcgcagcagctgtgcccggcagtctagaggcgcagaagaggaagccatcgcctggccccggctctctggaccttgtctcgctcgggagcggaaacagcggcagccagagaactgttttaatcatggacaaacaaaactcacagatgaatgcttctcacccggaaacaaacttgccagttgggtatcctcctcagtatccaccgacagcattccaaggacctccaggatatagtggctaccctgggccccaggtcagctacccacccccaccagccggccattcaggtcctggcccagctggctttcctgtcccaaatcagccagtgtataatcagccagtatataatcagccagttggagctgcaggggtaccatggatgccagcgccacagcctccattaaactgtccacctggattagaatatttaagtcagatagatcagatactgattcatcagcaaattgaacttctggaagttttaacaggttttgaaactaataacaaatatgaaattaagaacagctttggacagagggtttactttgcagcggaagatactgattgctgtacccgaaattgctgtgggccatctagaccttttaccttgaggattattgataatatgggtcaagaagtcataactctggagagaccactaagatgtagcagctgttgttgtccctgctgccttcaggagatagaaatccaagctcctcctggtgtaccaataggttatgttattcagacttggcacccatgtctaccaaagtttacaattcaaaatgagaaaagagaggatgtactaaaaataagtggtccatgtgttgtgtgcagctgttgtggagatgttgattttgagattaaatctcttgatgaacagtgtgtggttggcaaaatttccaagcactggactggaattttgagagaggcatttacagacgctgataactttggaatccagttccctttagaccttgatgttaaaatgaaagctgtaatgattggtgcctgtttcctcattttgtaagtctgttcttattaatcttgattatagatgctttctctaggttcattctgaaatgattcagtaaagtgtatatttcaaaatgacattttaaaatttatagattttaaatcaggattcccatttaatcctagctctgaaattctatttgatcctgacactctggggtcacaggtgactagtttctacctgaagagtctatgaatattcacatggcaagagggggactaaggagatgtactaaggagagattttagtctccccttaaatcaggcatctcctagatgctttgaggaagaagttgaaagtaggcatatgtggaaaaaatttagtgaaacaaggaaactttaccatgactcatagtaattaaattaaaccatctaatataggagtatgaagtacaataagagtgtacattcactcaagtgtgtagacctaactaccaaattacaggaaataattggatataccagtgattctgaaattgccttcacattagaaccacctagggactttaaaaactccaaggactagtccatacctcagttcaactaaatcagaaact

SEQ ID NO: 302759 - DNA, 1260 bp, Homo sapiens
atagtgttccaggtgattccagtatgcagccaaagatgagaattatggggatagagaaaaagtaacatttagagaaaatgactggaagattaattaaattcatacaggtatcaataaatgaatagaattatagaatttattattaaaatggaaagccaaaggcagaacttatataattatagagcttttgtatatttacttattacatttaatttttttaacagatttgttactgtgtttcactagatcccttagtatttctgcatctgataattgatctctgttttgttgttgaaaattcatttgtatacttttgtttttatctaggacttcatgttttttgaaagcactggcagccaggaacaaaaatcaggagtgtggtagtggattagtgaaagtctcctcaggaaatctgaagtctgtatattgattgagactatctaaactcatacctgtatgaattaagctgtaaggcctgtagctctggttgtatacttttgcttttcaaattatagtttatcttctgtataactgatttataaaggtttttgtacattttttaatactcattgtcaatttgagaaaaaggacatatgagtttttgcatttattaatgaaacttcctttgaaaaactgctttgaattatgatctctgattcattgtccattttactaccaaatattaactaaggccttattaatttttatataaattatatcttgtcctattaaatctagttacaatttatttcatgcataagagctaatgttattttgcaaatgccatatattcaaaaaagctcaaagataattttctttactattatgttcaaataatattcaatatgcatattatctttaaaaagttaaatgtttttttaatcttcaagaaatcatgctacacttaacttctcctagaagctaatctataccataatattttcatattcacaagatattaaattaccaattttcaaattattgttagtaaagaacaaaatgattctctcccaaagaaagacacattttaaatactccttcactctaaaactctggtattataacttttgaaagttaatatttctacatgaaatgtttagctcttacactctatccttcctagaaaatggtaattgagattactcagatattaattaaatacaatatcatatatatattcacagagtataaacctaaataatgatctattagattcaaatatttgaaataaaaacttgatttttttgtaaaaaaaatttt

SEQ ID NO: 302760 - DNA, 1579 bp, Homo sapiens
cgactcgcccgtgctgctgccgccgccgaaggaggggcaaagctcaagatggcggacaaaacgccaggcggatctcagaaggccagttcaaagacgagatcatcagatgttcattcatctggatcttcagatgcacatatggatgcatctggaccctcagatagtgatatgccaagtcggacacgacctaagagcccaagaaaacataattataggaatgaaagtgcccgtgaaagcctttgtgattctcctcatcagaatctctcaagacctcttctggaaaacaaacttaaagcattcagtattggaaaaatgagtacagctaagcgaactttaagtaaaaaggaacaggaagaattaaagaaaaaggaggatgaaaaggcagctgctgagatttatgaggagtttcttgctgcttttgaaggaagtgatggtaataaagtgaaaacatttgtgcgagggggtgttgttaatgcagctaaagaagaacatgaaacagatgaaaaaagaggtaaaatctataagccatcttcaagatttgcagatcaaaaaaatcctccaaatcagtcttccaatgaaagaccaccatctcttcttgtgatagaaaccaaaaaacctccacttaaaaaaggagagaaagaaaagaaaaaaagcaatttggaactcttcaaagaagaattaaagcaaattcaagaggaacgtgatgagagacataaaacaaaaggcagattaagtcgatttgaacctcctcagtcagattctgatggtcagcgtcgttctatggacgcgccttcaagaagaaatagatcatctggtgttcttgatgattacgcacctggctcacatgatgtaggagatccaagcactactaatttataccttggaaacattaatccacagatgaatgaagaaatgctgtgccaagaatttggaagatttggaccgttagccagtgtgaaaatcatgtggcctagaactgatgaagaaagagccagagagagaaattgcggctttgtggcctttatgaatagaagagatgctgaaagagctttaaaaaatttgaatggaaaaatgattatgtcttttgaaatgaagttaggttggggtaaagctgtacctattcctccacatccaatatacattccgccttctatgatggaacatacgcttcccccacctccatccggactgccttttaatgcgcagcctagagagcggttaaaaaaccctaatgctcctatgttaccgccacctaaaaacaaagaggattttgagaaggtaatttaaaaaatggacataaggccgcatctaatttgtaaatactaaagctgtggtagtatttcttttcaacaattttatagaaaatgtgtgtgtaattctgtttggcaacttttaaagaaataagtagatgtgttccctgccttagcccatggaaaccctatatttgaaatactaggtcatatttttatttgtggctaccattccttttttgaccacttgttaagttttttttcctttgtccagtgttgtatccagatttgcttaagtgtattaactaaatttactttgttctgagaaa

SEQ ID NO: 302761 - DNA, 1480 bp, Homo sapiens
  misc_feature (1478)..(1478): n is a, c, g, or t
gcaccggacaaacgtctctggagtctctccaatgagcaagaaagcaagtcgggggtaggggaggggcctcacaccagggggtgggcgcagtccctcctccagctccttcaccctccagtagtctcgtgggtccccgagcgccagcgcgggaaccgggaaaaggaaaccgtgttgtgtacgtaagattcaggaaacgaaaccaggagccgcgggtgttggcgcaaaggttactcccagacccttttccggctgacttctgagaaggttgcgcagcagctgtgcccggcagtctagaggcgcagaagaggaagccatcgcctggccccggctctctggaccttgtctcgctcgggagcggaaacagcggcagccagagaactgttttaatcatggacaaacaaaactcacagatgaatgcttctcacccggaaacaaacttgccagttgggtatcctcctcagtatccaccgacagcattccaaggacctccaggatatagtggctaccctgggccccaggtcagctacccacccccaccagccggccattcaggtcctggcccagctggctttcctgtcccaaatcagccagtgtataatcagccagtatataatcagccagttggagctgcaggggtaccatggatgccagcgccacagcctccattaaactgtccacctggattagaatatttaagtcagatagatcagatactgattcatcagcaaattgaacttctggaagttttaacaggttttgaaactaataacaaatatgaaattaagaacagctttggacagagggtttactttgcagcggaagatactgattgctgtacccgaaattgctgtgggccatctagaccttttaccttgaggattattgataatatgggtcaagaagtcataactctggagagaccactaagatgtagcagctgttgttgtccctgctgccttcaggaggtctgtgatcaattaccagggcactttgtaaaatagttcagcaagaatttctgccctgtcattgaacctttcatcgaacctaggcattatgattattacatttacatatattattttgcctttgtagatagaaatccaagctcctcctggtgtaccaataggttatgttattcagacttggcacccatgtctaccaaagtttacaattcaaaatgagaaaagagaggatgtactaaaaataagtggtccatgtgttgtgtgcagctgttgtggagatgttgattttgagattaaatctcttgatgaacagtgtgtggttggcaaaatttccaagcactggactggaattttgagagaggcatttacagacgctgataactttggaatccagttccctttagaccttgatgttaaaatgaaagctgtaatgattggtgcctgtttcctcattacttcatgttttttgaaagcactgcagccaggtgagtgaatgggaccggctcatagtcaccnca

SEQ ID NO: 302762 - DNA, 1352 bp, Homo sapiens
gcaccggacaaacgtctctggagtctctccaatgagcaagaaagcaagtcgggggtaggggaggggcctcacaccagggggtgggcgcagtccctcctccagctccttcaccctccagtagtctcgtgggtccccgagcgccagcgcgggaaccgggaaaaggaaaccgtgttgtgtacgtaagattcaggaaacgaaaccaggagccgcgggtgttggcgcaaaggttactcccagacccttttccggctgacttctgagaaggttgcgcagcagctgtgcccggcagtctagaggcgcagaagaggaagccatcgcctggccccggctctctggaccttgtctcgctcgggagcggaaacagcggcagccagagaactgttttaatcatggacaaacctcctcagtatccaccgacagcattccaaggacctccaggatatagtggctaccctgggccccaggtcagctacccacccccaccagccggccattcaggtcctggcccagctggctttcctgtcccaaatcagccagtgtataatcagccagtatataatcagccagttggagctgcaggggtaccatggatgccagcgccacagcctccattaaactgtccactgatttataaaggtttttgtacattttttaatactcattgtcaatttgagaaaaaggacatatgagtttttgcatttattaatgaaacttcctttgaaaaactgctttgaattatgatctctgattcattgtccattttactaccaaatattaactaaggccttattaatttttatataaattatatcttgtcctattaaatctagttacaatttatttcatgcataagagctaatgttattttgcaaatgccatatattcaaaaaagctcaaagataattttctttactattatgttcaaataatattcaatatgcatattatctttaaaaagttaaatgtttttttaatcttcaagaaatcatgctacacttaacttctcctagaagctaatctataccataatattttcatattcacaagatattaaattaccaattttcaaattattgttagtaaagaacaaaatgattctctcccaaagaaagacacattttaaatactccttcactctaaaactctggtattataacttttgaaagttaatatttctacatgaaatgtttagctcttacactctatccttcctagaaaatggtaattgagattactcagatattaattaaatacaatatcatatatatattcacagagtataaacctaaataatgatctattagattcaaatatttgaaataaaaacttgatttttttgtaaaaaaaatttt

SEQ ID NO: 302763 - DNA, 1042 bp, Homo sapiens
cgactcgcccgtgctgctgccgccgccgaaggaggggcaaagctcaagatggcggacaaaacgccaggcggatctcagaaggccagttcaaagacgagatcatcagatgttcattcatctggatcttcagatgcacatatggatgcatctggaccctcagatagtgatatgccaagtcggacacgacctaagagcccaagaaaacataattataggaatgaaagtgcccgtgaaagcctttgtgattctcctcatcagaatctctcaagacctcttctggaaaacaaacttaaagcattcagtattggaaaaatgagtacagctaagcgaactttaagtaaaaaggaacaggaagaattaaagaaaaaggaggatgaaaaggcagctgctgagatttatgaggagtttcttgctgcttttgaaggaagtgatggtaataaagtgaaaacatttgtgcgagggggtgttgttaatgcagctaaagaagaacatgaaacagatgaaaaaagaggtaaaatctataagccatcttcaagatttgcagatcaaaaaaatcctccaaatcagtcttccaatgaaagaccaccatctcttcttgtgatagaaaccaaaaaacctccacttaaaaaaggagagaaagaaaagaaaaaaagcaatttggaactcttcaaagaagaattaaagcaaattcaagaggaacgtgatgagagacataaaacaaaaggcagattaagtcgatttgaacctcctcagtcagattctgatggtcagcgtcgttctatggacgcgccttcaagaagaaatagatcatctggtgttcttgatgattacgcacctggctcacatgatgtaggagatccaagcactactaatttataccttggaaacattaatccacagatgaatgaagaatgctgtgccaagaattcggagattggccggtaccagggggaaatcatggggtaaactgtgagaagagccaaaacaaaatggggttggggcttataataaaaaagggaaaagtaaaattggaggagaagta

SEQ ID NO: 302764 - DNA, 1639 bp, Homo sapiens
gcaccggacaaacgtctctggagtctctccaatgagcaagaaagcaagtcgggggtaggggaggggcctcacaccagggggtgggcgcagtccctcctccagctccttcaccctccagtagtctcgtgggtccccgagcgccagcgcgggaaccgggaaaaggaaaccgtgttgtgtacgtaagattcaggaaacgaaaccaggagccgcgggtgttggcgcaaaggttactcccagacccttttccggctgacttctgagaaggttgcgcagcagctgtgcccggcagtctagaggcgcagaagaggaagccatcgcctggccccggctctctggaccttgtctcgctcgggagcggaaacagcggcagccagagaactgttttaatcatggacaaacaaaactcacagatgaatgcttctcacccggaaacaaacttgccagttgggtatcctcctcagtatccaccgacagcattccaagatagatcagatactgattcatcagcaaattgaacttctggaagttttaacaggttttgaaactaataacaaatatgaaattaagaacagctttggacagagggtttactttgcagcggaagatactgattgctgtacccgaaattgctgtgggccatctagaccttttaccttgaggattattgataatatgggtcaagaagtcataactctggagagaccactaagatgtagcagctgttgttgtccctgctgccttcaggagatagaaatccaagctcctcctggtgtaccaataggttatgttattcagacttggcacccatgtctaccaaagtttacaattcaaaatgagaaaagagaggatgtactaaaaataagtggtccatgtgttgtgtgcagctgttgtggagatgttgattttgagattaaatctcttgatgaacagtgtgtggttggcaaaatttccaagcactggactggaattttgagagaggcatttacagacgctgataactttggaatccagttccctttagaccttgatgttaaaatgaaagctgtaatgattggtgcctgtttcctcattttgtaagtctgttcttattaatcttgattatagatgctttctctaggttcattctgaaatgattcagtaaagtgtatatttcaaaatgacattttaaaatttatagattttaaatcaggattcccatttaatcctagctctgaaattctatttgatcctgacactctggggtcacaggtgactagtttctacctgaagagtctatgaatattcacatggcaagagggggactaaggagatgtactaaggagagattttagtctccccttaaatcaggcatctcctagatgctttgaggaagaagttgaaagtaggcatatgtggaaaaaatttagtgaaacaaggaaactttaccatgactcatagtaattaaattaaaccatctaatataggagtatgaagtacaataagagtgtacattcactcaagtgtgtagacctaactaccaaattacaggaaataattggatataccagtgattctgaaattgccttcacattagaaccacctagggactttaaaaactccaaggactagtccatacctcagttcaactaaatcagaaact

SEQ ID NO: 302765 - DNA, 914 bp, Homo sapiens
cgactcgcccgtgctgctgccgccgccgaaggaggggcaaagctcaagatggcggacaaaacgccaggcggatctcagaaggccagttcaaagacgagatcatcagatgttcattcatctggatcttcagatgcacatatggatgcatctggaccctcagatagtgatatgccaagtcggacacgacctaagagcccaagaaaacataattataggaatgaaagtgcccgtgaaagcctttgtgattctcctcatcagaatctctcaagacctcttctggaaaacaaacttaaagcattcagtattggaaaaatgagtacagctaagcgaactttaagtaaaaaggaacaggaagaattaaagaaaaaggaggatgaaaaggcagctgctgagatttatgaggagtttcttgctgcttttgaaggaagtgatggtaataaagtgaaaacatttgtgcgagggggtgttgttaatgcagctaaagaagaacatgaaacagatgaaaaaagaggtaaaatctataagccatcttcaagatttgcagatcaaaaaaatcctccaaatcagtcttccaatgaaagaccaccatctcttcttgtgatagaaaccaaaaaacctgtaagtcatacttaagtaattgaccatttatgttcagagatgacactgccagtgatacttccactgtaagcaagactttggctttttttcgtttttggtgggggcagggtggtagatgttaagttttgatgctttctaacccagtaatttacttagatgagagttaatgaattgggacacgtagatgatattctttttatgctttttgagcagtgaacatttgctatttatgctcataatatattgcaagtcaaaaattgactatattgcaagtcaaaaattgactatatttgact

SEQ ID NO: 302766 - DNA, 744 bp, Homo sapiens
  misc_feature (659)..(659): n is a, c, g, or t
cgactcgcccgtgctgctgccgccgccgaaggaggggcaaagctcaagatggcggacaaaacgccaggcggatctcagaaggccagttcaaagactcacagatgaatgcttctcacccggaaacaaacttgccagttgggtatcctcctcagtatccaccgacagcattccaaggacctccaggatatagtggctaccctgggccccaggtcagctacccacccccaccagccggccattcaggtcctggcccagctggctttcctgtcccaaatcagccagtgtataatcagccagtatataatcagccagttggagctgcaggggtaccatggatgccagcgccacagcctccattaaactgtccacctggattagaatatttaagtcagatagatcagatactgattcatcagcaaattgaacttctggaagttttaacaggttttgaaactaataacaaatatgaaattaagaacagctttggacagagggtttactttgcagcggaagatactgattgctgtacccgaaattgctgtgggccatctagaccttttaccttgaggattattgataatatgggtcaagaagtcataactctggagagaccactaagatgtagcagctgttgttgtccctgctgccttcaggagatngaatccagctctctggtgtccatggatgttcgactggcccatttacaatacatcaatgaaagaaggtgataatatgtcagtgggt

SEQ ID NO: 302767 - DNA, 1096 bp, Homo sapiens
aggagttttgttcattaacttcctgatggcttctagaaatgtcatcaaagaaacatttcatatttatatccttttttgcttaaattttcttttgggtcaattcaaataatttattaatgtctatattaatataaaatagaaattgttaaatatttcaggaaaactttctgaaatataatttctccgtacaatgaaacagtttttttcatatatctataaatagatacaggagcctccagttatctaatgagggttacatatggtgcataattttaataccatatttgtttcatcttacttcaaatttgaaagtacttttgctataagtttcctaaaagtatttaatacttttttttttcaatttagattaaatctcttgatgaacagtgtgtggttggcaaaatttccaagcactggactggaattttgagagaggcatttacagacgctgataactttggaatccagttccctttagaccttgatgttaaaatgaaagctgtaatgattggtgcctgtttcctcattttgtaagtctgttcttattaatcttgattatagatgctttctctaggttcattctgaaatgattcagtaaagtgtatatttcaaaatgacattttaaaatttatagattttaaatcaggattcccatttaatcctagctctgaaattctatttgatcctgacactctggggtcacaggtgactagtttctacctgaagagtctatgaatattcacatggcaagagggggactaaggagatgtactaaggagagattttagtctccccttaaatcaggcatctcctagatgctttgaggaagaagttgaaagtaggcatatgtggaaaaaatttagtgaaacaaggaaactttaccatgactcatagtaattaaattaaaccatctaatataggagtatgaagtacaataagagtgtacattcactcaagtgtgtagacctaactaccaaattacaggaaataattggatataccagtgattctgaaattgccttcacattagaaccacctagggactttaaaaactccaaggactagtccatacctcagttcaactaaatcagaaact

SEQ ID NO: 302768 - DNA, 785 bp, Homo sapiens
aggagttttgttcattaacttcctgatggcttctagaaatgtcatcaaagaaacatttcatatttatatccttttttgcttaaattttcttttgggtcaattcaaataatttattaatgtctatattaatataaaatagaaattgttaaatatttcaggaaaactttctgaaatataatttctccgtacaatgaaacagtttttttcatatatctataaatagatacaggagcctccagttatctaatgagggttacatatggtgcataattttaataccatatttgtttcatcttacttcaaatttgaaagtacttttgctataagtttcctaaaagtatttaatacttttttttttcaatttagattaaatctcttgatgaacagtgtgtggttggcaaaatttccaagcactggactggaattttgagagaggcatttacagacgctgataactttggaatccagttccctttagaccttgatgttaaaatgaaagctgtaatgattggtgcctgtttcctcatttaggcatatgtggaaaaaatttagtgaaacaaggaaactttaccatgactcatagtaattaaattaaaccatctaatataggagtatgaagtacaataagagtgtacattcactcaagtgtgtagacctaactaccaaattacaggaaataattggatataccagtgattctgaaattgccttcacattagaaccacctagggactttaaaaactccaaggactagtccatacctcagttcaactaaatcagaaact

SEQ ID NO: 302769 - DNA, 886 bp, Homo sapiens
gcaccggacaaacgtctctggagtctctccaatgagcaagaaagcaagtcgggggtaggggaggggcctcacaccagggggtgggcgcagtccctcctccagctccttcaccctccagtagtctcgtgggtccccgagcgccagcgcgggaaccgggaaaaggaaaccgtgttgtgtacgtaagattcaggaaacgaaaccaggagccgcgggtgttggcgcaaaggttactcccagacccttttccggctgacttctgagaaggttgcgcagcagctgtgcccggcagtctagaggcgcagaagaggaagccatcgcctggccccggctctctggaccttgtctcgctcgggagcggaaacagcggcagccagagcataaaatacacaagaggatttttatggaatggctccttgttacaaggtactttgcatttataatcagccacagtcacctcagtttcatcccgtatcttacaagtatgatgtgctgtatactcaaagcctcaccacctgcttgccccacccatttgcttaaatgtatcaattttttctaagcttaacttttaccaaaactggagttcaacagatgaatatttttccttcttagatgttaactaaacatttttaaaggtacaaaatttatgtacaaacataacccaaatgacatggaagttacttgatttgtgacttacctctgtaatgttcccctggcctacttgaaattcctacctttcctctagtctagtatcttattctcagttattcggaggaagttagggacctagaattcttgttttcagagcagtagaattttgctaacataattcaaaacatttatccctatcttggggcttgaagagaatgtgaaatgctttatcttctgt

SEQ ID NO: 302770 - DNA, 450 bp, Homo sapiens
ttatagatagatggcataaccctaaaaaggttgacaattccatttttggtgcagttacaaatcatttcacttgtttgtatttcaggacctccaggatatagtggctaccctgggccccaggtcagctacccacccccaccagccggccattcaggtcctggcccagctggctttcctgtcccaaatcagccagtgtataatcagccagtatataatcagccagttggagctgcaggggtaccatggatgccagcgccacagcctccattaaactgtccacctggattagaatatttaagtcaggtaatttcaaagacacaaaatactcataaaaaacagaactgtgcttccagcttgcttaaccagattagcaaatgaataattcaccaaagtctgaaatagcaaaactgtatttcctgctaacagattactctaattcttctaggtctg

SEQ ID NO: 302771 - DNA, 388 bp, Homo sapiens
tgcctttgttgtatgcctgatacatgtattaactcatttaatccttattgaaagtctgtgatgtataggtgctacatttttcaaaagaagaaactgaggtccagagaggttatatagctcactctggggtgagaacctaaagagtcaagactgtttttttaatcccgaaactttggtactgagcgaagtgctctttagtctcaatactgaataattgccttataatttggaagaaaatttaaataaagtttattgttgagtttcaataagtggccccaaacaaggggttaatattttatgtataatatgactcacctttttattgtaactaataaaactgcatttttatgatgctgcttttgttctttggaagacctaattttataaa

SEQ ID NO: 302772 - DNA, 2222 bp, Homo sapiens
gcaccggacaaacgtctctggagtctctccaatgagcaagaaagcaagtcgggggtaggggaggggcctcacaccagggggtgggcgcagtccctcctccagctccttcaccctccagtagtctcgtgggtccccgagcgccagcgcgggaaccgggaaaaggaaaccgtgttgtgtacgtaagattcaggaaacgaaaccaggagccgcgggtgttggcgcaaaggttactcccagacccttttccggctgacttctgagaaggttgcgcagcagctgtgcccggcagtctagaggcgcagaagaggaagccatcgcctggccccggctctctggaccttgtctcgctcgggagcggaaacagcggcagccagagaactgttttaatcatggacaaacaaaactcacagatgaatgcttctcacccggaaacaaacttgccagttgggtatcctcctcagtatccaccgacagcattccaaggacctccaggatatagtggctaccctgggccccaggtcagctacccacccccaccagccggccattcaggtcctggcccagctggctttcctgtcccaaatcagccagtgtataatcagccagtatataatcagccagttggagctgcaggggtaccatggatgccagcgccacagcctccattaaactgtccacctggattagaatatttaagtcagatagatcagatactgattcatcagcaaattgaacttctggaagttttaacaggttttgaaactaataacaaatatgaaattaagaacagctttggacagagggtttactttgcagcggaagatactgattgctgtacccgaaattgctgtgggccatctagaccttttaccttgaggattattgataatatgggtcaagaagtcataactctggagagaccactaagatgtagcagctgttgttgtccctgctgccttcaggagatagaaatccaagctcctcctggtgtaccaataggttatgttattcagacttggcacccatgtctaccaaagtttacaattcaaaatgagaaaagagaggatgtactaaaaataagtggtccatgtgttgtgtgcagctgttgtggagatgttgattttgagattaaatctcttgatgaacagtgtgtggttggcaaaatttccaagcactggactggaattttgagagaggcatttacagacgctgataactttggaatccagttccctttagaccttgatgttaaaatgaaagctgtaatgattggtgcctgtttcctcattgacttcatgttttttgaaagcactggcagccaggaacaaaaatcaggagtgtggtagtggattagtgaaagtctcctcaggaaatctgaagtctgtatattgattgagactatctaaactcatacctgtatgaattaagctgtaaggcctgtagctctggttgtatacttttgcttttcaaattatagtttatcttctgtataactgatttataaaggtttttgtacattttttaatactcattgtcaatttgagaaaaaggacatatgagtttttgcatttattaatgaaacttcctttgaaaaactgctttgaattatgatctctgattcattgtccattttactaccaaatattaactaaggccttattaatttttatataaattatatcttgtcctattaaatctagttacaatttatttcatgcataagagctaatgttattttgcaaatgccatatattcaaaaaagctcaaagataattttctttactattatgttcaaataatattcaatatgcatattatctttaaaaagttaaatgtttttttaatcttcaagaaatcatgctacacttaacttctcctagaagctaatctataccataatattttcatattcacaagatattaaattaccaattttcaaattattgttagtaaagaacaaaatgattctctcccaaagaaagacacattttaaatactccttcactctaaaactctggtattataacttttgaaagttaatatttctacatgaaatgtttagctcttacactctatccttcctagaaaatggtaattgagattactcagatattaattaaatacaatatcatatatatattcacagagtataaacctaaataatgatctattagattcaaatatttgaaataaaaacttgatttttttgtaaaaaaaatttt

SEQ ID NO: 302773 - DNA, 2059 bp, Homo sapiens
gcaccggacaaacgtctctggagtctctccaatgagcaagaaagcaagtcgggggtaggggaggggcctcacaccagggggtgggcgcagtccctcctccagctccttcaccctccagtagtctcgtgggtccccgagcgccagcgcgggaaccgggaaaaggccgcgggtgttggcgcaaaggttactcccagacccttttccggctgacttctgagaaggttgcgcagcagctgtgcccggcagtctagaggcgcagaagaggaagccatcgcctggccccggctctctggaccttgtctcgctcgggagcggaaacagcggcagccagagaactgttttaatcatggacaaacaaaactcacagatgaatgcttctcacccggaaacaaacttgccagttgggtatcctcctcagtatccaccgacagcattccaaggacctccaggatatagtggctaccctgggccccaggtcagctacccacccccaccagccggccattcaggtcctggcccagctggctttcctgtcccaaatcagccagtgtataatcagccagtatataatcagccagttggagctgcaggggtaccatggatgccagcgccacagcctccattaaactgtccacctggattagaatatttaagtcaggtaatttcaaagacacaaaatactcataaaaaacagaactgtgcttccagcttgcttaaccagattagcaaatgaataattcaccaaagtctgaaatagcaaaactgtatttcctgctaacagattactctaattcttctaggtctggttcaattttaaagcaaaatacaaatgccttagaaaattgtattttctgttatcttaaatacaatctatgataatggccaatagcaaacatttaattagcactgtttcctgcctttgttgtatgcctgatacatgtattaactcatttaatccttattgaaagtctgtgatgtataggtgctacatttttcaaaagaagaaactgaggtccagagaggttatatagctcactctggggtgagaacctaaagagtcaagactgtttttttaatcccgaaactttggtactgagcgaagtgctctttagtctcaatactgaataattgccttataatttggaagaaaatttaaataaagtttattgttgagtttcaataagtggccccaaacaaggggttaatattttatgtataatatgactcacctttttattgtaactaataaaactgcatttttatgatgctgcttttgttctttggaagacctaattttataaatgccattaataaaggagtaaaaagtcctggattttgttgcactaaattataattaatctcagcaataagaggtttaacatttaattggtgttagaaatcaggtaggtcaaatagaaacaagaaactctgtgtgtccagtctatacacatacaaatattcttgtgatattcaaccagttttcatttcataaatcatttctttcttgcactctctttagtaacttaatttcccacaatgtgcttaagtggcataatcataggaatttttggtcattattatattatgcaagaaatacatagaaatagatattttaaaaatcagagtctcataaaatacataaaggatgttatcacatatgacaaaggttgatattaagtatgcttaatacaaatctgaaacttgtaaaaaaaaatctctttgatggctaaaaaagttaccaatatttcttcagcctattctagaaggaagattgttttctaccttttgaattgtttttgacacataataattgtgcatatttatggagtacagtctggcattttaatgcacatgtactacgtgtaatgaaaaataaggataattagcatatctgtcacttttaatatttatcatttcttagtgttgagaacattccaaatcctcccttctagctatttgaaaatatacaataaattattgttaattatagtcagcctacatagctatagaacactagaatttattcctcctatctagctgtaattttgtattcattaac

SEQ ID NO: 302774 - DNA, 6879 bp, Homo sapiens
cgactcgcccgtgctgctgccgccgccgaaggaggggcaaagctcaagatggcggacaaaacgccaggcggatctcagaaggccagttcaaagacgagatcatcagatgttcattcatctggatcttcagatgcacatatggatgcatctggaccctcagatagtgatatgccaagtcggacacgacctaagagcccaagaaaacataattataggaatgaaagtgcccgtgaaagcctttgtgattctcctcatcagaatctctcaagacctcttctggaaaacaaacttaaagcattcagtattggaaaaatgagtacagctaagcgaactttaagtaaaaaggaacaggaagaattaaagaaaaaggaggatgaaaaggcagctgctgagatttatgaggagtttcttgctgcttttgaaggaagtgatggtaataaagtgaaaacatttgtgcgagggggtgttgttaatgcagctaaagaagaacatgaaacagatgaaaaaagaggtaaaatctataagccatcttcaagatttgcagatcaaaaaaatcctccaaatcagtcttccaatgaaagaccaccatctcttcttgtgatagaaaccaaaaaacctccacttaaaaaaggagagaaagaaaagaaaaaaagcaatttggaactcttcaaagaagaattaaagcaaattcaagaggaacgtgatgagagacataaaacaaaaggcagattaagtcgatttgaacctcctcagtcagattctgatggtcagcgtcgttctatggacgcgccttcaagaagaaatagatcatctggtgttcttgatgattacgcacctggctcacatgatgtaggagatccaagcactactaatttataccttggaaacattaatccacagatgaatgaagaaatgctgtgccaagaatttggaagatttggaccgttagccagtgtgaaaatcatgtggcctagaactgatgaagaaagagccagagagagaaattgcggctttgtggcctttatgaatagaagagatgctgaaagagctttaaaaaatttgaatggaaaaatgattatgtcttttgaaatgaagttaggttggggtaaagctgtacctattcctccacatccaatatacattccgccttctatgatggaacatacgcttcccccacctccatccggactgccttttaatgcgcagcctagagagcggttaaaaaaccctaatgctcctatgttaccgccacctaaaaacaaagaggattttgagaagactctgtcgcaagccatagtcaaagtggttatcccaacagaaaggaatttgctcgccctgatacatcgaatgatagagtttgttgtacgtgaagggccaatgtttgaagctatgattatgaacagagaaatcaacaatcctatgttcaggttcttatttgaaaaccagacaccagcccatgtttactataggtggaagctttattctattctgcagggagattctccaactaaatggcggacggaagattttcgtatgttcaaaaatggatctttttggaggccaccaccattaaatccgtacttgcatggaatgtcagaagagcaagaaacagaagcttttgtagaggaacctagtaaaaagggagcacttaaggaagaacagagggataaattggaagaaatcttgcggggattaactccaaggaaaaatgatattggagatgcaatggttttctgtcttaataatgctgaagctgctgaagaaatagtggattgcattactgagtcgttgtccatcttaaagacaccccttcctaaaaagattgccagattatatttggtttctgatgttttgtacaactcttcagccaaagttgctaatgcttcatattatagaaaattttttgaaacaaagttatgtcagatattttcagacctcaatgccacctatcgtacaattcaaggccatttacaatctgaaaactttaagcaacgggtaatgacttgcttcagagcatgggaagattgggcaatttatccagaaccatttttgatcaaactacaaaatattttcttaggacttgtaaatattattgaagaaaaggaaacagaggatgttccagatgaccttgatggtgcccccatcgaggaagagcttgatggtgcacctctggaagatgtagatggaattcctattgatgctactcccatcgatgatcttgatggagtccctataaaaagtcttgatgatgatcttgatggagtgcctttggatgcaactgaagactcaaaaaagaatgagcctatatttaaagttgccccatcaaaatgggaagctgtggatgaatctgaattggaagcacaggctgttacaacttctaaatgggaattatttgaccagcatgaagaatcagaagaagaagaaaatcaaaatcaagaagaagaaagtgaagatgaagaagatactcaaagttccaaatctgaagaacatcatttgtactctaatccaatcaaagaagaaatgactgagtctaagttctctaagtactctgaaatgagtgaggaaaaacgagccaaacttcgtgaaattgagctcaaagttatgaagtttcaggatgaattggaatctgggaaaagacctaaaaaaccaggccagagttttcaggagcaagtagaacactacagagataaacttcttcaacgagagaaagagaaagagttagaaagagaacgagaaagagacaagaaagataaagaaaaattggaatctcgctccaaagacaagaaggaaaaagatgagtgtactccgacaaggaaggaaaggaagaggcgacacagtacatcccccagcccatctcgcagtagcagtggtagacgagtgaaatccccatcaccaaaatcggagcgatcagagcgttcagaaagatctcataaagagagctcacggtccaggtcatctcacaaagattctcctagagatgttagcaaaaaagccaaaagatcaccatctggttcaaggacacctaaaaggtctaggcgatcacggtctagatctcctaaaaaatcaggaaagaagtccagatcccagtccagatctccacacaggtctcataaaaagtcaaagaaaaacaaacactgacgtaaatttttaagatgctgtcacttattggaaatgcgatttgttttgtgcctgaacggtctgttttttaaaaaaacaaaaaatcaaatgaaagagcattcctggggttttttgtttgtttgtgtatgcatgtgtaaactcatgagcaactgcatctgtagatctgtcattgttttatattgtgtaaattactttcattgtggctatttctcaagatgaaatttttattgttctaatggatttcatcagaaatgtgtataatggatctgctgacagtagtagtattttgttttaggatgttgtgacttagcaaaaataatacagatgtcttccccccttttgtagctttgacaatttgaattagatttcaaataaaatctgaacagaaaactataatgttgtttttttgccccaccggtgatattaagtcccttaaagtcctactgagtttcacactactgttgtgcttcttatacctgatgcactttataagccccagtgttcaagtagcttaagttttatatttactaagatgactatccaaattaagggacctgagactcctatttggtggtttgctaaccatttgcttttgataagtttctcttgggtaatactaatacccagatatcaaagactaggtagatatggcatggcgttttgttagtggaatgcctggctaaaacatttttttcacagaagcaatatgatttccatacatccaacccatgttctgagcaactacttacttttagggggaaattaaatatcttttcatttcctcttctattatgaaagaagtttatttgtaaaacaaattttctaacaaggtttggccatagaattctcttgtatgattgttgaccttttataatcttctgtaggctatctttcaaacactggcatcagaatattttttataagtttgtgtttaaacagcttagttggtccccccccccactcccaagagacttgggtttagttatagctttaagtaaaatttaaaaataaaatgtttttcaggaaacttcgtatctaatggtttgtaaattcaaggtgcaaaaagttgatttaaaccatttgcagagttgaactctattatgaaaataaatttgctacggtatgaggaagaaataaaacttgtgtaatgttggtcataatactgctataaatataataaagggttatgtagaattgaactgacactattatttgtgaatcttgatttcagttttttatgtaggcacttcatacactggtttgatgggttttttttttcctccctaaaagagaaagtagaaaactattctaacaatggattattttgatttagcttgctttttaaaaaaatcttttcaacttgttttacttaatcttgcctagtcacaaaataagatgtgcacccatggtttggagagttcctatattagctgagcagtgagatacactatttccaaacggtgcacacctacagtagctttggaaatgagccaatcactgttttacttaatggttcttatcagcatgcaaatattgcttgaaagttatttccttattcactgttttgttagtccattttgttaggaaacattaattcctaaaaatttgttcagaataattaaaagtgaacatttggtgctgatactcaaaaacctacaaatgtagccatttaaaaagtaacatgtttttctcccctgctcattgcctgggagaatggaattttatataactacctttctttgcaaaaataacggtcgtgtcgagttggtggtgattttggcattccatcttgcactggtttctagtataggcttagaaataattggtcaggtaataatctttccagtcaagttgcaagggatgcttatttctcttcaaaaaaagacatcctgcgggattgagtagaaaattttaggtcagttttgggtgcttatttgtaatatttttcctactacattggagtttagcagttctttttttctggatccagatacaagtgtcatggtttatcttacagtgggtgaaactgactttcttttggttgggtgggtgaggatttcttaggcctgatagaatatatattctgtgaagtttgttaatgtacatattagattgtattggatttttttttcttgaattgcaaatggtattattagataggttatttccagttttacttcatgacaaattacctagagtaaacctacttaatactccaatggattctatgaaagtttaatgggatcagaaattggtgacttataagggggaagatattctaccatatttttataatagcttattattcatgtttcttgtctgaaggacactcaagttacagagcaaaatttctataggttgactagaatgttcataagcatggtcttccagttgcaggaaagatcatgttctatctgtggacacttactgtcctctaccacagctacgtgccagagttgttttccacagttcttataaagggcatgacttaggctctttaccctccaacttaatgtttatacacagggattgtttactaggttaatgacatttaactcccctctcttctgtaggtgagagaaaataagtaagtcttgatctgtttcttaccaaagagagacagacctatgatggaaaatgatcacgtctctgaattttttctttaacgttatagttccttattacagatagtaagcatatgggaatttctgagctataacatgttgagaagttagaaattaaaactaacacaacaaaaggcgctgaatcaaaagatctttgcttttatttggctcagaatgtttttggcttttctgctaaagatggcagaaattactctacacagacctgatttttctttattgcagaccattcttgtgggcttaccctgagacttttatcccaattagtgaatcttggagggaatacttgcttatttatgacttaggtatttccccccaaactttaatattcttgagcacttgaaaatacttttgagaaattttaactgtgattaaatttaggtttattagaaatattctgtacacatttgcctccatggtggcgtaagttctgaaaaattatatgaccgtgacaatagtttatcatcatcattattgttattcaaaataagggtaaataaatctctgtattgccaaagtgacttaaactgttctgatgaccacacagtgtgatttctttagcagagaaagttggttttaaaaataaatagtaccacttttctaagactgtacagtttacaaataaggtttttttctttgttgttttcctcttctattaagttttagtgaaaagcctaattacagaaaattgtgcagatactagtgaagatactagtataagtttaaaggaacatgtgactgtaaaatctcacatttacaaagtgcttgatctcttcatatttcacacgcatgttttagaatagattttagggagtgtttaattcattatccttttgacttaaaatttttgttaccaacttcctaggacttagataatatataaataagtacaaatcccaggggaagtgttgtgatgctagactaaaaggtgggaatgtgctgctgttccgtgagccttgttccattgttgaaaatttgatgcctcagtgtttattcagtaccacctcatggagcttcaatgtaaatggattatatgtataattggtaatttgtatagttttgtagattgtagattaaatgcactcatcatgtcacatgt

SEQ ID NO: 302775 - DNA, 6826 bp, Homo sapiens
cgactcgcccgtgctgctgccgccgccgaaggaggggcaaagctcaagatggcggacaaaacgccaggcggatctcagaaggccagttcaaagacgagatcatcagatgttcattcatctggatcttcagatgcacatatggatgcatctggaccctcagatagtgatatgccaagtcggacacgacctaagagcccaagaaaacataattataggaatgaaagtgcccgtgaaagcctttgtgattctcctcatcagaatctctcaagacctcttctggaaaacaaacttaaagcattcagtattggaaaaatgagtacagctaagcgaactttaagtaaaaaggaacaggaagaattaaagaaaaaggaggatgaaaaggcagctgctgagatttatgaggagtttcttgctgcttttgaaggaagtgatggtaataaagtgaaaacatttgtgcgagggggtgttgttaatgcagctaaagaagaacatgaaacagatgaaaaaagaggtaaaatctataagccatcttcaagatttgcagatcaaaaaaatcctccaaatcagtcttccaatgaaagaccaccatctcttcttgtgatagaaaccaaaaaacctccacttaaaaaaggagagaaagaaaagaaaaaaagcaatttggaactcttcaaagaagaattaaagcaaattcaagaggaacgtgatgagagacataaaacaaaaggcagattaagtcgatttgaacctcctcagtcagattctgatggtcagcgtcgttctatggacgcgccttcaagaagaaatagatcatctggtgttcttgatgattacgcacctggctcacatgatgtaggagatccaagcactactaatttataccttggaaacattaatccacagatgaatgaagaaatgctgtgccaagaatttggaagatttggaccgttagccagtgtgaaaatcatgtggcctagaactgatgaagaaagagccagagagagaaattgcggctttgtggcctttatgaatagaagagatgctgaaagagctttaaaaaatttgaatggaaaaatgattatgtcttttgaaatgaagttaggttggggtaaagctgtacctattcctccacatccaatatacattccgccttctatgatggaacatacgcttcccccacctccatccggactgccttttaatgcgcagcctagagagcggttaaaaaaccctaatgctcctatgttaccgccacctaaaaacaaagaggattttgagaagactctgtcgcaagccatagtcaaagtggttatcccaacagaaaggaatttgctcgccctgatacatcgaatgatagagtttgttgtacgtgaagggccaatgtttgaagctatgattatgaacagagaaatcaacaatcctatgttcaggttcttatttgaaaaccagacaccagcccatgtttactataggtggaagctttattctattctgcagggagattctccaactaaatggcggacggaagattttcgtatgttcaaaaatggatctttttggaggccaccaccattaaatccgtacttgcatggaatgtcagaagagcaagaaacagaagcttttgtagaggaacctagtaaaaagggagcacttaaggaagaacagagggataaattggaagaaatcttgcggggattaactccaaggaaaaatgatattggagatgcaatggttttctgtcttaataatgctgaagctgctgaagaaatagtggattgcattactgagtcgttgtccatcttaaagacaccccttcctaaaaagattgccagattatatttggtttctgatgttttgtacaactcttcagccaaagttgctaatgcttcatattatagaaaattttttgaaacaaagttatgtcagatattttcagacctcaatgccacctatcgtacaattcaaggccatttacaatctgaaaactttaagcaacgggtaatgacttgcttcagagcatgggaagattgggcaatttatccagaaccatttttgatcaaactacaaaatattttcttaggacttgtaaatattattgaagaaaaggaaacagaggatgttccagatgaccttgatggtgcccccatcgaggaagagcttgatggtgcacctctggaagatgtagatggaattcctattgatgctactcccatcgatgatcttgatggagtccctataaaaagtcttgatgatgatcttgatggagtgcctttggatgcaactgaagactcaaaaaagaatgagcctatatttaaagttgccccatcaaaatgggaagctgtggatgaatctgaattggaagcacaggctgttacaacttctaaatgggaattatttgaccagcatgaagaatcagaagaagaagaaaatcaaaatcaagaagaagaaagtgaagatgaagaagatactcaaagttccaaatctgaagaacatcatttgtactctaatccaatcaaagaagaaatgactgagtctaagttctctaagtactctgaaatgagtgaggaaaaacgagccaaacttcgtgaaattgagctcaaagttatgaagtttcaggatgaattggaatctgggaaaagacctaaaaaaccaggccagagttttcaggagcaagtagaacactacagagataaacttcttcaacgagagaaagagaaagagttagaaagagaacgagaaagagacaagaaagataaagaaaaattggaatctcgctccaaagacaagaaggaaaaagatgagtgtactccgacaaggaaggaaaggaagaggcgacacagtacatcccccagcccatctcgcagtagcagtggtagacgagtgaaatccccatcaccaaaatcggagcgatcagagcgttcagaaagatctcataaagagagctcacggtccaggtcatctcacaaagattctcctagagatgttagcaaaaaagccaaaagatcaccatctggttcaaggacacctaaaaggtctaggcgatcacggtctagatctcctaaaaaatcaggaaagaagtccagatcccagtccagatctccacacaggtctcataaaaagtcaaagaaaaacaaacactgacgtaaatttttaagatgctgtcacttattggaaatgcgatttgttttgtgcctgaacggtctgttttttaaaaaaacaaaaaatcaaatgaaagagcattcctggggttttttgtttgtttgtgtatgcatgtgtaaactcatgagcaactgcatctgtagatctgtcattgttttatattgtgtaaattactttcattgtggctatttctcaagatgaaatttttattgttctaatggatttcatcagaaatgtgtataatggatctgctgacagtagtagtattttgttttaggatgttgtgacttagcaaaaataatacagatgtcttccccccttttgtagctttgacaatttgaattagatttcaaataaaatctgaacagaaaactataatgttgtttttttgccccaccggtgatattaagtcccttaaagtcctactgagtttcacactactgttgtgcttcttatacctgatgcactttataagccccagtgttcaagtagcttaagttttatatttactaagatgactatccaaattaagggacctgagactcctatttggtggtttgctaaccatttgcttttgataagtttctcttgggtaatactaatacccagatatcaaagactaggtagatatggcatggcgttttgttagtggaatgcctggctaaaacatttttttcacagaagcaatatgatttccatacatccaacccatgttctgagcaactacttacttttagggggaaattaaatatcttttcatttcctcttctattatgaaagaagtttatttgtaaaacaaattttctaacaaggtttggccatagaattctcttgtatgattgttgaccttttataatcttctgtaggctatctttcaaacactggcatcagaatattttttataagtttgtgtttaaacagcttagttggtccccccccccactcccaagagacttgggtttagttatagctttaagtaaaatttaaaaataaaatgtttttcaggaaacttcgtatctaatggtttgtaaattcaaggtgcaaaaagttgatttaaaccatttgcagagttgaactctattatgaaaataaatttgctacggtatgaggaagaaataaaacttgtgtaatgttggtcataatactgctataaatataataaagggttatgtagaattgaactgacactattatttgtgaatcttgatttcagttttttatgtaggcacttcatacactggtttgatgggttttttttttcctccctaaaagagaaagtagaaaactattctaacaatggattattttgatttagcttgctttttaaaaaaatcttttcaacttgttttacttaatcttgcctagtcacaaaataagatgtgcacccatggtttggagagttcctatattagctgagcagtgagatacactatttccaaacggtgcacacctacagtagctttggaaatgagccaatcactgttttacttaatggttcttatcagcatgcaaatattgcttgaaagttatttccttattcactgttttgttagtccattttgttaggaaacattaattcctaaaaatttgttcagaataattaaaagtgaacatttggtgctgatactcaaaaacctacaaatgtagccatttaaaaagtaacatgtttttctcccctgctcattgcctgggagaatggaattttatataactacctttctttgcaaaaataacggtcgtgtcgagttggtggtgattttggcattccatcttgcactggtttctagtataggcttagaaataattggtcaggtaataatctttccagtcaagttgcaagggatgcttatttctcttcaaaaaaagacatcctgcgggattgagtagaaaattttaggtcagttttgggtgcttatttgtaatatttttcctactacattggagtttagcagttctttttttctggatccagatacaagtgtcatggtttatcttacagtgggtgaaactgactttcttttggttgggtgggtgaggatttcttaggcctgatagaatatatattctgtgaagtttgttaatgtacatattagattgtattggatttttttttcttgaattgcaaatggtattattagataggttatttccagttttacttcatgacaaattacctagagtaaacctacttaatactccaatggattctatgaaagtttaatgggatcagaaattggtgacttataagggggaagatattctaccatatttttataatagcttattattcatgtttcttgtctgaaggacactcaagttacagagcaaaatttctataggttgactagaatgttcataagcatggtcttccagttgcaggaaagatcatgttctatctgtggacacttactgtcctctaccacagctacgtgccagagttgttttccacagttcttataaagggcatgacttaggctctttaccctccaacttaatgtttatacacagggattgtttactaggttaatgacatttaactcccctctcttctgtaggtgagagaaaataagtaagtcttgatctgtttcttaccaaagagagacagacctatgatggaaaatgatcacgtctctgaattttttctttaacgttatagttccttattacagatagtaagcatatgggaatttctgagctataacatgttgagaagttagaaattaaaactaacacaacaaaaggcgctgaatcaaaagatctttgcttttatttggctcagaatgtttttggcttttctgctaaagatggcagaaattactctacacagacctgatttttctttattgcagaccattcttgtgggcttaccctgagacttttatcccaattagtgaatcttggagggaatacttgcttatttatgacttaggtatttccccccaaactttaatattcttgagcacttgaaaatacttttgagaaattttaactgtgattaaatttaggtttattagaaatattctgtacacatttgcctccatggtggcgtaagttctgaaaaattatatgaccgtgacaatagtttatcatcatcattattgttattcaaaataagggtaaataaatctctgtattgccaaagtgacttaaactgttctgatgaccacacagtgtgatttctttagcagagaaagttggtttttttctttgttgttttcctcttctattaagttttagtgaaaagcctaattacagaaaattgtgcagatactagtgaagatactagtataagtttaaaggaacatgtgactgtaaaatctcacatttacaaagtgcttgatctcttcatatttcacacgcatgttttagaatagattttagggagtgtttaattcattatccttttgacttaaaatttttgttaccaacttcctaggacttagataatatataaataagtacaaatcccaggggaagtgttgtgatgctagactaaaaggtgggaatgtgctgctgttccgtgagccttgttccattgttgaaaatttgatgcctcagtgtttattcagtaccacctcatggagcttcaatgtaaatggattatatgtataattggtaatttgtatagttttgtagattgtagattaaatgcactcatcatgtcacatgt

SEQ ID NO: 302776 - DNA, 2179 bp, Homo sapiens
gcaccggacaaacgtctctggagtctctccaatgagcaagaaagcaagtcgggggtaggggaggggcctcacaccagggggtgggcgcagtccctcctccagctccttcaccctccagtagtctcgtgggtccccgagcgccagcgcgggaaccgggaaaaggccgcgggtgttggcgcaaaggttactcccagacccttttccggctgacttctgagaaggttgcgcagcagctgtgcccggcagtctagaggcgcagaagaggaagccatcgcctggccccggctctctggaccttgtctcgctcgggagcggaaacagcggcagccagagaactgttttaatcatggacaaacaaaactcacagatgaatgcttctcacccggaaacaaacttgccagttgggtatcctcctcagtatccaccgacagcattccaaggacctccaggatatagtggctaccctgggccccaggtcagctacccacccccaccagccggccattcaggtcctggcccagctggctttcctgtcccaaatcagccagtgtataatcagccagtatataatcagccagttggagctgcaggggtaccatggatgccagcgccacagcctccattaaactgtccacctggattagaatatttaagtcagatagatcagatactgattcatcagcaaattgaacttctggaagttttaacaggttttgaaactaataacaaatatgaaattaagaacagctttggacagagggtttactttgcagcggaagatactgattgctgtacccgaaattgctgtgggccatctagaccttttaccttgaggattattgataatatgggtcaagaagtcataactctggagagaccactaagatgtagcagctgttgttgtccctgctgccttcaggagatagaaatccaagctcctcctggtgtaccaataggttatgttattcagacttggcacccatgtctaccaaagtttacaattcaaaatgagaaaagagaggatgtactaaaaataagtggtccatgtgttgtgtgcagctgttgtggagatgttgattttgagattaaatctcttgatgaacagtgtgtggttggcaaaatttccaagcactggactggaattttgagagaggcatttacagacgctgataactttggaatccagttccctttagaccttgatgttaaaatgaaagctgtaatgattggtgcctgtttcctcattgacttcatgttttttgaaagcactggcagccaggaacaaaaatcaggagtgtggtagtggattagtgaaagtctcctcaggaaatctgaagtctgtatattgattgagactatctaaactcatacctgtatgaattaagctgtaaggcctgtagctctggttgtatacttttgcttttcaaattatagtttatcttctgtataactgatttataaaggtttttgtacattttttaatactcattgtcaatttgagaaaaaggacatatgagtttttgcatttattaatgaaacttcctttgaaaaactgctttgaattatgatctctgattcattgtccattttactaccaaatattaactaaggccttattaatttttatataaattatatcttgtcctattaaatctagttacaatttatttcatgcataagagctaatgttattttgcaaatgccatatattcaaaaaagctcaaagataattttctttactattatgttcaaataatattcaatatgcatattatctttaaaaagttaaatgtttttttaatcttcaagaaatcatgctacacttaacttctcctagaagctaatctataccataatattttcatattcacaagatattaaattaccaattttcaaattattgttagtaaagaacaaaatgattctctcccaaagaaagacacattttaaatactccttcactctaaaactctggtattataacttttgaaagttaatatttctacatgaaatgtttagctcttacactctatccttcctagaaaatggtaattgagattactcagatattaattaaatacaatatcatatatatattcacagagtataaacctaaataatgatctattagattcaaatatttgaaataaaaacttgatttttttgtaaaaaaaatttt

SEQ ID NO: 302777 - DNA, 1913 bp, Homo sapiens
cgactcgcccgtgctgctgccgccgccgaaggaggggcaaagctcaagatggcggacaaaacgccaggcggatctcagaaggccagttcaaagactcacagatgaatgcttctcacccggaaacaaacttgccagttgggtatcctcctcagtatccaccgacagcattccaaggacctccaggatatagtggctaccctgggccccaggtcagctacccacccccaccagccggccattcaggtcctggcccagctggctttcctgtcccaaatcagccagtgtataatcagccagtatataatcagccagttggagctgcaggggtaccatggatgccagcgccacagcctccattaaactgtccacctggattagaatatttaagtcagatagatcagatactgattcatcagcaaattgaacttctggaagttttaacaggttttgaaactaataacaaatatgaaattaagaacagctttggacagagggtttactttgcagcggaagatactgattgctgtacccgaaattgctgtgggccatctagaccttttaccttgaggattattgataatatgggtcaagaagtcataactctggagagaccactaagatgtagcagctgttgttgtccctgctgccttcaggagatagaaatccaagctcctcctggtgtaccaataggttatgttattcagacttggcacccatgtctaccaaagtttacaattcaaaatgagaaaagagaggatgtactaaaaataagtggtccatgtgttgtgtgcagctgttgtggagatgttgattttgagattaaatctcttgatgaacagtgtgtggttggcaaaatttccaagcactggactggaattttgagagaggcatttacagacgctgataactttggaatccagttccctttagaccttgatgttaaaatgaaagctgtaatgattggtgcctgtttcctcattgacttcatgttttttgaaagcactggcagccaggaacaaaaatcaggagtgtggtagtggattagtgaaagtctcctcaggaaatctgaagtctgtatattgattgagactatctaaactcatacctgtatgaattaagctgtaaggcctgtagctctggttgtatacttttgcttttcaaattatagtttatcttctgtataactgatttataaaggtttttgtacattttttaatactcattgtcaatttgagaaaaaggacatatgagtttttgcatttattaatgaaacttcctttgaaaaactgctttgaattatgatctctgattcattgtccattttactaccaaatattaactaaggccttattaatttttatataaattatatcttgtcctattaaatctagttacaatttatttcatgcataagagctaatgttattttgcaaatgccatatattcaaaaaagctcaaagataattttctttactattatgttcaaataatattcaatatgcatattatctttaaaaagttaaatgtttttttaatcttcaagaaatcatgctacacttaacttctcctagaagctaatctataccataatattttcatattcacaagatattaaattaccaattttcaaattattgttagtaaagaacaaaatgattctctcccaaagaaagacacattttaaatactccttcactctaaaactctggtattataacttttgaaagttaatatttctacatgaaatgtttagctcttacactctatccttcctagaaaatggtaattgagattactcagatattaattaaatacaatatcatatatatattcacagagtataaacctaaataatgatctattagattcaaatatttgaaataaaaacttgatttttttgtaaaaaaaatttt

SEQ ID NO: 302778 - DNA, 6808 bp, Homo sapiens
cactactaatttataccttggaaacattaatccacagatgaatgaagaaatgctgtgccaagaatttggaagatttggaccgttagccagtgtgaaaatcatgtggcctagaactgatgaagagagagccagagagagaaattgcggctttgtggcctttatgaatagaagagattctcctcatcagaatctctcaagacctcttctggaaaacaaacttaaagcattcagtattggaaaaatgagtacagctaagcgaactttaagtaaaaaggaacaggaagaattaaagaaaaaggaggatgaaaaggcagctgctgagatttatgaggagtttcttgctgcttttgaaggaagtgatggtaataaagtgaaaacatttgtgcgagggggtgttgttaatgcagctaaagaagaacatgaaacagatgaaaaaagaggtaaaatctataagccatcttcaagatttgcagatcaaaaaaatcctccaaatcagtcttccaatgaaagaccaccatctcttcttgtgatagaaaccaaaaaacctccacttaaaaaaggagagaaagaaaagaaaaaaagcaatttggaactcttcaaagaagaattaaagcaaattcaagaggaacgtgatgagagacataaaacaaaaggcagattaagtcgatttgaacctcctcagtcagattctgatggtcagcgtcgttctatggacgcgccttcaagaagaaatagatcatctggtgttcttgatgattacgcacctggctcacatgatgtaggagatccaagcactactaatttataccttggaaacattaatccacagatgaatgaagaaatgctgtgccaagaatttggaagatttggaccgttagccagtgtgaaaatcatgtggcctagaactgatgaagaaagagccagagagagaaattgcggctttgtggcctttatgaatagaagagatgctgaaagagctttaaaaaatttgaatggaaaaatgattatgtcttttgaaatgaagttaggttggggtaaagctgtacctattcctccacatccaatatacattccgccttctatgatggaacatacgcttcccccacctccatccggactgccttttaatgcgcagcctagagagcggttaaaaaaccctaatgctcctatgttaccgccacctaaaaacaaagaggattttgagaagactctgtcgcaagccatagtcaaagtggttatcccaacagaaaggaatttgctcgccctgatacatcgaatgatagagtttgttgtacgtgaagggccaatgtttgaagctatgattatgaacagagaaatcaacaatcctatgttcaggttcttatttgaaaaccagacaccagcccatgtttactataggtggaagctttattctattctgcagggagattctccaactaaatggcggacggaagattttcgtatgttcaaaaatggatctttttggaggccaccaccattaaatccgtacttgcatggaatgtcagaagagcaagaaacagaagcttttgtagaggaacctagtaaaaagggagcacttaaggaagaacagagggataaattggaagaaatcttgcggggattaactccaaggaaaaatgatattggagatgcaatggttttctgtcttaataatgctgaagctgctgaagaaatagtggattgcattactgagtcgttgtccatcttaaagacaccccttcctaaaaagattgccagattatatttggtttctgatgttttgtacaactcttcagccaaagttgctaatgcttcatattatagaaaattttttgaaacaaagttatgtcagatattttcagacctcaatgccacctatcgtacaattcaaggccatttacaatctgaaaactttaagcaacgggtaatgacttgcttcagagcatgggaagattgggcaatttatccagaaccatttttgatcaaactacaaaatattttcttaggacttgtaaatattattgaagaaaaggaaacagaggatgttccagatgaccttgatggtgcccccatcgaggaagagcttgatggtgcacctctggaagatgtagatggaattcctattgatgctactcccatcgatgatcttgatggagtccctataaaaagtcttgatgatgatcttgatggagtgcctttggatgcaactgaagactcaaaaaagaatgagcctatatttaaagttgccccatcaaaatgggaagctgtggatgaatctgaattggaagcacaggctgttacaacttctaaatgggaattatttgaccagcatgaagaatcagaagaagaagaaaatcaaaatcaagaagaagaaagtgaagatgaagaagatactcaaagttccaaatctgaagaacatcatttgtactctaatccaatcaaagaagaaatgactgagtctaagttctctaagtactctgaaatgagtgaggaaaaacgagccaaacttcgtgaaattgagctcaaagttatgaagtttcaggatgaattggaatctgggaaaagacctaaaaaaccaggccagagttttcaggagcaagtagaacactacagagataaacttcttcaacgagagaaagagaaagagttagaaagagaacgagaaagagacaagaaagataaagaaaaattggaatctcgctccaaagacaagaaggaaaaagatgagtgtactccgacaaggaaggaaaggaagaggcgacacagtacatcccccagcccatctcgcagtagcagtggtagacgagtgaaatccccatcaccaaaatcggagcgatcagagcgttcagaaagatctcataaagagagctcacggtccaggtcatctcacaaagattctcctagagatgttagcaaaaaagccaaaagatcaccatctggttcaaggacacctaaaaggtctaggcgatcacggtctagatctcctaaaaaatcaggaaagaagtccagatcccagtccagatctccacacaggtctcataaaaagtcaaagaaaaacaaacactgacgtaaatttttaagatgctgtcacttattggaaatgcgatttgttttgtgcctgaacggtctgttttttaaaaaaacaaaaaatcaaatgaaagagcattcctggggttttttgtttgtttgtgtatgcatgtgtaaactcatgagcaactgcatctgtagatctgtcattgttttatattgtgtaaattactttcattgtggctatttctcaagatgaaatttttattgttctaatggatttcatcagaaatgtgtataatggatctgctgacagtagtagtattttgttttaggatgttgtgacttagcaaaaataatacagatgtcttccccccttttgtagctttgacaatttgaattagatttcaaataaaatctgaacagaaaactataatgttgtttttttgccccaccggtgatattaagtcccttaaagtcctactgagtttcacactactgttgtgcttcttatacctgatgcactttataagccccagtgttcaagtagcttaagttttatatttactaagatgactatccaaattaagggacctgagactcctatttggtggtttgctaaccatttgcttttgataagtttctcttgggtaatactaatacccagatatcaaagactaggtagatatggcatggcgttttgttagtggaatgcctggctaaaacatttttttcacagaagcaatatgatttccatacatccaacccatgttctgagcaactacttacttttagggggaaattaaatatcttttcatttcctcttctattatgaaagaagtttatttgtaaaacaaattttctaacaaggtttggccatagaattctcttgtatgattgttgaccttttataatcttctgtaggctatctttcaaacactggcatcagaatattttttataagtttgtgtttaaacagcttagttggtccccccccccactcccaagagacttgggtttagttatagctttaagtaaaatttaaaaataaaatgtttttcaggaaacttcgtatctaatggtttgtaaattcaaggtgcaaaaagttgatttaaaccatttgcagagttgaactctattatgaaaataaatttgctacggtatgaggaagaaataaaacttgtgtaatgttggtcataatactgctataaatataataaagggttatgtagaattgaactgacactattatttgtgaatcttgatttcagttttttatgtaggcacttcatacactggtttgatgggttttttttttcctccctaaaagagaaagtagaaaactattctaacaatggattattttgatttagcttgctttttaaaaaaatcttttcaacttgttttacttaatcttgcctagtcacaaaataagatgtgcacccatggtttggagagttcctatattagctgagcagtgagatacactatttccaaacggtgcacacctacagtagctttggaaatgagccaatcactgttttacttaatggttcttatcagcatgcaaatattgcttgaaagttatttccttattcactgttttgttagtccattttgttaggaaacattaattcctaaaaatttgttcagaataattaaaagtgaacatttggtgctgatactcaaaaacctacaaatgtagccatttaaaaagtaacatgtttttctcccctgctcattgcctgggagaatggaattttatataactacctttctttgcaaaaataacggtcgtgtcgagttggtggtgattttggcattccatcttgcactggtttctagtataggcttagaaataattggtcaggtaataatctttccagtcaagttgcaagggatgcttatttctcttcaaaaaaagacatcctgcgggattgagtagaaaattttaggtcagttttgggtgcttatttgtaatatttttcctactacattggagtttagcagttctttttttctggatccagatacaagtgtcatggtttatcttacagtgggtgaaactgactttcttttggttgggtgggtgaggatttcttaggcctgatagaatatatattctgtgaagtttgttaatgtacatattagattgtattggatttttttttcttgaattgcaaatggtattattagataggttatttccagttttacttcatgacaaattacctagagtaaacctacttaatactccaatggattctatgaaagtttaatgggatcagaaattggtgacttataagggggaagatattctaccatatttttataatagcttattattcatgtttcttgtctgaaggacactcaagttacagagcaaaatttctataggttgactagaatgttcataagcatggtcttccagttgcaggaaagatcatgttctatctgtggacacttactgtcctctaccacagctacgtgccagagttgttttccacagttcttataaagggcatgacttaggctctttaccctccaacttaatgtttatacacagggattgtttactaggttaatgacatttaactcccctctcttctgtaggtgagagaaaataagtaagtcttgatctgtttcttaccaaagagagacagacctatgatggaaaatgatcacgtctctgaattttttctttaacgttatagttccttattacagatagtaagcatatgggaatttctgagctataacatgttgagaagttagaaattaaaactaacacaacaaaaggcgctgaatcaaaagatctttgcttttatttggctcagaatgtttttggcttttctgctaaagatggcagaaattactctacacagacctgatttttctttattgcagaccattcttgtgggcttaccctgagacttttatcccaattagtgaatcttggagggaatacttgcttatttatgacttaggtatttccccccaaactttaatattcttgagcacttgaaaatacttttgagaaattttaactgtgattaaatttaggtttattagaaatattctgtacacatttgcctccatggtggcgtaagttctgaaaaattatatgaccgtgacaatagtttatcatcatcattattgttattcaaaataagggtaaataaatctctgtattgccaaagtgacttaaactgttctgatgaccacacagtgtgatttctttagcagagaaagttggttttaaaaataaatagtaccacttttctaagactgtacagtttacaaataaggtttttttctttgttgttttcctcttctattaagttttagtgaaaagcctaattacagaaaattgtgcagatactagtgaagatactagtataagtttaaaggaacatgtgactgtaaaatctcacatttacaaagtgcttgatctcttcatatttcacacgcatgttttagaatagattttagggagtgtttaattcattatccttttgacttaaaatttttgttaccaacttcctaggacttagataatatataaataagtacaaatcccaggggaagtgttgtgatgctagactaaaaggtgggaatgtgctgctgttccgtgagccttgttccattgttgaaaatttgatgcctcagtgtttattcagtaccacctcatggagcttcaatgtaaatggattatatgtataattggtaatttgtatagttttgtagattgtagattaaatgcactcatcatgtcacatgt

SEQ ID NO: 302779 - DNA, 2004 bp, Homo sapiens
gcaccggacaaacgtctctggagtctctccaatgagcaagaaagcaagtcgggggtaggggaggggcctcacaccagggggtgggcgcagtccctcctccagctccttcaccctccagtagtctcgtgggtccccgagcgccagcgcgggaaccgggaaaaggaaaccgtgttgtgtacgtaagattcaggaaacgaaaccaggagccgcgggtgttggcgcaaaggttactcccagacccttttccggctgacttctgagaaggttgcgcagcagctgtgcccggcagtctagaggcgcagaagaggaagccatcgcctggccccggctctctggaccttgtctcgctcgggagcggaaacagcggcagccagagaactgttttaatcatggacaaacaaaactcacagatgaatgcttctcacccggaaacaaacttgccagttgggtatcctcctcagtatccaccgacagcattccaagatagatcagatactgattcatcagcaaattgaacttctggaagttttaacaggttttgaaactaataacaaatatgaaattaagaacagctttggacagagggtttactttgcagcggaagatactgattgctgtacccgaaattgctgtgggccatctagaccttttaccttgaggattattgataatatgggtcaagaagtcataactctggagagaccactaagatgtagcagctgttgttgtccctgctgccttcaggagatagaaatccaagctcctcctggtgtaccaataggttatgttattcagacttggcacccatgtctaccaaagtttacaattcaaaatgagaaaagagaggatgtactaaaaataagtggtccatgtgttgtgtgcagctgttgtggagatgttgattttgagattaaatctcttgatgaacagtgtgtggttggcaaaatttccaagcactggactggaattttgagagaggcatttacagacgctgataactttggaatccagttccctttagaccttgatgttaaaatgaaagctgtaatgattggtgcctgtttcctcattgacttcatgttttttgaaagcactggcagccaggaacaaaaatcaggagtgtggtagtggattagtgaaagtctcctcaggaaatctgaagtctgtatattgattgagactatctaaactcatacctgtatgaattaagctgtaaggcctgtagctctggttgtatacttttgcttttcaaattatagtttatcttctgtataactgatttataaaggtttttgtacattttttaatactcattgtcaatttgagaaaaaggacatatgagtttttgcatttattaatgaaacttcctttgaaaaactgctttgaattatgatctctgattcattgtccattttactaccaaatattaactaaggccttattaatttttatataaattatatcttgtcctattaaatctagttacaatttatttcatgcataagagctaatgttattttgcaaatgccatatattcaaaaaagctcaaagataattttctttactattatgttcaaataatattcaatatgcatattatctttaaaaagttaaatgtttttttaatcttcaagaaatcatgctacacttaacttctcctagaagctaatctataccataatattttcatattcacaagatattaaattaccaattttcaaattattgttagtaaagaacaaaatgattctctcccaaagaaagacacattttaaatactccttcactctaaaactctggtattataacttttgaaagttaatatttctacatgaaatgtttagctcttacactctatccttcctagaaaatggtaattgagattactcagatattaattaaatacaatatcatatatatattcacagagtataaacctaaataatgatctattagattcaaatatttgaaataaaaacttgatttttttgtaaaaaaaatttt

SEQ ID NO: 302780 - DNA, 6836 bp, Homo sapiens
cgactcgcccgtgctgctgccgccgccgaaggaggggcaaagctcaagatggcggacaaaacgccaggcggatctcagaaggccagttcaaagacgagatcatcagatgttcattcatctggatcttcagatgcacatatggatgcatctggaccctcagatagtgatatgccaagtcggacacgacctaagagcccaagaaaacataattataggaatgaaagtgcccgtgaaagcctttgtgattctcctcatcagaatctctcaagacctcttctggaaaacaaacttaaagcattcagtattggaaaaatgagtacagctaagcgaactttaagtaaaaaggaacaggaagaattaaagaaaaaggaggatgaaaaggcagctgctgagatttatgaggagtttcttgctgcttttgaaggaagtgatggtaataaagtgaaaacatttgtgcgagggggtgttgttaatgcagctaaagaagaacatgaaacagatgaaaaaagaggtaaaatctataagccatcttcaagatttgcagatcaaaaaaatcctccaaatcagtcttccaatgaaagaccaccatctcttcttgtgatagaaaccaaaaaacctccacttaaaaaaggagagaaagaaaagaaaaaaagcaatttggaactcttcaaagaagaattaaagcaaattcaagaggaacgtgatgagagacataaaacaaaaggcagattaagtcgatttgaacctcctcagtcagattctgatggtcagcgtcgttctatggacgcgccttcaagaagaaatagatcatctggtgttcttgatgattacgcacctggctcacatgatgtaggagatccaagcactactaatttataccttggaaacattaatccacagatgaatgaagaaatgctgtgccaagaatttggaagatttggaccgttagccagtgtgaaaatcatgtggcctagaactgatgaagaaagagccagagagagaaattgcggctttgtggcctttatgaatagaagagatgctgaaagagctttaaaaaatttgaatggaaaaatgattatgtcttttgaaatgaagttaggttggggtaaagctgtacctattcctccacatccaatatacattccgccttctatgatggaacatacgcttcccccacctccatccggactgccttttaatgcgcagcctagagagcggttaaaaaaccctaatgctcctatgttaccgccacctaaaaacaaagaggattttgagaagactctgtcgcaagccatagtcaaagtggttatcccaacagaaaggaatttgctcgccctgatacatcgaatgatagagtttgttgtacgtgaagggccaatgtttgaagctatgattatgaacagagaaatcaacaatcctatgttcaggttcttatttgaaaaccagacaccagcccatgtttactataggtggaagctttattctattctgcagggagattctccaactaaatggcggacggaagattttcgtatgttcaaaaatggatctttttggaggccaccaccattaaatccgtacttgcatggaatgtcagaagagcaagaaacagaagcttttgtagaggaacctagtaaaaagggagcacttaaggaagaacagagggataaattggaagaaatcttgcggggattaactccaaggaaaaatgatattggagatgcaatggttttctgtcttaataatgctgaagctgctgaagaaatagtggattgcattactgagtcgttgtccatcttaaagacaccccttcctaaaaagattgccagattatatttggtttctgatgttttgtacaactcttcagccaaagttgctaatgcttcatattatagaaaattttttgaaacaaagttatgtcagatattttcagacctcaatgccacctatcgtacaattcaaggccatttacaatctgaaaactttaagcaacgggtaatgacttgcttcagagcatgggaagattgggcaatttatccagaaccatttttgatcaaactacaaaatattttcttaggacttgtaaatattattgaagaaaaggaaacagaggatgttccagatgaccttgatggtgcccccatcgaggaagagcttgatggtgcacctctggaagatgtagatggaattcctattgatgctactcccatcgatgatcttgatggagtccctataaaaagtcttgatgatgatcttgatggagtgcctttggatgcaactgaagactcaaaaaagaatgagcctatatttaaagttgccccactgttacaacttctaaatgggaattatttgaccagcatgaagaatcagaagaagaagaaaatcaaaatcaagaagaagaaagtgaagatgaagaagatactcaaagttccaaatctgaagaacatcatttgtactctaatccaatcaaagaagaaatgactgagtctaagttctctaagtactctgaaatgagtgaggaaaaacgagccaaacttcgtgaaattgagctcaaagttatgaagtttcaggatgaattggaatctgggaaaagacctaaaaaaccaggccagagttttcaggagcaagtagaacactacagagataaacttcttcaacgagagaaagagaaagagttagaaagagaacgagaaagagacaagaaagataaagaaaaattggaatctcgctccaaagacaagaaggaaaaagatgagtgtactccgacaaggaaggaaaggaagaggcgacacagtacatcccccagcccatctcgcagtagcagtggtagacgagtgaaatccccatcaccaaaatcggagcgatcagagcgttcagaaagatctcataaagagagctcacggtccaggtcatctcacaaagattctcctagagatgttagcaaaaaagccaaaagatcaccatctggttcaaggacacctaaaaggtctaggcgatcacggtctagatctcctaaaaaatcaggaaagaagtccagatcccagtccagatctccacacaggtctcataaaaagtcaaagaaaaacaaacactgacgtaaatttttaagatgctgtcacttattggaaatgcgatttgttttgtgcctgaacggtctgttttttaaaaaaacaaaaaatcaaatgaaagagcattcctggggttttttgtttgtttgtgtatgcatgtgtaaactcatgagcaactgcatctgtagatctgtcattgttttatattgtgtaaattactttcattgtggctatttctcaagatgaaatttttattgttctaatggatttcatcagaaatgtgtataatggatctgctgacagtagtagtattttgttttaggatgttgtgacttagcaaaaataatacagatgtcttccccccttttgtagctttgacaatttgaattagatttcaaataaaatctgaacagaaaactataatgttgtttttttgccccaccggtgatattaagtcccttaaagtcctactgagtttcacactactgttgtgcttcttatacctgatgcactttataagccccagtgttcaagtagcttaagttttatatttactaagatgactatccaaattaagggacctgagactcctatttggtggtttgctaaccatttgcttttgataagtttctcttgggtaatactaatacccagatatcaaagactaggtagatatggcatggcgttttgttagtggaatgcctggctaaaacatttttttcacagaagcaatatgatttccatacatccaacccatgttctgagcaactacttacttttagggggaaattaaatatcttttcatttcctcttctattatgaaagaagtttatttgtaaaacaaattttctaacaaggtttggccatagaattctcttgtatgattgttgaccttttataatcttctgtaggctatctttcaaacactggcatcagaatattttttataagtttgtgtttaaacagcttagttggtccccccccccactcccaagagacttgggtttagttatagctttaagtaaaatttaaaaataaaatgtttttcaggaaacttcgtatctaatggtttgtaaattcaaggtgcaaaaagttgatttaaaccatttgcagagttgaactctattatgaaaataaatttgctacggtatgaggaagaaataaaacttgtgtaatgttggtcataatactgctataaatataataaagggttatgtagaattgaactgacactattatttgtgaatcttgatttcagttttttatgtaggcacttcatacactggtttgatgggttttttttttcctccctaaaagagaaagtagaaaactattctaacaatggattattttgatttagcttgctttttaaaaaaatcttttcaacttgttttacttaatcttgcctagtcacaaaataagatgtgcacccatggtttggagagttcctatattagctgagcagtgagatacactatttccaaacggtgcacacctacagtagctttggaaatgagccaatcactgttttacttaatggttcttatcagcatgcaaatattgcttgaaagttatttccttattcactgttttgttagtccattttgttaggaaacattaattcctaaaaatttgttcagaataattaaaagtgaacatttggtgctgatactcaaaaacctacaaatgtagccatttaaaaagtaacatgtttttctcccctgctcattgcctgggagaatggaattttatataactacctttctttgcaaaaataacggtcgtgtcgagttggtggtgattttggcattccatcttgcactggtttctagtataggcttagaaataattggtcaggtaataatctttccagtcaagttgcaagggatgcttatttctcttcaaaaaaagacatcctgcgggattgagtagaaaattttaggtcagttttgggtgcttatttgtaatatttttcctactacattggagtttagcagttctttttttctggatccagatacaagtgtcatggtttatcttacagtgggtgaaactgactttcttttggttgggtgggtgaggatttcttaggcctgatagaatatatattctgtgaagtttgttaatgtacatattagattgtattggatttttttttcttgaattgcaaatggtattattagataggttatttccagttttacttcatgacaaattacctagagtaaacctacttaatactccaatggattctatgaaagtttaatgggatcagaaattggtgacttataagggggaagatattctaccatatttttataatagcttattattcatgtttcttgtctgaaggacactcaagttacagagcaaaatttctataggttgactagaatgttcataagcatggtcttccagttgcaggaaagatcatgttctatctgtggacacttactgtcctctaccacagctacgtgccagagttgttttccacagttcttataaagggcatgacttaggctctttaccctccaacttaatgtttatacacagggattgtttactaggttaatgacatttaactcccctctcttctgtaggtgagagaaaataagtaagtcttgatctgtttcttaccaaagagagacagacctatgatggaaaatgatcacgtctctgaattttttctttaacgttatagttccttattacagatagtaagcatatgggaatttctgagctataacatgttgagaagttagaaattaaaactaacacaacaaaaggcgctgaatcaaaagatctttgcttttatttggctcagaatgtttttggcttttctgctaaagatggcagaaattactctacacagacctgatttttctttattgcagaccattcttgtgggcttaccctgagacttttatcccaattagtgaatcttggagggaatacttgcttatttatgacttaggtatttccccccaaactttaatattcttgagcacttgaaaatacttttgagaaattttaactgtgattaaatttaggtttattagaaatattctgtacacatttgcctccatggtggcgtaagttctgaaaaattatatgaccgtgacaatagtttatcatcatcattattgttattcaaaataagggtaaataaatctctgtattgccaaagtgacttaaactgttctgatgaccacacagtgtgatttctttagcagagaaagttggttttaaaaataaatagtaccacttttctaagactgtacagtttacaaataaggtttttttctttgttgttttcctcttctattaagttttagtgaaaagcctaattacagaaaattgtgcagatactagtgaagatactagtataagtttaaaggaacatgtgactgtaaaatctcacatttacaaagtgcttgatctcttcatatttcacacgcatgttttagaatagattttagggagtgtttaattcattatccttttgacttaaaatttttgttaccaacttcctaggacttagataatatataaataagtacaaatcccaggggaagtgttgtgatgctagactaaaaggtgggaatgtgctgctgttccgtgagccttgttccattgttgaaaatttgatgcctcagtgtttattcagtaccacctcatggagcttcaatgtaaatggattatatgtataattggtaatttgtatagttttgtagattgtagattaaatgcactcatcatgtcacatgt

SEQ ID NO: 302781 - DNA, 2053 bp, Homo sapiens
gcaccggacaaacgtctctggagtctctccaatgagcaagaaagcaagtcgggggtaggggaggggcctcacaccagggggtgggcgcagtccctcctccagctccttcaccctccagtagtctcgtgggtccccgagcgccagcgcgggaaccgggaaaaggaaaccgtgttgtgtacgtaagattcaggaaacgaaaccaggagccgcgggtgttggcgcaaaggttactcccagacccttttccggctgacttctgagaaggttgcgcagcagctgtgcccggcagtctagaggcgcagaagaggaagccatcgcctggccccggctctctggaccttgtctcgctcgggagcggaaacagcggcagccagaggaccacataaacccattttgaattattcaaccattgctgaacttcttgaaactgttttaatcatggacaaacaaaactcacagatgaatgcttctcacccggaaacaaacttgccagttgggtatcctcctcagtatccaccgacagcattccaagatagatcagatactgattcatcagcaaattgaacttctggaagttttaacaggttttgaaactaataacaaatatgaaattaagaacagctttggacagagggtttactttgcagcggaagatactgattgctgtacccgaaattgctgtgggccatctagaccttttaccttgaggattattgataatatgggtcaagaagtcataactctggagagaccactaagatgtagcagctgttgttgtccctgctgccttcaggagatagaaatccaagctcctcctggtgtaccaataggttatgttattcagacttggcacccatgtctaccaaagtttacaattcaaaatgagaaaagagaggatgtactaaaaataagtggtccatgtgttgtgtgcagctgttgtggagatgttgattttgagattaaatctcttgatgaacagtgtgtggttggcaaaatttccaagcactggactggaattttgagagaggcatttacagacgctgataactttggaatccagttccctttagaccttgatgttaaaatgaaagctgtaatgattggtgcctgtttcctcattgacttcatgttttttgaaagcactggcagccaggaacaaaaatcaggagtgtggtagtggattagtgaaagtctcctcaggaaatctgaagtctgtatattgattgagactatctaaactcatacctgtatgaattaagctgtaaggcctgtagctctggttgtatacttttgcttttcaaattatagtttatcttctgtataactgatttataaaggtttttgtacattttttaatactcattgtcaatttgagaaaaaggacatatgagtttttgcatttattaatgaaacttcctttgaaaaactgctttgaattatgatctctgattcattgtccattttactaccaaatattaactaaggccttattaatttttatataaattatatcttgtcctattaaatctagttacaatttatttcatgcataagagctaatgttattttgcaaatgccatatattcaaaaaagctcaaagataattttctttactattatgttcaaataatattcaatatgcatattatctttaaaaagttaaatgtttttttaatcttcaagaaatcatgctacacttaacttctcctagaagctaatctataccataatattttcatattcacaagatattaaattaccaattttcaaattattgttagtaaagaacaaaatgattctctcccaaagaaagacacattttaaatactccttcactctaaaactctggtattataacttttgaaagttaatatttctacatgaaatgtttagctcttacactctatccttcctagaaaatggtaattgagattactcagatattaattaaatacaatatcatatatatattcacagagtataaacctaaataatgatctattagattcaaatatttgaaataaaaacttgatttttttgtaaaaaaaatttt

SEQ ID NO: 302782 - DNA, 6165 bp, Homo sapiens
agcggccgctcgcgagcgagaatttaataaaaaatgcatctggtgtgtgtaccagaaaaacacaggagttggatggattttttattaaatcaggccttaaacttgttaaatagttttgcatttttataaattatagtcatggttataacatttcagtagcaccataaaagtgcttggtttaggaattttttttttttaaactgagatagtgtgtaaatttctagatggctgtaataacatgcaggctctaagttactgattttatatatcaatatttgcagctttctaattagttgtgatttataatttaatgttttacttttggaaaataagtgacatttagaaaattaaatattactatgaggctgtattgtggtttcctaccctccctcacctttccatcccctcccacttccctactcccactgccccacaccctcttaatgcacaaggcattaacatatgctccaggttacttttttggtattaaattcggtgttagtcagcagaataatcattttctgcacaattatagtaacttaggtcaagtgtagttttatatagtggtaggtctgaatccattttctttaactgtgttgttgttgtaggaatttgctcgccctgatacatcgaatgatagagtttgttgtacgtgaagggccaatgtttgaagctatgattatgaacagagaaatcaacaatcctatgttcaggttcttatttgaaaaccagacaccagcccatgtttactataggtggaagctttattctattctgcagggagattctccaactaaatggcggacggaagattttcgtatgttcaaaaatggatctttttggaggccaccaccattaaatccgtacttgcatggaatgtcagaagagcaagaaacagaagcttttgtagaggaacctagtaaaaagggagcacttaaggaagaacagagggataaattggaagaaatcttgcggggattaactccaaggaaaaatgatattggagatgcaatggttttctgtcttaataatgctgaagctgctgaagaaatagtggattgcattactgagtcgttgtccatcttaaagacaccccttcctaaaaagattgccagattatatttggtttctgatgttttgtacaactcttcagccaaagttgctaatgcttcatattatagaaaattttttgaaacaaagttatgtcagatattttcagacctcaatgccacctatcgtacaattcaaggccatttacaatctgaaaactttaagcaacgggtaatgacttgcttcagagcatgggaagattgggcaatttatccagaaccatttttgatcaaactacaaaatattttcttaggacttgtaaatattattgaagaaaaggaaacagaggatgttccagatgaccttgatggtgcccccatcgaggaagagcttgatggtgcacctctggaagatgtagatggaattcctattgatgctactcccatcgatgatcttgatggagtccctataaaaagtcttgatgatgatcttgatggagtgcctttggatgcaactgaagactcaaaaaagaatgagcctatatttaaagttgccccatcaaaatgggaagctgtggatgaatctgaattggaagcacaggctgttacaacttctaaatgggaattatttgaccagcatgaagaatcagaagaagaagaaaatcaaaatcaagaagaagaaagtgaagatgaagaagatactcaaagttccaaatctgaagaacatcatttgtactctaatccaatcaaagaagaaatgactgagtctaagttctctaagtactctgaaatgagtgaggaaaaacgagccaaacttcgtgaaattgagctcaaagttatgaagtttcaggatgaattggaatctgggaaaagacctaaaaaaccaggccagagttttcaggagcaagtagaacactacagagataaacttcttcaacgagagaaagagaaagagttagaaagagaacgagaaagagacaagaaagataaagaaaaattggaatctcgctccaaagacaagaaggaaaaagatgagtgtactccgacaaggaaggaaaggaagaggcgacacagtacatcccccagcccatctcgcagtagcagtggtagacgagtgaaatccccatcaccaaaatcggagcgatcagagcgttcagaaagatctcataaagagagctcacggtccaggtcatctcacaaagattctcctagagatgttagcaaaaaagccaaaagatcaccatctggttcaaggacacctaaaaggtctaggcgatcacggtctagatctcctaaaaaatcaggaaagaagtccagatcccagtccagatctccacacaggtctcataaaaagtcaaagaaaaacaaacactgacgtaaatttttaagatgctgtcacttattggaaatgcgatttgttttgtgcctgaacggtctgttttttaaaaaaacaaaaaatcaaatgaaagagcattcctggggttttttgtttgtttgtgtatgcatgtgtaaactcatgagcaactgcatctgtagatctgtcattgttttatattgtgtaaattactttcattgtggctatttctcaagatgaaatttttattgttctaatggatttcatcagaaatgtgtataatggatctgctgacagtagtagtattttgttttaggatgttgtgacttagcaaaaataatacagatgtcttccccccttttgtagctttgacaatttgaattagatttcaaataaaatctgaacagaaaactataatgttgtttttttgccccaccggtgatattaagtcccttaaagtcctactgagtttcacactactgttgtgcttcttatacctgatgcactttataagccccagtgttcaagtagcttaagttttatatttactaagatgactatccaaattaagggacctgagactcctatttggtggtttgctaaccatttgcttttgataagtttctcttgggtaatactaatacccagatatcaaagactaggtagatatggcatggcgttttgttagtggaatgcctggctaaaacatttttttcacagaagcaatatgatttccatacatccaacccatgttctgagcaactacttacttttagggggaaattaaatatcttttcatttcctcttctattatgaaagaagtttatttgtaaaacaaattttctaacaaggtttggccatagaattctcttgtatgattgttgaccttttataatcttctgtaggctatctttcaaacactggcatcagaatattttttataagtttgtgtttaaacagcttagttggtccccccccccactcccaagagacttgggtttagttatagctttaagtaaaatttaaaaataaaatgtttttcaggaaacttcgtatctaatggtttgtaaattcaaggtgcaaaaagttgatttaaaccatttgcagagttgaactctattatgaaaataaatttgctacggtatgaggaagaaataaaacttgtgtaatgttggtcataatactgctataaatataataaagggttatgtagaattgaactgacactattatttgtgaatcttgatttcagttttttatgtaggcacttcatacactggtttgatgggttttttttttcctccctaaaagagaaagtagaaaactattctaacaatggattattttgatttagcttgctttttaaaaaaatcttttcaacttgttttacttaatcttgcctagtcacaaaataagatgtgcacccatggtttggagagttcctatattagctgagcagtgagatacactatttccaaacggtgcacacctacagtagctttggaaatgagccaatcactgttttacttaatggttcttatcagcatgcaaatattgcttgaaagttatttccttattcactgttttgttagtccattttgttaggaaacattaattcctaaaaatttgttcagaataattaaaagtgaacatttggtgctgatactcaaaaacctacaaatgtagccatttaaaaagtaacatgtttttctcccctgctcattgcctgggagaatggaattttatataactacctttctttgcaaaaataacggtcgtgtcgagttggtggtgattttggcattccatcttgcactggtttctagtataggcttagaaataattggtcaggtaataatctttccagtcaagttgcaagggatgcttatttctcttcaaaaaaagacatcctgcgggattgagtagaaaattttaggtcagttttgggtgcttatttgtaatatttttcctactacattggagtttagcagttctttttttctggatccagatacaagtgtcatggtttatcttacagtgggtgaaactgactttcttttggttgggtgggtgaggatttcttaggcctgatagaatatatattctgtgaagtttgttaatgtacatattagattgtattggatttttttttcttgaattgcaaatggtattattagataggttatttccagttttacttcatgacaaattacctagagtaaacctacttaatactccaatggattctatgaaagtttaatgggatcagaaattggtgacttataagggggaagatattctaccatatttttataatagcttattattcatgtttcttgtctgaaggacactcaagttacagagcaaaatttctataggttgactagaatgttcataagcatggtcttccagttgcaggaaagatcatgttctatctgtggacacttactgtcctctaccacagctacgtgccagagttgttttccacagttcttataaagggcatgacttaggctctttaccctccaacttaatgtttatacacagggattgtttactaggttaatgacatttaactcccctctcttctgtaggtgagagaaaataagtaagtcttgatctgtttcttaccaaagagagacagacctatgatggaaaatgatcacgtctctgaattttttctttaacgttatagttccttattacagatagtaagcatatgggaatttctgagctataacatgttgagaagttagaaattaaaactaacacaacaaaaggcgctgaatcaaaagatctttgcttttatttggctcagaatgtttttggcttttctgctaaagatggcagaaattactctacacagacctgatttttctttattgcagaccattcttgtgggcttaccctgagacttttatcccaattagtgaatcttggagggaatacttgcttatttatgacttaggtatttccccccaaactttaatattcttgagcacttgaaaatacttttgagaaattttaactgtgattaaatttaggtttattagaaatattctgtacacatttgcctccatggtggcgtaagttctgaaaaattatatgaccgtgacaatagtttatcatcatcattattgttattcaaaataagggtaaataaatctctgtattgccaaagtgacttaaactgttctgatgaccacacagtgtgatttctttagcagagaaagttggttttaaaaataaatagtaccacttttctaagactgtacagtttacaaataaggtttttttctttgttgttttcctcttctattaagttttagtgaaaagcctaattacagaaaattgtgcagatactagtgaagatactagtataagtttaaaggaacatgtgactgtaaaatctcacatttacaaagtgcttgatctcttcatatttcacacgcatgttttagaatagattttagggagtgtttaattcattatccttttgacttaaaatttttgttaccaacttcctaggacttagataatatataaataagtacaaatcccaggggaagtgttgtgatgctagactaaaaggtgggaatgtgctgctgttccgtgagccttgttccattgttgaaaatttgatgcctcagtgtttattcagtaccacctcatggagcttcaatgtaaatggattatatgtataattggtaatttgtatagttttgtagattgtagattaaatgcactcatcatgtcacatgt

SEQ ID NO: 302783 - DNA, 6824 bp, Homo sapiens
cgactcgcccgtgctgctgccgccgccgaaggaggggcaaagctcaagatggcggacaaaacgccaggcggatctcagaaggccagttcaaagacgagatcatcagatgttcattcatctggatcttcagatgcacatatggatgcatctggaccctcagatagtgatatgccaagtcggacacgacctaagagcccaagaaaacataattataggaatgaaagtgcccgtgaaagcctttgtgattctcctcatcagaatctctcaagacctcttctggaaaacaaacttaaagcattcagtattggaaaaatgagtacagctaagcgaactttaagtaaaaaggaacaggaagaattaaagaaaaaggaggatgaaaaggcagctgctgagatttatgaggagtttcttgctgcttttgaaggaagtgatggtaataaagtgaaaacatttgtgcgagggggtgttgttaatgcagctaaagaagaacatgaaacagatgaaaaaagaggtaaaatctataagccatcttcaagatttgcagatcaaaaaaatcctccaaatcagtcttccaatgaaagaccaccatctcttcttgtgatagaaaccaaaaaacctccacttaaaaaaggagagaaagaaaagaaaaaaagcaatttggaactcttcaaagaagaattaaagcaaattcaagaggaacgtgatgagagacataaaacaaaaggcagattaagtcgatttgaacctcctcagtcagattctgatggtcagcgtcgttctatggacgcgccttcaagaagaaatagatcatctggtgttcttgatgattacgcacctggctcacatgatgtaggagatccaagcactactaatttataccttggaaacattaatccacagatgaatgaagaaatgctgtgccaagaatttggaagatttggaccgttagccagtgtgaaaatcatgtggcctagaactgatgaagaaagagccagagagagaaattgcggctttgtggcctttatgaatagaagagatgctgaaagagctttaaaaaatttgaatggaaaaatgattatgtcttttgaaatgaagttaggttggggtaaagctgtacctattcctccacatccaatatacattccgccttctatgatggaacatacgcttcccccacctccatccggactgccttttaatgcgcagcctagagagcggttaaaaaaccctaatgctcctatgttaccgccacctaaaaacaaagaggattttgagaagactctgtcgcaagccatagtcaaagtggttatcccaacagaaaggaatttgctcgccctgatacatcgaatgatagagtttgttgtacgtgaagggccaatgtttgaagctatgattatgaacagagaaatcaacaatcctatgttcaggttcttatttgaaaaccagacaccagcccatgtttactataggtggaagctttattctattctgcagggagattctccaactaaatggcggacggaagattttcgtatgttcaaaaatggatctttttggaggccaccaccattaaatccgtacttgcatggaatgtcagaagagcaagaaacagaagcttttgtagaggaacctagtaaaaagggagcacttaaggaagaacagagggataaattggaagaaatcttgcggggattaactccaaggaaaaatgatattggagatgcaatggttttctgtcttaataatgctgaagctgctgaagaaatagtggattgcattactgagtcgttgtccatcttaaagacaccccttcctaaaaagattgccagattatatttggtttctgatgttttgtacaactcttcagccaaagttgctaatgcttcatattatagaaaattttttgaaacaaagttatgtcagatattttcagacctcaatgccacctatcgtacaattcaaggccatttacaatctgaaaactttaagcaacgggtaatgacttgcttcagagcatgggaagattgggcaatttatccagaaccatttttgatcaaactacaaaatattttcttaggacttgtaaatattattgaagaaaaggaaacagaggatgttccagatgaccttgatggtgcccccatcgaggaagagcttgatggtgcacctctggaagatgtagatggaattcctattgatgctactcccatcgatgatcttgatggagtccctataaaaagtcttgatgatgatcttgatggagtgcctttggatgcaactgaagactcaaaaaagaatgagcctatatttaaagttgccccatcaaaatgggaagctgtggatgaatctgaattggaagcacaggctgttacaacttctaaatgggaattatttgaccagcatgaagaatcagaagaagaagaaaatcaaaatcaagaagaagaaagtgaagatgaagaagatactcaaagttccaaatctgaagaacatcatttgtactctaatccaatcaaagaagaaatgactgagtctaagttctctaagtactctgaaatgagtgaggaaaaacgagccaaacttcgtgaaattgagctcaaagttatgaagtttcaggatgaattggaatctgggaaaagacctaaaaaaccaggccagagttttcaggagcaagtagaacactacagagataaacttcttcaacgagagaaagagaaagagttagaaagagaacgagaaagagacaagaaagataaagaaaaattggaatctcgctccaaagacaagaaggacccagcccatctcgcagtagcagtggtagacgagtgaaatccccatcaccaaaatcggagcgatcagagcgttcagaaagatctcataaagagagctcacggtccaggtcatctcacaaagattctcctagagatgttagcaaaaaagccaaaagatcaccatctggttcaaggacacctaaaaggtctaggcgatcacggtctagatctcctaaaaaatcaggaaagaagtccagatcccagtccagatctccacacaggtctcataaaaagtcaaagaaaaacaaacactgacgtaaatttttaagatgctgtcacttattggaaatgcgatttgttttgtgcctgaacggtctgttttttaaaaaaacaaaaaatcaaatgaaagagcattcctggggttttttgtttgtttgtgtatgcatgtgtaaactcatgagcaactgcatctgtagatctgtcattgttttatattgtgtaaattactttcattgtggctatttctcaagatgaaatttttattgttctaatggatttcatcagaaatgtgtataatggatctgctgacagtagtagtattttgttttaggatgttgtgacttagcaaaaataatacagatgtcttccccccttttgtagctttgacaatttgaattagatttcaaataaaatctgaacagaaaactataatgttgtttttttgccccaccggtgatattaagtcccttaaagtcctactgagtttcacactactgttgtgcttcttatacctgatgcactttataagccccagtgttcaagtagcttaagttttatatttactaagatgactatccaaattaagggacctgagactcctatttggtggtttgctaaccatttgcttttgataagtttctcttgggtaatactaatacccagatatcaaagactaggtagatatggcatggcgttttgttagtggaatgcctggctaaaacatttttttcacagaagcaatatgatttccatacatccaacccatgttctgagcaactacttacttttagggggaaattaaatatcttttcatttcctcttctattatgaaagaagtttatttgtaaaacaaattttctaacaaggtttggccatagaattctcttgtatgattgttgaccttttataatcttctgtaggctatctttcaaacactggcatcagaatattttttataagtttgtgtttaaacagcttagttggtccccccccccactcccaagagacttgggtttagttatagctttaagtaaaatttaaaaataaaatgtttttcaggaaacttcgtatctaatggtttgtaaattcaaggtgcaaaaagttgatttaaaccatttgcagagttgaactctattatgaaaataaatttgctacggtatgaggaagaaataaaacttgtgtaatgttggtcataatactgctataaatataataaagggttatgtagaattgaactgacactattatttgtgaatcttgatttcagttttttatgtaggcacttcatacactggtttgatgggttttttttttcctccctaaaagagaaagtagaaaactattctaacaatggattattttgatttagcttgctttttaaaaaaatcttttcaacttgttttacttaatcttgcctagtcacaaaataagatgtgcacccatggtttggagagttcctatattagctgagcagtgagatacactatttccaaacggtgcacacctacagtagctttggaaatgagccaatcactgttttacttaatggttcttatcagcatgcaaatattgcttgaaagttatttccttattcactgttttgttagtccattttgttaggaaacattaattcctaaaaatttgttcagaataattaaaagtgaacatttggtgctgatactcaaaaacctacaaatgtagccatttaaaaagtaacatgtttttctcccctgctcattgcctgggagaatggaattttatataactacctttctttgcaaaaataacggtcgtgtcgagttggtggtgattttggcattccatcttgcactggtttctagtataggcttagaaataattggtcaggtaataatctttccagtcaagttgcaagggatgcttatttctcttcaaaaaaagacatcctgcgggattgagtagaaaattttaggtcagttttgggtgcttatttgtaatatttttcctactacattggagtttagcagttctttttttctggatccagatacaagtgtcatggtttatcttacagtgggtgaaactgactttcttttggttgggtgggtgaggatttcttaggcctgatagaatatatattctgtgaagtttgttaatgtacatattagattgtattggatttttttttcttgaattgcaaatggtattattagataggttatttccagttttacttcatgacaaattacctagagtaaacctacttaatactccaatggattctatgaaagtttaatgggatcagaaattggtgacttataagggggaagatattctaccatatttttataatagcttattattcatgtttcttgtctgaaggacactcaagttacagagcaaaatttctataggttgactagaatgttcataagcatggtcttccagttgcaggaaagatcatgttctatctgtggacacttactgtcctctaccacagctacgtgccagagttgttttccacagttcttataaagggcatgacttaggctctttaccctccaacttaatgtttatacacagggattgtttactaggttaatgacatttaactcccctctcttctgtaggtgagagaaaataagtaagtcttgatctgtttcttaccaaagagagacagacctatgatggaaaatgatcacgtctctgaattttttctttaacgttatagttccttattacagatagtaagcatatgggaatttctgagctataacatgttgagaagttagaaattaaaactaacacaacaaaaggcgctgaatcaaaagatctttgcttttatttggctcagaatgtttttggcttttctgctaaagatggcagaaattactctacacagacctgatttttctttattgcagaccattcttgtgggcttaccctgagacttttatcccaattagtgaatcttggagggaatacttgcttatttatgacttaggtatttccccccaaactttaatattcttgagcacttgaaaatacttttgagaaattttaactgtgattaaatttaggtttattagaaatattctgtacacatttgcctccatggtggcgtaagttctgaaaaattatatgaccgtgacaatagtttatcatcatcattattgttattcaaaataagggtaaataaatctctgtattgccaaagtgacttaaactgttctgatgaccacacagtgtgatttctttagcagagaaagttggttttaaaaataaatagtaccacttttctaagactgtacagtttacaaataaggtttttttctttgttgttttcctcttctattaagttttagtgaaaagcctaattacagaaaattgtgcagatactagtgaagatactagtataagtttaaaggaacatgtgactgtaaaatctcacatttacaaagtgcttgatctcttcatatttcacacgcatgttttagaatagattttagggagtgtttaattcattatccttttgacttaaaatttttgttaccaacttcctaggacttagataatatataaataagtacaaatcccaggggaagtgttgtgatgctagactaaaaggtgggaatgtgctgctgttccgtgagccttgttccattgttgaaaatttgatgcctcagtgtttattcagtaccacctcatggagcttcaatgtaaatggattatatgtataattggtaatttgtatagttttgtagattgtagattaaatgcactcatcatgtcacatgt

SEQ ID NO: 302784 - DNA, 1940 bp, Homo sapiens
  misc_feature (1620)..(1620): n is a, c, g, or t
gcaccggacaaacgtctctggagtctctccaatgagcaagaaagcaagtcgggggtaggggaggggcctcacaccagggggtgggcgcagtccctcctccagctccttcaccctccagtagtctcgtgggtccccgagcgccagcgcgggaaccgggaaaaggaaaccgtgttgtgtacgtaagattcaggaaacgaaaccaggagccgcgggtgttggcgcaaaggttactcccagacccttttccggctgacttctgagaaggttgcgcagcagctgtgcccggcagtctagaggcgcagaagaggaagccatcgcctggccccggctctctggaccttgtctcgctcgggagcggaaacagcggcagccagagaactgttttaatcatggacaaacaaaactcacagatgaatgcttctcacccggaaacaaacttgccagttgggtatcctcctcagtatccaccgacagcattccaaggacctccaggatatagtggctaccctgggccccaggtcagctacccacccccaccagccggccattcaggtcctggcccagctggctttcctgtcccaaatcagccagtgtataatcagccagtatataatcagccagttggagctgcaggggtaccatggatgccagcgccacagcctccattaaactgtccacctggattagaatatttaagtcagatagatcagatactgattcatcagcaaattgaacttctggaagttttaacaggttttgaaactaataacaaatatgaaattaagaacagctttggacagagggtttactttgcagcggaagatactgattgctgtacccgaaattgctgtgggccatctagaccttttaccttgaggattattgataatatgggtcaagaagtcataactctggagagaccactaagatgtagcagctgttgttgtccctgctgccttcaggagatagaaatccaagctcctcctggtgtaccaataggttatgttattcagacttggcacccatgtctaccaaagtttacaattcaaaatgagaaaagagaggatgtactaaaaataagtggtccatgtgttgtgtgcagctgttgtggagatgttgattttgagattaaatctcttgatgaacagtgtgtggttggcaaaatttccaagcactggactggaattttgagagaggcatttacagacgctgataactttggaatccagttccctttagaccttgatgttaaaatgaaagctgtaatgattggtgcctgtttcctcattgacttcatgttttttgaaagcactggcagccaggaacaaaaatcaggagtgtggtagtggattagtgaaagtctcctcaggaaatctgaagtctgtatattgattgagactatctaaactcatacctgtatgaattaagctgtaaggcctgtagctctggttgtatacttttgcttttcaaattatagtttatcttctgtataactgatttataaaggtttttgtacattttttaatactcattgtcaatttgagaaaaaggaaaaaaaaaaaaaaaaaaaaaaaaaaaaaaaaaaaaaaaaaaaaaaaaaaaaaaaaagggggggggggnaaaaattttccccggggggggccatttgggccccgccattttgttgtttaaaacagaggggcgcccccatatgaggaggacgattataattaatcaacaagagaagcagcggggcggccttatttaacaacgaagcgctaggatggaggagaaagaaacttccttcgccgtggtatactctttgaggaagagaacccctacttgctggcgggggggacacaacatgtgggcgagccacatctacttcagcagaaagtttaaaccagcctcccgagggaaaactatacaacatctgtgggcgttcatgatgtgtaccacac

SEQ ID NO: 302785 - DNA, 2114 bp, Homo sapiens
  misc_feature (1590)..(1590): n is a, c, g, or t
gcaccggacaaacgtctctggagtctctccaatgagcaagaaagcaagtcgggggtaggggaggggcctcacaccagggggtgggcgcagtccctcctccagctccttcaccctccagtagtctcgtgggtccccgagcgccagcgcgggaaccgggaaaaggaaaccgtgttgtgtacgtaagattcaggaaacgaaaccaggagccgcgggtgttggcgcaaaggttactcccagacccttttccggctgacttctgagaaggttgcgcagcagctgtgcccggcagtctagaggcgcagaagaggaagccatcgcctggccccggctctctggaccttgtctcgctcgggagcggaaacagcggcagccagagaactgttttaatcatggacaaacaaaactcacagatgaatgcttctcacccggaaacaaacttgccagttgggtatcctcctcagtatccaccgacagcattccaaggacctccaggatatagtggctaccctgggccccaggtcagctacccacccccaccagccggccattcaggtcctggcccagctggctttcctgtcccaaatcagccagtgtataatcagccagtatataatcagccagttggagctgcaggggtaccatggatgccagcgccacagcctccattaaactgtccacctggattagaatatttaagtcagatagatcagatactgattcatcagcaaattgaacttctggaagttttaacaggttttgaaactaataacaaatatgaaattaagaacagctttggacagagggtttactttgcagcggaagatactgattgctgtacccgaaattgctgtgggccatctagaccttttaccttgaggattattgataatatgggtcaagaagtcataactctggagagaccactaagatgtagcagctgttgttgtccctgctgccttcaggagatagaaatccaagctcctcctggtgtaccaataggttatgttattcagacttggcacccatgtctaccaaagtttacaattcaaaatgagaaaagagaggatgtactaaaaataagtggtccatgtgttgtgtgcagctgttgtggagatgttgattttgagattaaatctcttgatgaacagtgtgtggttggcaaaatttccaagcactggactggaattttgagagaggcatttacagacgctgataactttggaatccagttccctttagaccttgatgttaaaatgaaagctgtaatgattggtgcctgtttcctcattgacttcatgttttttgaaagcactggcagccaggaacaaaaatcaggagtgtggtagtggattagtgaaagtctcctcaggaaatctgaagtctgtatattgattgagactatctaaactcatacctgtatgaattaagctgtaaggcctgtagctctggttgtatacttttgcttttcaaattatagtttatcttctgtataactgatttataaaggtttttgtacatttttaaaaaaaaaaaaaaaaaaaaaaaaaaaaaaaaaaaaaaaaaaaaaaaaaaaaaaaagggggggggggnaaaaaatcggggggggccccccaactattagcggaactacccccagtttttttgtgtcacaaagggggcggccccaatataggagaggagccggataataaaaaagagcaaggagacaggggcggcggcgttaaaacacacggtcgggtcacgggaaacaaacggctccgtcgggaactttggggaaagaaccacacactgcggcgcggcggggacacactagggggacaccaaccctacagaaaataacgagacagcggaacattaaccccggccgctatcgggtggaaaccccccggcagatattgtgcggggcagaaagttccgggacccaggtgtggtgcaagaatttaaccgagggcgaataactataccctagagacccacaactgcatatcgatacaccataaagcagaagtactccatacagactcccataggatacctgatcacaacaatttatgcaccccaaaccccccaacgcaccctctcgacactcactatctactcacacatacctaccg

SEQ ID NO: 302786 - DNA, 3567 bp, Homo sapiens
cgactcgcccgtgctgctgccgccgccgaaggaggggcaaagctcaagatggcggacaaaacgccaggcggatctcagaaggccagttcaaagacgagatcatcagatgttcattcatctggatcttcagatgcacatatggatgcatctggaccctcagatagtgatatgccaagtcggacacgacctaagagcccaagaaaacataattataggaatgaaagtgcccgtgaaagcctttgtgattctcctcatcagaatctctcaagacctcttctggaaaacaaacttaaagcattcagtattggaaaaatgagtacagctaagcgaactttaagtaaaaaggaacaggaagaattaaagaaaaaggaggatgaaaaggcagctgctgagatttatgaggagtttcttgctgcttttgaaggaagtgatggtaataaagtgaaaacatttgtgcgagggggtgttgttaatgcagctaaagaagaacatgaaacagatgaaaaaagaggtaaaatctataagccatcttcaagatttgcagatcaaaaaaatcctccaaatcagtcttccaatgaaagaccaccatctcttcttgtgatagaaaccaaaaaacctccacttaaaaaaggagagaaagaaaagaaaaaaagcaatttggaactcttcaaagaagaattaaagcaaattcaagaggaacgtgatgagagacataaaacaaaaggcagattaagtcgatttgaacctcctcagtcagattctgatggtcagcgtcgttctatggacgcgccttcaagaagaaatagatcatctggtgttcttgatgattacgcacctggctcacatgatgtaggagatccaagcactactaatttataccttggaaacattaatccacagatgaatgaagaaatgctgtgccaagaatttggaagatttggaccgttagccagtgtgaaaatcatgtggcctagaactgatgaagaaagagccagagagagaaattgcggctttgtggcctttatgaatagaagagatgctgaaagagctttaaaaaatttgaatggaaaaatgattatgtcttttgaaatgaagttaggttggggtaaagctgtacctattcctccacatccaatatacattccgccttctatgatggaacatacgcttcccccacctccatccggactgccttttaatgcgcagcctagagagcggttaaaaaaccctaatgctcctatgttaccgccacctaaaaacaaagaggattttgagaagactctgtcgcaagccatagtcaaagtggttatcccaacagaaaggaatttgctcgccctgatacatcgaatgatagagtttgttgtacgtgaagggccaatgtttgaagctatgattatgaacagagaaatcaacaatcctatgttcaggttcttatttgaaaaccagacaccagcccatgtttactataggtggaagctttattctattctgcagggagattctccaactaaatggcggacggaagattttcgtatgttcaaaaatggatctttttggaggccaccaccattaaatccgtacttgcatggaatgtcagaagagcaagaaacagaagcttttgtagaggaacctagtaaaaagggagcacttaaggaagaacagagggataaattggaagaaatcttgcggggattaactccaaggaaaaatgatattggagatgcaatggttttctgtcttaataatgctgaagctgctgaagaaatagtggattgcattactgagtcgttgtccatcttaaagacaccccttcctaaaaagattgccagattatatttggtttctgatgttttgtacaactcttcagccaaagttgctaatgcttcatattatagaaaattttttgaaacaaagttatgtcagatattttcagacctcaatgccacctatcgtacaattcaaggccatttacaatctgaaaactttaagcaacgggtaatgacttgcttcagagcatgggaagattgggcaatttatccagaaccatttttgatcaaactacaaaatattttcttaggacttgtaaatattattgaagaaaaggaaacagaggatgttccagatgaccttgatggtgcccccatcgaggaagagcttgatggtgcacctctggaagatgtagatggaattcctattgatgctactcccatcgatgatcttgatggagtccctataaaaagtcttgatgatgatcttgatggagtgcctttggatgcaactgaagactcaaaaaagaatgagcctatatttaaagttgccccatcaaaatgggaagctgtggatgaatctgaattggaagcacaggctgttacaacttctaaatgggaattatttgaccagcatgaagaatcagaagaagaagaaaatcaaaatcaagaagaagaaagtgaagatgaagaagatactcaaagttccaaatctgaagaacatcatttgtactctaatccaatcaaagaagaaatgactgagtctaagttctctaagtactctgaaatgagtgaggaaaaacgagccaaacttcgtgaaattgagctcaaagttatgaagtttcaggatgaattggaatctgggaaaagacctaaaaaaccaggccagagttttcaggagcaagtagaacactacagagataaacttcttcaacgagagaaagagaaagagttagaaagagaacgagaaagagacaagaaagataaagaaaaattggaatctcgctccaaagacaagaaggaaaaagatgagtgtactccgacaaggaaggaaaggaagaggcgacacagtacatcccccagcccatctcgcagtagcagtggtagacgagtgaaatccccatcaccaaaatcggagcgatcagagcgttcagaaagatctcataaagagagctcacggtccaggtcatctcacaaagattctcctagagatgttagcaaaaaagccaaaagatcaccatctggttcaaggacacctaaaaggtctaggcgatcacggtctagatctcctaaaaaatcaggaaagaagtccagatcccagtccagatctccacacaggtctcataaaaagtcaaagaaaaacaaacactgacgtaaatttttaagatgctgtcacttattggaaatgcgatttgttttgtgcctgaacggtctgttttttaaaaaaacaaaaaatcaaatgaaagagcattcctggggttttttgtttgtttgtgtatgcatgtgtaaactcatgagcaactgcatctgtagatctgtcattgttttatattgtgtaaattactttcattgtggctatttctcaagatgaaatttttattgttctaatggatttcatcagaaatgtgtataatggatctgctgacagtagtagtattttgttttaggatgttgtgacttagcaaaaataatacagatgtcttccccccttttgtagctttgacaatttgaattagatttcaaataaatgggatgcggcagccccccctccctttgtaacatcgttattaacactaaaata

SEQ ID NO: 302787 - DNA, 4890 bp, Homo sapiens
cccacccctgcaaaacaacagcaaaaacctttaccaggctctataacagggggaccaaacttgtttttgctcatcattgcctcacaaggtacctggcaccagtgagcacttggtaaatattagataaatgcacaactgactgcttctttagcaaactggatgatagaatatgttcttacattgtacctcagattgtgggtatccagttatgttggcttgtactggattacaaattaatcttacaagcaatgtgacttcagcaagcaaaggaaaatgttataatagtacacatttccataggatgttccagatgaccttgatggtgcccccatcgaggaagagcttgatggtgcacctctggaagatgtagatggaattcctattgatgctactcccatcgatgatcttgatggagtccctataaaaagtcttgatgatgatcttgatggagtgcctttggatgcaactgaagactcaaaaaagaatgagcctatatttaaagttgccccatcaaaatgggaagctgtggatgaatctgaattggaagcacaggctgttacaacttctaaatgggaattatttgaccagcatgaagaatcagaagaagaagaaaatcaaaatcaagaagaagaaagtgaagatgaagaagatactcaaagttccaaatctgaagaacatcatttgtactctaatccaatcaaagaagaaatgactgagtctaagttctctaagtactctgaaatgagtgaggaaaaacgagccaaacttcgtgaaattgagctcaaagttatgaagtttcaggatgaattggaatctgggaaaagacctaaaaaaccaggccagagttttcaggagcaagtagaacactacagagataaacttcttcaacgagagaaagagaaagagttagaaagagaacgagaaagagacaagaaagataaagaaaaattggaatctcgctccaaagacaagaaggaaaaagatgagtgtactccgacaaggaaggaaagatcaccatctggttcaaggacacctaaaaggtctaggcgatcacggtctagatctcctaaaaaatcaggaaagaagtccagatcccagtccagatctccacacaggtctcataaaaagtcaaagaaaaacaaacactgacgtaaatttttaagatgctgtcacttattggaaatgcgatttgttttgtgcctgaacggtctgttttttaaaaaaacaaaaaatcaaatgaaagagcattcctggggttttttgtttgtttgtgtatgcatgtgtaaactcatgagcaactgcatctgtagatctgtcattgttttatattgtgtaaattactttcattgtggctatttctcaagatgaaatttttattgttctaatggatttcatcagaaatgtgtataatggatctgctgacagtagtagtattttgttttaggatgttgtgacttagcaaaaataatacagatgtcttccccccttttgtagctttgacaatttgaattagatttcaaataaaatctgaacagaaaactataatgttgtttttttgccccaccggtgatattaagtcccttaaagtcctactgagtttcacactactgttgtgcttcttatacctgatgcactttataagccccagtgttcaagtagcttaagttttatatttactaagatgactatccaaattaagggacctgagactcctatttggtggtttgctaaccatttgcttttgataagtttctcttgggtaatactaatacccagatatcaaagactaggtagatatggcatggcgttttgttagtggaatgcctggctaaaacatttttttcacagaagcaatatgatttccatacatccaacccatgttctgagcaactacttacttttagggggaaattaaatatcttttcatttcctcttctattatgaaagaagtttatttgtaaaacaaattttctaacaaggtttggccatagaattctcttgtatgattgttgaccttttataatcttctgtaggctatctttcaaacactggcatcagaatattttttataagtttgtgtttaaacagcttagttggtccccccccccactcccaagagacttgggtttagttatagctttaagtaaaatttaaaaataaaatgtttttcaggaaacttcgtatctaatggtttgtaaattcaaggtgcaaaaagttgatttaaaccatttgcagagttgaactctattatgaaaataaatttgctacggtatgaggaagaaataaaacttgtgtaatgttggtcataatactgctataaatataataaagggttatgtagaattgaactgacactattatttgtgaatcttgatttcagttttttatgtaggcacttcatacactggtttgatgggttttttttttcctccctaaaagagaaagtagaaaactattctaacaatggattattttgatttagcttgctttttaaaaaaatcttttcaacttgttttacttaatcttgcctagtcacaaaataagatgtgcacccatggtttggagagttcctatattagctgagcagtgagatacactatttccaaacggtgcacacctacagtagctttggaaatgagccaatcactgttttacttaatggttcttatcagcatgcaaatattgcttgaaagttatttccttattcactgttttgttagtccattttgttaggaaacattaattcctaaaaatttgttcagaataattaaaagtgaacatttggtgctgatactcaaaaacctacaaatgtagccatttaaaaagtaacatgtttttctcccctgctcattgcctgggagaatggaattttatataactacctttctttgcaaaaataacggtcgtgtcgagttggtggtgattttggcattccatcttgcactggtttctagtataggcttagaaataattggtcaggtaataatctttccagtcaagttgcaagggatgcttatttctcttcaaaaaaagacatcctgcgggattgagtagaaaattttaggtcagttttgggtgcttatttgtaatatttttcctactacattggagtttagcagttctttttttctggatccagatacaagtgtcatggtttatcttacagtgggtgaaactgactttcttttggttgggtgggtgaggatttcttaggcctgatagaatatatattctgtgaagtttgttaatgtacatattagattgtattggatttttttttcttgaattgcaaatggtattattagataggttatttccagttttacttcatgacaaattacctagagtaaacctacttaatactccaatggattctatgaaagtttaatgggatcagaaattggtgacttataagggggaagatattctaccatatttttataatagcttattattcatgtttcttgtctgaaggacactcaagttacagagcaaaatttctataggttgactagaatgttcataagcatggtcttccagttgcaggaaagatcatgttctatctgtggacacttactgtcctctaccacagctacgtgccagagttgttttccacagttcttataaagggcatgacttaggctctttaccctccaacttaatgtttatacacagggattgtttactaggttaatgacatttaactcccctctcttctgtaggtgagagaaaataagtaagtcttgatctgtttcttaccaaagagagacagacctatgatggaaaatgatcacgtctctgaattttttctttaacgttatagttccttattacagatagtaagcatatgggaatttctgagctataacatgttgagaagttagaaattaaaactaacacaacaaaaggcgctgaatcaaaagatctttgcttttatttggctcagaatgtttttggcttttctgctaaagatggcagaaattactctacacagacctgatttttctttattgcagaccattcttgtgggcttaccctgagacttttatcccaattagtgaatcttggagggaatacttgcttatttatgacttaggtatttccccccaaactttaatattcttgagcacttgaaaatacttttgagaaattttaactgtgattaaatttaggtttattagaaatattctgtacacatttgcctccatggtggcgtaagttctgaaaaattatatgaccgtgacaatagtttatcatcatcattattgttattcaaaataagggtaaataaatctctgtattgccaaagtgacttaaactgttctgatgaccacacagtgtgatttctttagcagagaaagttggttttaaaaataaatagtaccacttttctaagactgtacagtttacaaataaggtttttttctttgttgttttcctcttctattaagttttagtgaaaagcctaattacagaaaattgtgcagatactagtgaagatactagtataagtttaaaggaacatgtgactgtaaaatctcacatttacaaagtgcttgatctcttcatatttcacacgcatgttttagaatagattttagggagtgtttaattcattatccttttgacttaaaatttttgttaccaacttcctaggacttagataatatataaataagtacaaatcccaggggaagtgttgtgatgctagactaaaaggtgggaatgtgctgctgttccgtgagccttgttccattgttgaaaatttgatgcctcagtgtttattcagtaccacctcatggagcttcaatgtaaatggattatatgtataattggtaatttgtatagttttgtagattgtagattaaatgcactcatcatgtcacatgt

SEQ ID NO: 302788 - DNA, 2001 bp, Homo sapiens
gcaccggacaaacgtctctggagtctctccaatgagcaagaaagcaagtcgggggtaggggaggggcctcacaccagggggtgggcgcagtccctcctccagctccttcaccctccagtagtctcgtgggtccccgagcgccagcgcgggaaccgggaaaaggaaaccgtgttgtgtacgtaagattcaggaaacgaaaccaggagccgcgggtgttggcgcaaaggttactcccagacccttttccggctgacttctgagaaggttgcgcagcagctgtgcccggcagtctagaggcgcagaagaggaagccatcgcctggccccggctctctggaccttgtctcgctcgggagcggaaacagcggcagccagagaactgttttaatcatggacaaacaaaactcacagatgaatgcttctcacccggaaacaaacttgccagttgggtatcctcctcagtatccaccgacagcattccaaggacctccaggatatagtggctaccctgggccccaggtcagctacccacccccaccagccggccattcaggtcctggcccagctggctttcctgtcccaaatcagccagtgtataatcagccagtatataatcagccagttggagctgcaggggtaccatggatgccagcgccacagcctccattaaactgtccacctggattagaatatttaagtcagatagatcagatactgattcatcagcaaattgaacttctggaagatagaaatccaagctcctcctggtgtaccaataggttatgttattcagacttggcacccatgtctaccaaagtttacaattcaaaatgagaaaagagaggatgtactaaaaataagtggtccatgtgttgtgtgcagctgttgtggagatgttgattttgagattaaatctcttgatgaacagtgtgtggttggcaaaatttccaagcactggactggaattttgagagaggcatttacagacgctgataactttggaatccagttccctttagaccttgatgttaaaatgaaagctgtaatgattggtgcctgtttcctcattgacttcatgttttttgaaagcactggcagccaggaacaaaaatcaggagtgtggtagtggattagtgaaagtctcctcaggaaatctgaagtctgtatattgattgagactatctaaactcatacctgtatgaattaagctgtaaggcctgtagctctggttgtatacttttgcttttcaaattatagtttatcttctgtataactgatttataaaggtttttgtacattttttaatactcattgtcaatttgagaaaaaggacatatgagtttttgcatttattaatgaaacttcctttgaaaaactgctttgaattatgatctctgattcattgtccattttactaccaaatattaactaaggccttattaatttttatataaattatatcttgtcctattaaatctagttacaatttatttcatgcataagagctaatgttattttgcaaatgccatatattcaaaaaagctcaaagataattttctttactattatgttcaaataatattcaatatgcatattatctttaaaaagttaaatgtttttttaatcttcaagaaatcatgctacacttaacttctcctagaagctaatctataccataatattttcatattcacaagatattaaattaccaattttcaaattattgttagtaaagaacaaaatgattctctcccaaagaaagacacattttaaatactccttcactctaaaactctggtattataacttttgaaagttaatatttctacatgaaatgtttagctcttacactctatccttcctagaaaatggtaattgagattactcagatattaattaaatacaatatcatatatatattcacagagtataaacctaaataatgatctattagattcaaatatttgaaataaaaacttgatttttttgtaaaaaaaatttt

SEQ ID NO: 302789 - DNA, 4147 bp, Homo sapiens
gcatctgcaacgactctcttaatcttcacggctacaactcaaagttatgaagtttcaggatgaattggaatctgggaaaagacctaaaaaaccaggccagagttttcaggagcaagtagaacactacagagataaacttcttcaacgagagaaagagaaagagttagaaagagaacgagaaagagacaagaaagataaagaaaaattggaatctcgctccaaagacaagaaggaaaaagatgagtgtactccgacaaggaaggaaagatcaccatctggttcaaggacacctaaaaggtctaggcgatcacggtctagatctcctaaaaaatcaggaaagaagtccagatcccagtccagatctccacacaggtctcataaaaagtcaaagaaaaacaaacactgacgtaaatttttaagatgctgtcacttattggaaatgcgatttgttttgtgcctgaacggtctgttttttaaaaaaacaaaaaatcaaatgaaagagcattcctggggttttttgtttgtttgtgtatgcatgtgtaaactcatgagcaactgcatctgtagatctgtcattgttttatattgtgtaaattactttcattgtggctatttctcaagatgaaatttttattgttctaatggatttcatcagaaatgtgtataatggatctgctgacagtagtagtattttgttttaggatgttgtgacttagcaaaaataatacagatgtcttccccccttttgtagctttgacaatttgaattagatttcaaataaaatctgaacagaaaactataatgttgtttttttgccccaccggtgatattaagtcccttaaagtcctactgagtttcacactactgttgtgcttcttatacctgatgcactttataagccccagtgttcaagtagcttaagttttatatttactaagatgactatccaaattaagggacctgagactcctatttggtggtttgctaaccatttgcttttgataagtttctcttgggtaatactaatacccagatatcaaagactaggtagatatggcatggcgttttgttagtggaatgcctggctaaaacatttttttcacagaagcaatatgatttccatacatccaacccatgttctgagcaactacttacttttagggggaaattaaatatcttttcatttcctcttctattatgaaagaagtttatttgtaaaacaaattttctaacaaggtttggccatagaattctcttgtatgattgttgaccttttataatcttctgtaggctatctttcaaacactggcatcagaatattttttataagtttgtgtttaaacagcttagttggtccccccccccactcccaagagacttgggtttagttatagctttaagtaaaatttaaaaataaaatgtttttcaggaaacttcgtatctaatggtttgtaaattcaaggtgcaaaaagttgatttaaaccatttgcagagttgaactctattatgaaaataaatttgctacggtatgaggaagaaataaaacttgtgtaatgttggtcataatactgctataaatataataaagggttatgtagaattgaactgacactattatttgtgaatcttgatttcagttttttatgtaggcacttcatacactggtttgatgggttttttttttcctccctaaaagagaaagtagaaaactattctaacaatggattattttgatttagcttgctttttaaaaaaatcttttcaacttgttttacttaatcttgcctagtcacaaaataagatgtgcacccatggtttggagagttcctatattagctgagcagtgagatacactatttccaaacggtgcacacctacagtagctttggaaatgagccaatcactgttttacttaatggttcttatcagcatgcaaatattgcttgaaagttatttccttattcactgttttgttagtccattttgttaggaaacattaattcctaaaaatttgttcagaataattaaaagtgaacatttggtgctgatactcaaaaacctacaaatgtagccatttaaaaagtaacatgtttttctcccctgctcattgcctgggagaatggaattttatataactacctttctttgcaaaaataacggtcgtgtcgagttggtggtgattttggcattccatcttgcactggtttctagtataggcttagaaataattggtcaggtaataatctttccagtcaagttgcaagggatgcttatttctcttcaaaaaaagacatcctgcgggattgagtagaaaattttaggtcagttttgggtgcttatttgtaatatttttcctactacattggagtttagcagttctttttttctggatccagatacaagtgtcatggtttatcttacagtgggtgaaactgactttcttttggttgggtgggtgaggatttcttaggcctgatagaatatatattctgtgaagtttgttaatgtacatattagattgtattggatttttttttcttgaattgcaaatggtattattagataggttatttccagttttacttcatgacaaattacctagagtaaacctacttaatactccaatggattctatgaaagtttaatgggatcagaaattggtgacttataagggggaagatattctaccatatttttataatagcttattattcatgtttcttgtctgaaggacactcaagttacagagcaaaatttctataggttgactagaatgttcataagcatggtcttccagttgcaggaaagatcatgttctatctgtggacacttactgtcctctaccacagctacgtgccagagttgttttccacagttcttataaagggcatgacttaggctctttaccctccaacttaatgtttatacacagggattgtttactaggttaatgacatttaactcccctctcttctgtaggtgagagaaaataagtaagtcttgatctgtttcttaccaaagagagacagacctatgatggaaaatgatcacgtctctgaattttttctttaacgttatagttccttattacagatagtaagcatatgggaatttctgagctataacatgttgagaagttagaaattaaaactaacacaacaaaaggcgctgaatcaaaagatctttgcttttatttggctcagaatgtttttggcttttctgctaaagatggcagaaattactctacacagacctgatttttctttattgcagaccattcttgtgggcttaccctgagacttttatcccaattagtgaatcttggagggaatacttgcttatttatgacttaggtatttccccccaaactttaatattcttgagcacttgaaaatacttttgagaaattttaactgtgattaaatttaggtttattagaaatattctgtacacatttgcctccatggtggcgtaagttctgaaaaattatatgaccgtgacaatagtttatcatcatcattattgttattcaaaataagggtaaataaatctctgtattgccaaagtgacttaaactgttctgatgaccacacagtgtgatttctttagcagagaaagttggttttaaaaataaatagtaccacttttctaagactgtacagtttacaaataaggtttttttctttgttgttttcctcttctattaagttttagtgaaaagcctaattacagaaaattgtgcagatactagtgaagatactagtataagtttaaaggaacatgtgactgtaaaatctcacatttacaaagtgcttgatctcttcatatttcacacgcatgttttagaatagattttagggagtgtttaattcattatccttttgacttaaaatttttgttaccaacttcctaggacttagataatatataaataagtacaaatcccaggggaagtgttgtgatgctagactaaaaggtgggaatgtgctgctgttccgtgagccttgttccattgttgaaaatttgatgcctcagtgtttattcagtaccacctcatggagcttcaatgtaaatggattatatgtataattggtaatttgtatagttttgtagattgtagattaaatgcactcatcatgtcacatgt

SEQ ID NO: 302790 - DNA, 1353 bp, Homo sapiens
  misc_feature (1351)..(1351): n is a, c, g, or t
gcaccggacaaacgtctctggagtctctccaatgagcaagaaagcaagtcgggggtaggggaggggcctcacaccagggggtgggcgcagtccctcctccagctccttcaccctccagtagtctcgtgggtccccgagcgccagcgcgggaaccgggaaaaggaaaccgtgttgtgtacgtaagattcaggaaacgaaaccaggagccgcgggtgttggcgcaaaggttactcccagacccttttccggctgacttctgagaaggttgcgcagcagctgtgcccggcagtctagaggcgcagaagaggaagccatcgcctggccccggctctctggaccttgtctcgctcgggagcggaaacagcggcagccagagaactgttttaatcatggacaaacaaaactcacagatgaatgcttctcacccggaaacaaacttgccagttgggtatcctcctcagtatccaccgacagcattccaaggacctccaggatatagtggctaccctgggccccaggtcagctacccacccccaccagccggccattcaggtcctggcccagctggctttcctgtcccaaatcagccagtgtataatcagccagtatataatcagccagttggagctgcaggggtaccatggatgccagcgccacagcctccattaaactgtccacctggattagaatatttaagtcagatagatcagatactgattcatcagcaaattgaacttctggaagttttaacaggttttgaaactaataacaaatatgaaattaagaacagctttggacagagggtttactttgcagcggaagatactgattgctgtacccgaaattgctgtgggccatctagaccttttaccttgaggattattgataatatgggtcaagaagtcataactctggagagaccactaagatgtagcagctgttgttgtccctgctgccttcaggagatagaaatccaagctcctcctggtgtaccaataggttatgttattcagacttggcacccatgtctaccaaagtttacaattcaaaatgagaaaagagaggatgtactaaaaataagtggtccatgtgttgtgtgcagctgttgtggagatgttgattttgagattaaatctcttgatgaacagtgtgtggttggcaaaatttccaagcactggactggaattttgagagaggcatttacagacgctgataactttggaatccagttccctttagaccttgatgttaaaatgaaagctgtaatgattggtgcctgtttcctcattacttcatgttttttgaaagcactgcagccaggtgagtgaatgggaccggctcatagtcaccnca

SEQ ID NO: 302791 - DNA, 1341 bp, Homo sapiens
gcaccggacaaacgtctctggagtctctccaatgagcaagaaagcaagtcgggggtaggggaggggcctcacaccagggggtgggcgcagtccctcctccagctccttcaccctccagtagtctcgtgggtccccgagcgccagcgcgggaaccgggaaaaggaaaccgtgttgtgtacgtaagattcaggaaacgaaaccaggagccgcgggtgttggcgcaaaggttactcccagacccttttccggctgacttctgagaaggttgcgcagcagctgtgcccggcagtctagaggcgcagaagaggaagccatcgcctggccccggctctctggaccttgtctcgctcgggagcggaaacagcggcagccagagaactgttttaatcatggacaaacaaaactcacagatgaatgcttctcacccggaaacaaacttgccagttgggtatcctcctcagtatccaccgacagcattccaaggacctccaggatatagtggctaccctgggccccaggtcagctacccacccccaccagccggccattcaggtcctggcccagctggctttcctgtcccaaatcagccagtgtataatcagccagtatataatcagccagttggagctgcaggggtaccatggatgccagcgccacagcctccattaaactgtccacctggattagaatatttaagtcagatagatcagatactgattcatcagcaaattgaacttctggaagttttaacaggttttgaaactaataacaaatatgaaattaagaacagctttggacagagggtttactttgcagcggaagatactgattgctgtacccgaaattgctgtgggccatctagaccttttaccttgaggattattgataatatgggtcaagaagtcataactctggagagaccactaagatgtagcagctgttgttgtccctgctgccttcaggagatagaaatccaagctcctcctggtgtaccaataggttatgttattcagacttggcacccatgtctaccaaagtttacaattcaaaatgagaaaagagaggatgtactaaaaataagtggtccatgtgttgtgtgcagctgttgtggagatgttgattttgagattaaatctcttgatgaacagtgtgtggttggcaaaatttccaagcactggactggaattttgagagaggcatttacagacgctgataactttggaatccagttccctttagaccttgatgttaaaatgaaagctgtaatgattggtgcctgtttcctcattacttcatgttttttgaaagcactggcagcgggttgagtggggtaccgagctc

SEQ ID NO: 302792 - DNA, 1316 bp, Homo sapiens
gcaccggacaaacgtctctggagtctctccaatgagcaagaaagcaagtcgggggtaggggaggggcctcacaccagggggtgggcgcagtccctcctccagctccttcaccctccagtagtctcgtgggtccccgagcgccagcgcgggaaccgggaaaaggaaaccgtgttgtgtacgtaagattcaggaaacgaaaccaggagccgcgggtgttggcgcaaaggttactcccagacccttttccggctgacttctgagaaggttgcgcagcagctgtgcccggcagtctagaggcgcagaagaggaagccatcgcctggccccggctctctggaccttgtctcgctcgggagcggaaacagcggcagccagagaactgttttaatcatggacaaacaaaactcacagatgaatgcttctcacccggaaacaaacttgccagttgggtatcctcctcagtatccaccgacagcattccaaggacctccaggatatagtggctaccctgggccccaggtcagctacccacccccaccagccggccattcaggtcctggcccagctggctttcctgtcccaaatcagccagtgtataatcagccagtatataatcagccagttggagctgcaggggtaccatggatgccagcgccacagcctccattaaactgtccacctggattagaatatttaagtcagatagatcagatactgattcatcagcaaattgaacttctggaagttttaacaggttttgaaactaataacaaatatgaaattaagaacagctttggacagagggtttactttgcagcggaagatactgattgctgtacccgaaattgctgtgggccatctagaccttttaccttgaggattattgataatatgggtcaagaagtcataactctggagagaccactaagatgtagcagctgttgttgtccctgctgccttcaggagatagaaatccaagctcctcctggtgtaccaataggttatgttattcagacttggcacccatgtctaccaaagtttacaattcaaaatgagaaaagagaggatgtactaaaaataagtggtccatgtgttgtgtgcagctgttgtggagatgttgattttgaggtaagagatgtcataatgtttataagatttgctttcctaatataagaagaatgtaattttgcaggacattataaatgcattaaataagtgttgtgtgccaatgtctcaatagcaagatgattttctcatttatttaactttgggcagagtggtagttatcactctgattaaaggtcactgttggtcatg

SEQ ID NO: 302793 - DNA, 1053 bp, Homo sapiens
  misc_feature (968)..(968): n is a, c, g, or t
gcaccggacaaacgtctctggagtctctccaatgagcaagaaagcaagtcgggggtaggggaggggcctcacaccagggggtgggcgcagtccctcctccagctccttcaccctccagtagtctcgtgggtccccgagcgccagcgcgggaaccgggaaaaggaaaccgtgttgtgtacgtaagattcaggaaacgaaaccaggagccgcgggtgttggcgcaaaggttactcccagacccttttccggctgacttctgagaaggttgcgcagcagctgtgcccggcagtctagaggcgcagaagaggaagccatcgcctggccccggctctctggaccttgtctcgctcgggagcggaaacagcggcagccagagaactgttttaatcatggacaaacaaaactcacagatgaatgcttctcacccggaaacaaacttgccagttgggtatcctcctcagtatccaccgacagcattccaaggacctccaggatatagtggctaccctgggccccaggtcagctacccacccccaccagccggccattcaggtcctggcccagctggctttcctgtcccaaatcagccagtgtataatcagccagtatataatcagccagttggagctgcaggggtaccatggatgccagcgccacagcctccattaaactgtccacctggattagaatatttaagtcagatagatcagatactgattcatcagcaaattgaacttctggaagttttaacaggttttgaaactaataacaaatatgaaattaagaacagctttggacagagggtttactttgcagcggaagatactgattgctgtacccgaaattgctgtgggccatctagaccttttaccttgaggattattgataatatgggtcaagaagtcataactctggagagaccactaagatgtagcagctgttgttgtccctgctgccttcaggagatngaatccagctctctggtgtccatggatgttcgactggcccatttacaatacatcaatgaaagaaggtgataatatgtcagtgggt

SEQ ID NO: 302794 - DNA, 1227 bp, Homo sapiens
gcaccggacaaacgtctctggagtctctccaatgagcaagaaagcaagtcgggggtaggggaggggcctcacaccagggggtgggcgcagtccctcctccagctccttcaccctccagtagtctcgtgggtccccgagcgccagcgcgggaaccgggaaaaggaaaccgtgttgtgtacgtaagattcaggaaacgaaaccaggagccgcgggtgttggcgcaaaggttactcccagacccttttccggctgacttctgagaaggttgcgcagcagctgtgcccggcagtctagaggcgcagaagaggaagccatcgcctggccccggctctctggaccttgtctcgctcgggagcggaaacagcggcagccagagaactgttttaatcatggacaaacaaaactcacagatgaatgcttctcacccggaaacaaacttgccagttgggtatcctcctcagtatccaccgacagcattccaaggacctccaggatatagtggctaccctgggccccaggtcagctacccacccccaccagccggccattcaggtcctggcccagctggctttcctgtcccaaatcagccagtgtataatcagccagtatataatcagccagttggagctgcaggggtaccatggatgccagcgccacagcctccattaaactgtccacctggattagaatatttaagtcagatagatcagatactgattcatcagcaaattgaacttctggaagttttaacaggttttgaaactaataacaaatatgaaattaagaacagctttggacagagggtttactttgcagcggaagatactgattgctgtacccgaaattgctgtgggccatctagaccttttaccttgaggattattgataatatgggtcaagaagtcataactctggagagaccactaagatgtagcagctgttgttgtccctgctgccttcaggaggtctgtgatcaattaccagggcactttgtaaaatagttcagcaagaatttctgccctgtcattgaacctttcatcgaacctaggcattatgattattacatttacatatattattttgcctttgtagatagaaatccaagctcctcctggtgtaccaataggttatgttattcagacttgggtgccaagtctgaataacataacctattggacaccaggaggagcttggatttctatcttctgaaggcagcaggttgagtga

SEQ ID NO: 302795 - DNA, 1083 bp, Homo sapiens
gcaccggacaaacgtctctggagtctctccaatgagcaagaaagcaagtcgggggtaggggaggggcctcacaccagggggtgggcgcagtccctcctccagctccttcaccctccagtagtctcgtgggtccccgagcgccagcgcgggaaccgggaaaaggaaaccgtgttgtgtacgtaagattcaggaaacgaaaccaggagccgcgggtgttggcgcaaaggttactcccagacccttttccggctgacttctgagaaggttgcgcagcagctgtgcccggcagtctagaggcgcagaagaggaagccatcgcctggccccggctctctggaccttgtctcgctcgggagcggaaacagcggcagccagaggaccacataaacccattttgaattattcaaccattgctgaacttcttgaaactgttttaatcatggacaaacaaaactcacagatgaatgcttctcacccggaaacaaacttgccagttgggtatcctcctcagtatccaccgacagcattccaagatagatcagatactgattcatcagcaaattgaacttctggaagttttaacaggttttgaaactaataacaaatatgaaattaagaacagctttggacagagggtttactttgcagcggaagatactgattgctgtacccgaaattgctgtgggccatctagaccttttaccttgaggattattgataatatgggtcaagaagtcataactctggagagaccactaagatgtagcagctgttgttgtccctgctgccttcaggaggtctgtgatcaattaccagggcactttgtaaaatagttcagcaagaatttctgccctgtcattgaacctttcatcgaacctaggcattatgattattacatttacatatattattttgcctttgtagatagaaatccaagctcctcctggtgtaccaataggttatgttattcagacttggcacccatgtctaccaaagtttacaattcaaaatgagaaaagaggtggtcttaaatggccctcttttggtgacctgtgtggaaatgttattttgggggaatgtattt

SEQ ID NO: 302796 - DNA, 2413 bp, Homo sapiens
ccgcagggagcctggtacccgcctggagttcctttcccagtgctttcccataggcatctaagaatattccttcacagagttgccaagtgctaaaagttggtttcccaactcagaatgaaggaaccaggcttgtgcgtccgatgggcattgacattctggaaaacaagaataagaagctgtagcggcgcctgtaagtgggccggagcaggcgcagcttggccacctcccgccgaaaggcaaggaaggaccggctgcgacacgaggaagaaggcccctcggcctcagcagagcgctatcctccactggttacccgggttccccggcttgctaccgggctgctccgtgcatctttccccccaggcgtcaggaactgcgccctcatggcggaggtgaaggtgaaggtgcagccgcctgacgcggatccggtcgaaatagaaaacaggattatagaattatgtcaccagttccctcatggaatcacagaccaagtaattcagaatgaaatgcctcatatagaagcccagcagcgggcagtagccatcaataggttgttgtctatgggtcagttggatctcttaaggagcaatacgggccttttatatagaataaaggactctcagaatgctggtaaaatgaagggatccgataaccaagaaaaactagtatatcaaatcatagaggatgcaggaaataaaggaatatggagcagagatatccgctataaaagtaatttgccattaacagaaatcaacaaaattctgaagaatctggaaagtaaaaagcttatcaaagctgttaagtctgtagcagcctcaaaaaagaaggtgtatatgctctataacctgcagccagaccggtctgtgactggtggagcctggtacagtgaccaggattttgaatctgaatttgtagaggtgcttaaccaacagtgttttaaattcctacagtccaaggcagaaacagcacgagaaagcaaacagaacccaatgatacaaagaaatagttcatttgcctcatcacatgaagtgtggaaatatatctgcgaattgggaatcagtaaggtagagttatccatggaagacattgaaaccatcctgaatacactcatttatgatggaaaagtggagatgacgattattgctgcaaaagaaggcacagttggcagtgtagatggacacatgaaactgtacagggcagtcaatccaatcatccctcccacgggtttggtccgggcaccctgtggactctgcccggtttttgatgactgccacgaaggtggtgagatttcaccatctaactgtatttacatgacagagtggctcgaattttaatagagagctatgaactttattgacattttgcaaatgaagttacttagggagcagataatttaattcatgatggaacacgaaatctccttgaaagcaaacttcacaataatggacgtagacttgctgctatgaaaacatattttttttatttatgaagactaaatttatattggtaaaatagccagtagaatatgaaagaaataaggttagtagtgaaattcattcttcaataaataaaacactttgaaactccggaggaccacatctttcaagacttctgatgggtcaaggaaaaagatgccaacatacccgtatttaccaagtactatgataatggctagagtataaaaatgttctttttaaagttatttattaagttcttcattggaagtttttttttatatctggttcactaccaccattttctgtttcctactttctcagtggtttcattgaaaagaaattagaagtggttaaaggcaggaatagcaaagagtgcaaacttggggtatgactgggggagagtggaacatgccttttccgcacaatattaattcctttttgtatcagaaatgttcttttaggagattatgctaccatacttacttcaaacccaatgactactgtcaaggacatattttcagtacataaatactatcattttcattctaaagaatattttcactgttccttctttcttaaagtcttatgtttcactctttaactcaaatgtattctttgttagaatttaccctagattcttatttaatgtctgcagtagactgaatgtttgtgtgcaccgagaattctaatgttgaaatctcatttccaatgtgatggtatttggaggtggggcttttggtaagtgataggtcaggagagtaacagcgctcatgaatgggattagtgcccttatataaagagacccagagagctccatcaccccttctgccatgtgaaagggagaagacaaacatccacgaaccaggaagtgggtcctcaccagaaaacaaatctgtaagcaccttgatcttggacttcccagcctccagaattgtgagaaataaatttctgttgttgat

SEQ ID NO: 302797 - DNA, 2454 bp, Homo sapiens
ccgcagggagcctggtacccgcctggagttcctttcccagtgctttcccataggcatctaagaatattccttcacagagttgccaagtgctaaaagttggtttcccaactcagaatgaaggaaccaggcttgtgcgtccgatgggcattgacattctggaaaacaagaataagaagctgtagcggcgcctgtaagtgggccggagcaggcgcagcttggccacctcccgccgaaaggcaaggaaggaccggctgcgacacgaggaagaaggcccctcggcctcagcagagcgctatcctccactggttacccgggttccccggcttgctaccgggctgctccgtgcatctttccccccaggcgtcaggaactgcgccctcatggcggaggtgaaggtgaaggtgcagccgcctgacgcggatccggtcgaaatagaaaacaggattatagaattatgtcaccagttccctcatggaatcacagaccaagtaattcagaatgaaatgcctcatatagaagcccagcagcgggcagtagccatcaataggttgttgtctatgggtcagttggatctcttaaggagcaatacgggccttttatatagaataaaggactctcagaatgctggtaaaatgaagggatccgataaccaagaaaaactagtatatcaaatcatagaggatgcaggaaataaaggaatatggagcagagatatccgctataaaagtaatttgccattaacagaaatcaacaaaattctgaagaatctggaaagtaaaaagcttatcaaagctgttaagtctgtagcagcctcaaaaaagaaggtgtatatgctctataacctgcagccagaccggtctgtgactggtggagcctggtacagtgaccaggattttgaatctgaatttgtagaggtgcttaaccaacagtgttttaaattcctacagtccaaggcagaaacagcacgagaaagcaaacagaacccaatgatacaaagaaatagttcatttgcctcatcacatgaagtgtggaaatatatctgcgaattgggaatcagtaaggtagagttatccatggaagacattgaaaccatcctgaatacactcatttatgatggaaaagtggagatgacgattattgctgcaaaagaaggcacagttggcagtgtagatggacacatgaaactgtacagggcagtcaatccaatcatccctcccacgggtttggtccgggcaccctgtggactctgcccggtttttgatgactgccacgaaggtggtgagatttcaccatctaactgtatttacatgacagagtggctcgaattttaatagagagctatgaactttattgacattttgcaaatgaagttacttagggagcagataatttaattcatgatggaacacgaaatctccttgaaagcaaacttcacaataatggacgtagacttgctgctatgaaaacatattttttttatttatgaagactaaatttatattggtaaaatagccagtagaatatgaaagaaataaggttagtagtgaaattcattcttcaataaataaaacactttgaaactccggaggaccacatctttcaagacttctgatgggtcaaggaaaaagatgccaacatacccgtatttaccaagtactatgataatggctagagtataaaaatgttctttttaaagttatttattaagttcttcattggaagtttttttttatatctggttcactaccaccattttctgtttcctactttctcagtggtttcattgaaaagaaattagaagtggttaaaggcaggaatagcaaagagtgcaaacttggggtatgactgggggagagtggaacatgccttttccgcacaatattaattcctttttgtatcagaaatgttcttttaggagattatgctaccatacttacttcaaacccaatgactactgtcaaggacatattttcagtacataaatactatcattttcattctaaagaatattttcactgttccttctttcttaaagtcttatgtttcactctttaactcaaatgtattctttgttagaatttaccctagattcttatttaatgtctgcagtagactgaatgtttgtgtgcaccgagaattctaatgttgaaatctcatttccaatgtgatggtatttggaggtggggcttttggtaagtgataggtcaggagagtaacagcgctcatgaatgggattagtgcccttatataaagagacccagagagctccatcaccccttctgccatgtgaaagggagaagacaaacatccacgaaccaggaagtgggtcctcaccagaaaacaaatctgtaagcaccttgatcttggacttcccagcctccagaattgtgagaaataaatttctgttgttgatttttttttttttttttttttttttttttttttttttttttt

SEQ ID NO: 302798 - DNA, 1034 bp, Homo sapiens
  misc_feature (931)..(931): n is a, c, g, or t
ccgcagggagcctggtacccgcctggagttcctttcccagtgctttcccataggcatctaagaatattccttcacagagttgccaagtgctaaaagttggtttcccaactcagaatgaaggaaccaggcttgtgcgtccgatgggcattgacattctggaaaacaagaataagaagctgtagcggcgcctgtaagtgggccggagcaggcgcagcttggccacctcccgccgaaaggcaaggaaggaccggctgcgacacgaggaagaaggcccctcggcctcagcagagcgctatcctccactggttacccgggttccccggcttgctaccgggctgctccgtgcatctttccccccaggcgtcaggaactgcgccctcatggcggaggtgaaggtgaaggtgcagccgcctgacgcggatccggtcgaaatagaaaacaggattatagaattatgtcaccagttccctcatggaatcacagaccaagtaattcagaatgaaatgcctcatatagaagcccagcagcgggcagtagccatcaataggttgttgtctatgggtcagttggatctcttaaggagcaatacgggccttttatatagaataaaggactctcagaatgctggtaaaatgaagggatccgataaccaagaaaaactagtatatcaaatcatagaggatgcaggaaataaaggaatatggagcagagatatccgctataaaagtaatttgccattaacagaaatcaacaaaattctgaagaatctggaaagtaaaaagcttatcaaagctgttaagtctgtagcacctctaagactggtacagtgaccacgattttgaatctgcatttgtcgaggggttaaaccacagcgtttaaattctacagccaagcggaacagagagaagcaacgaccacgtcaagaaagcanggcctcctgaggggcattgccgggcccaggaggtccgggacagacccgaaccctgggaggggaattggcagcgggggacggccaccaggggcgctgcggcggc

SEQ ID NO: 302799 - DNA, 766 bp, Homo sapiens
ccgcagggagcctggtacccgcctggagttcctttcccagtgctttcccataggcatctaagaatattccttcacagagttgccaagtgctaaaagttggtttcccaactcagaatgaaggaaccaggcttgtgcgtccgatgggcattgacattctggaaaacaagaataagaagctgtagcggcgcctgtaagtgggccggagcaggcgcagcttggccacctcccgccgaaaggcaaggaaggaccggctgcgacacgaggaagaaggcccctcggcctcagcagagcgctatcctccactggttacccgggttccccggcttgctaccgggctgctccgtgcatctttccccccaggcgtcaggaactgcgccctcatggcggaggtgaaggtgaaggtgcagccgcctgacgcggatccggtcgaaatagaaaacaggattatagaattatgtcaccagttccctcatggaatcacagaccaagtaattcagaatgaaatgcctcatatagaagcccagcagcgggcagtagccatcaataggttgttgtctatgggtcagttggatctcttaaggagcaatacgggccttttatatagaataaaggactctcagaatgctgggtaagtacttgtttttttaattttaagaaaatgtttattattgcaaacgtatgtgttgggaataaagctaatacaaaattacataaacctgtcctgtgtatcatccctgcctcctatgatatattccatttcccagag

SEQ ID NO: 302800 - DNA, 1543 bp, Homo sapiens
tatacaagggttaatatgcgcacataaatctcgtgctgccaactgagaaggcctagaagtgatgacttcccaaagtgctgggattacaggcgtgagccactgcgcccagcaaccctttactgtttttaacaccctccaagtggatgtctccctatcctacttgtgtcctttctgatgtatcccttttttaggtagagttatccatggaagacattgaaaccatcctgaatacactcatttatgatggaaaagtggagatgacgattattgctgcaaaagaaggcacagttggcagtgtagatggacacatgaaactgtacagggcagtcaatccaatcatccctcccacgggtttggtccgggcaccctgtggactctgcccggtttttgatgactgccacgaaggtggtgagatttcaccatctaactgtatttacatgacagagtggctcgaattttaatagagagctatgaactttattgacattttgcaaatgaagttacttagggagcagataatttaattcatgatggaacacgaaatctccttgaaagcaaacttcacaataatggacgtagacttgctgctatgaaaacatattttttttatttatgaagactaaatttatattggtaaaatagccagtagaatatgaaagaaataaggttagtagtgaaattcattcttcaataaataaaacactttgaaactccggaggaccacatctttcaagacttctgatgggtcaaggaaaaagatgccaacatacccgtatttaccaagtactatgataatggctagagtataaaaatgttctttttaaagttatttattaagttcttcattggaagtttttttttatatctggttcactaccaccattttctgtttcctactttctcagtggtttcattgaaaagaaattagaagtggttaaaggcaggaatagcaaagagtgcaaacttggggtatgactgggggagagtggaacatgccttttccgcacaatattaattcctttttgtatcagaaatgttcttttaggagattatgctaccatacttacttcaaacccaatgactactgtcaaggacatattttcagtacataaatactatcattttcattctaaagaatattttcactgttccttctttcttaaagtcttatgtttcactctttaactcaaatgtattctttgttagaatttaccctagattcttatttaatgtctgcagtagactgaatgtttgtgtgcaccgagaattctaatgttgaaatctcatttccaatgtgatggtatttggaggtggggcttttggtaagtgataggtcaggagagtaacagcgctcatgaatgggattagtgcccttatataaagagacccagagagctccatcaccccttctgccatgtgaaagggagaagacaaacatccacgaaccaggaagtgggtcctcaccagaaaacaaatctgtaagcaccttgatcttggacttcccagcctccagaattgtgagaaataaatttctgttgttgat

SEQ ID NO: 302801 - DNA, 2103 bp, Homo sapiens
ccgcagggagcctggtacccgcctggagttcctttcccagtgctttcccataggcatctaagaatattccttcacagagttgccaagtgctaaaagttggtttcccaactcagaatgaaggaaccaggcttgtgcgtccgatgggcattgacattctggaaaacaagaataagaagctgtagcggcgcctgtaagtgggccggagcaggcgcagcttggccacctcccgccgaaaggcaaggaaggaccggctgcgacacgaggaagaaggcccctcggcctcagcagagcgctatcctccactggttacccgggttccccggcttgctaccgggctgctccgtgcatctttccccccaggcgtcaggaactgcgccctcatggcggaggtgaaggtgaaggtgcagccgcctgacgcggatccggtcgaaatagaaaacagggtcagttggatctcttaaggagcaatacgggccttttatatagaataaaggactctcagaatgctggtaaaatgaagggatccgataaccaagaaaaactagtatatcaaatcatagaggatgcaggaaataaaggaatatggagcagagatatccgctataaaagtaatttgccattaacagaaatcaacaaaattctgaagaatctggaaagtaaaaagcttatcaaagctgttaagtctgtagcagcctcaaaaaagaaggtgtatatgctctataacctgcagccagaccggtctgtgactggtggagcctggtacagtgaccaggattttgaatctgaatttgtagaggtgcttaaccaacagtgttttaaattcctacagtccaaggcagaaacagcacgagaaagcaaacagaacccaatgatacaaagaaatagttcatttgcctcatcacatgaagtgtggaaatatatctgcgaattgggaatcagtaaggtttttgatgactgccacgaaggtggtgagatttcaccatctaactgtatttacatgacagagtggctcgaattttaatagagagctatgaactttattgacattttgcaaatgaagttacttagggagcagataatttaattcatgatggaacacgaaatctccttgaaagcaaacttcacaataatggacgtagacttgctgctatgaaaacatattttttttatttatgaagactaaatttatattggtaaaatagccagtagaatatgaaagaaataaggttagtagtgaaattcattcttcaataaataaaacactttgaaactccggaggaccacatctttcaagacttctgatgggtcaaggaaaaagatgccaacatacccgtatttaccaagtactatgataatggctagagtataaaaatgttctttttaaagttatttattaagttcttcattggaagtttttttttatatctggttcactaccaccattttctgtttcctactttctcagtggtttcattgaaaagaaattagaagtggttaaaggcaggaatagcaaagagtgcaaacttggggtatgactgggggagagtggaacatgccttttccgcacaatattaattcctttttgtatcagaaatgttcttttaggagattatgctaccatacttacttcaaacccaatgactactgtcaaggacatattttcagtacataaatactatcattttcattctaaagaatattttcactgttccttctttcttaaagtcttatgtttcactctttaactcaaatgtattctttgttagaatttaccctagattcttatttaatgtctgcagtagactgaatgtttgtgtgcaccgagaattctaatgttgaaatctcatttccaatgtgatggtatttggaggtggggcttttggtaagtgataggtcaggagagtaacagcgctcatgaatgggattagtgcccttatataaagagacccagagagctccatcaccccttctgccatgtgaaagggagaagacaaacatccacgaaccaggaagtgggtcctcaccagaaaacaaatctgtaagcaccttgatcttggacttcccagcctccagaattgtgagaaataaatttctgttgttgat

SEQ ID NO: 302802 - DNA, 1778 bp, Homo sapiens
ccgcagggagcctggtacccgcctggagttcctttcccagtgctttcccataggcatctaagaatattccttcacagagttgccaagtgctaaaagttggtttcccaactcagaatgaaggaaccaggcttgtgcgtccgatgggcattgacattctggaaaacaagaataagaagctgtagcggcgcctgtaagtgggccggagcaggcgcagcttggccacctcccgccgaaaggcaaggaaggaccggctgcgacacgaggaagaaggcccctcggcctcagcagagcgctatcctccactggttacccgggttccccggcttgctaccgggctgctccgtgcatctttccccccaggcgtcaggaactgcgccctcatggcggaggtgaaggtgaaggtgcagccgcctgacgcggatccggtcgaaatagaaaacagggtcagttggatctcttaaggagcaatacgggccttttatatagaataaaggactctcagaatgctgggcagaaacagcacgagaaagcaaacagaacccaatgatacaaagaaatagttcatttgcctcatcacatgaagtgtggaaatatatctgcgaattgggaatcagtaaggtttttgatgactgccacgaaggtggtgagatttcaccatctaactgtatttacatgacagagtggctcgaattttaatagagagctatgaactttattgacattttgcaaatgaagttacttagggagcagataatttaattcatgatggaacacgaaatctccttgaaagcaaacttcacaataatggacgtagacttgctgctatgaaaacatattttttttatttatgaagactaaatttatattggtaaaatagccagtagaatatgaaagaaataaggttagtagtgaaattcattcttcaataaataaaacactttgaaactccggaggaccacatctttcaagacttctgatgggtcaaggaaaaagatgccaacatacccgtatttaccaagtactatgataatggctagagtataaaaatgttctttttaaagttatttattaagttcttcattggaagtttttttttatatctggttcactaccaccattttctgtttcctactttctcagtggtttcattgaaaagaaattagaagtggttaaaggcaggaatagcaaagagtgcaaacttggggtatgactgggggagagtggaacatgccttttccgcacaatattaattcctttttgtatcagaaatgttcttttaggagattatgctaccatacttacttcaaacccaatgactactgtcaaggacatattttcagtacataaatactatcattttcattctaaagaatattttcactgttccttctttcttaaagtcttatgtttcactctttaactcaaatgtattctttgttagaatttaccctagattcttatttaatgtctgcagtagactgaatgtttgtgtgcaccgagaattctaatgttgaaatctcatttccaatgtgatggtatttggaggtggggcttttggtaagtgataggtcaggagagtaacagcgctcatgaatgggattagtgcccttatataaagagacccagagagctccatcaccccttctgccatgtgaaagggagaagacaaacatccacgaaccaggaagtgggtcctcaccagaaaacaaatctgtaagcaccttgatcttggacttcccagcctccagaattgtgagaaataaatttctgttgttgat

SEQ ID NO: 302803 - DNA, 1226 bp, Homo sapiens
ccgcagggagcctggtacccgcctggagttcctttcccagtgctttcccataggcatctaagaatattccttcacagagttgccaagtgctaaaagttggtttcccaactcagaatgaaggaaccaggcttgtgcgtccgatgggcattgacattctggaaaacaagaataagaagctgtagcggcgcctgtaagtgggccggagcaggcgcagcttggccacctcccgccgaaaggcaaggaaggaccggctgcgacacgaggaagaaggcccctcggcctcagcagagcgctatcctccactggttacccgggttccccggcttgctaccgggctgctccgtgcatctttccccccaggcgtcaggaactgcgccctcatggcggaggtgaaggtgaaggtgcagccgcctgacgcggatccggtcgaaatagaaaacaggattatagaattatgtcaccagttccctcatggaatcacagaccaagtaattcagaatgaaatgcctcatatagaagcccagcagcgggcagtagccatcaataggttgttgtctatgggtcagttggatctcttaaggagcaatacgggccttttatatagaataaaggactctcagaatgctggtaaaatgaagggatccgataaccaagaaaaactagtatatcaaatcatagaggatgcaggaaataaaggaatatggagcagagatatccgctataaaagtaatttgccattaacagaaatcaacaaaattctgaagaatctggaaagtaaaaagcttatcaaagctgttaagtctgtagcagcctcaaaaaagaaggtgtatatgctctataacctgcagccagaccggtctgtgactggtggagcctggtacagtgaccaggattttgaatctgaatttgtagaggtgcttaaccaacagtgttttaaattcctacagtccaaggcagaaacagcacgagaaagcaaacagaacccaatgatacaaagaaatagttcatttgcctcatcacatgaagtgtggaaatatatctgcgaattgggaatcagtaaggtagagttatccatggaagacattgaaaccatcctgaatacactcatttatgatggaaaagtggagatgacgattattgctgcaaaagaaggcacagttggcagtgtagatggatagaatgtctgtggtgtatctcaaatttatggtccatatctcaagctatgg

SEQ ID NO: 302804 - DNA, 1204 bp, Homo sapiens
ccgcagggagcctggtacccgcctggagttcctttcccagtgctttcccataggcatctaagaatattccttcacagagttgccaagtgctaaaagttggtttcccaactcagaatgaaggaaccaggcttgtgcgtccgatgggcattgacattctggaaaacaagaataagaagctgtagcggcgcctgtaagtgggccggagcaggcgcagcttggccacctcccgccgaaaggcaaggaaggaccggctgcgacacgaggaagaaggcccctcggcctcagcagagcgctatcctccactggttacccgggttccccggcttgctaccgggctgctccgtgcatctttccccccaggcgtcaggaactgcgccctcatggcggaggtgaaggtgaaggtgcagccgcctgacgcggatccggtcgaaatagaaaacaggattatagaattatgtcaccagttccctcatggaatcacagaccaagtaattcagaatgaaatgcctcatatagaagcccagcagcgggcagtagccatcaataggttgttgtctatggtaaggtgaatctaactattttgcataattactgatatgctgattatcactggtttttattatgtagttgtgatggttaatttcatgtcaacttgactaagatacaggattcctacatatctagttaaatattttattggagtgtctgtgtgggtgtttctgaaagaggttagcattttgaattggtgaacggagtaaagtagatatgggtccagttgggtgagcatcatccaatccattcagggcctaaatagaacaaagtggcagaggaagattgaattcactctttgaattcaatcttgagctgggctatgaatcttgtgccctcagcactcctggttctcagaccttcagacttggactggtatctacaccatcagctctctgctctcagccctttgatctgcaacaccagctttcctgggtctccagcttgcagagggcagatgatgggactcctcagcctccataatcacagagcaaatagcttctgatgaatctttcaagagggaggtgtatcctattggttctttttctctggagaaccctaatacagcagtcataaaacgagaaagtgtgttaggtttgactgataagactctaaaccaggaaacagctcaaactacctgaattgaaaaaagaag

SEQ ID NO: 302805 - DNA, 481 bp, Homo sapiens
tcttttggtaaatatgtcactgtggtgaccttgtctgctaattttgtttaagtagtgatgtagattattagattatcctatagtccttaccttactaattttactttattccactacagttaaaatgaagggatccgataaccaagaaaaactagtatatcaaatcatagaggatgcaggaaataaaggtaagcatgtgaaagatgaagcagaaaaaaacattgtctttggaactagatatagggacccagatctcagcttcccagggtagaactcagtggacagagtatactgaggaaggtaatagaacatacaaatataacatgcatgtgcttgaaggacacccaagagtaaggccgttgttgccttgaaagagacaagaactaaagggctgtgtccagggatggaaaaagacgtctgaattctgagtcacatgaatgtattatctattcaaaataaataaaatttaagtttttttttt

SEQ ID NO: 302806 - DNA, 1047 bp, Homo sapiens
ccgcagggagcctggtacccgcctggagttcctttcccagtgctttcccataggcatctaagaatattccttcacagagttgccaagtgctaaaagttggtttcccaactcagaatgaaggaaccaggcttgtgcgtccgatgggcattgacattctggaaaacaagaataagaagctgtagcggcgcctgtaagtgggccggagcaggcgcagcttggccacctcccgccgaaaggcaaggaaggaccggctgcgacacgaggaagaaggcccctcggcctcagcagagcgctatcctccactggttacccgggttccccggcttgctaccgggctgctccgtgcatctttccccccaggcgtcaggaactgcgccctcatggcggaggtgaaggtgaaggtgcagccgcctgacgcggatccggtcgaaatagaaaacaggattatagaattatgtcaccagttccctcatggaatcacagaccaagtaattcagaatgaaatgcctcatatagaagcccagcagcgggcagtagccatcaataggttgttgtctatgggtcagttggatctcttaaggagcaatacgggccttttatatagaataaaggactctcagaatgctggtaaaatgaagggatccgataaccaagaaaaactagtatatcaaatcatagaggatgcaggaaataaaggaatatggagcagagatatccgctataaaagtaatttgccattaacagaaatcaacaaaattctgaagaatctggaaagtaaaaagcttatcaaagctgttaagtctgtagcagcctcaaaaaagaaggtgtatatgctctataacctgcagccagaccggtctgtgactggtggagcctggtacagtgaccaggattttgaatctgaatttgtagaggtgcttaaccaacagtgttttaaattcctacagtccaagagaacagccgagaagcgaacgagcccgatacggaccccacaccacggaagggcctggcccacggggtgacgggcacccggggcgcgccgggcag

SEQ ID NO: 302807 - DNA, 2353 bp, Homo sapiens
ccgcagggagcctggtacccgcctggagttcctttcccagtgctttcccataggcatctaagaatattccttcacagagttgccaagtgctaaaagttggtttcccaactcagaatgaaggaaccaggcttgtgcgtccgatgggcattgacattctggaaaacaagaataagaagctgtagcggcgcctgtaagtgggccggagcaggcgcagcttggccacctcccgccgaaaggcaaggaaggaccggctgcgacacgaggaagaaggcccctcggcctcagcagagcgctatcctccactggttacccgggttccccggcttgctaccgggctgctccgtgcatctttccccccaggcgtcaggaactgcgccctcatggcggaggtgaaggtgaaggtgcagccgcctgacgcggatccggtcgaaatagaaaacaggattatagaattatgtcaccagttccctcatggaatcacagaccaagtaattcagaatgaaatgcctcatatagaagcccagcagcgggcagtagccatcaataggttgttgtctatgggtcagttggatctcttaaggagcaatacgggccttttatatagaataaaggactctcagaatgctggtaaaatgaagggatccgataaccaagaaaaactagtatatcaaatcatagaggatgcaggaaataaaggaatatggagcagagatatccgctataaaagtaatttgccattaacagaaatcaacaaaattctgaagaatctggaaagtaaaaagcttatcaaagctgttaagtctgtagcaggagcctggtacagtgaccaggattttgaatctgaatttgtagaggtgcttaaccaacagtgttttaaattcctacagtccaaggcagaaacagcacgagaaagcaaacagaacccaatgatacaaagaaatagttcatttgcctcatcacatgaagtgtggaaatatatctgcgaattgggaatcagtaaggtagagttatccatggaagacattgaaaccatcctgaatacactcatttatgatggaaaagtggagatgacgattattgctgcaaaagaaggcacagttggcagtgtagatggacacatgaaactgtacagggcagtcaatccaatcatccctcccacgggtttggtccgggcaccctgtggactctgcccggtttttgatgactgccacgaaggtggtgagatttcaccatctaactgtatttacatgacagagtggctcgaattttaatagagagctatgaactttattgacattttgcaaatgaagttacttagggagcagataatttaattcatgatggaacacgaaatctccttgaaagcaaacttcacaataatggacgtagacttgctgctatgaaaacatattttttttatttatgaagactaaatttatattggtaaaatagccagtagaatatgaaagaaataaggttagtagtgaaattcattcttcaataaataaaacactttgaaactccggaggaccacatctttcaagacttctgatgggtcaaggaaaaagatgccaacatacccgtatttaccaagtactatgataatggctagagtataaaaatgttctttttaaagttatttattaagttcttcattggaagtttttttttatatctggttcactaccaccattttctgtttcctactttctcagtggtttcattgaaaagaaattagaagtggttaaaggcaggaatagcaaagagtgcaaacttggggtatgactgggggagagtggaacatgccttttccgcacaatattaattcctttttgtatcagaaatgttcttttaggagattatgctaccatacttacttcaaacccaatgactactgtcaaggacatattttcagtacataaatactatcattttcattctaaagaatattttcactgttccttctttcttaaagtcttatgtttcactctttaactcaaatgtattctttgttagaatttaccctagattcttatttaatgtctgcagtagactgaatgtttgtgtgcaccgagaattctaatgttgaaatctcatttccaatgtgatggtatttggaggtggggcttttggtaagtgataggtcaggagagtaacagcgctcatgaatgggattagtgcccttatataaagagacccagagagctccatcaccccttctgccatgtgaaagggagaagacaaacatccacgaaccaggaagtgggtcctcaccagaaaacaaatctgtaagcaccttgatcttggacttcccagcctccagaattgtgagaaataaatttctgttgttgat

SEQ ID NO: 302808 - DNA, 2505 bp, Homo sapiens
  misc_feature (1)..(1): n is a, c, g, or t
nattacggctaaggtacgagaccggcgttatcagaatccaggggcccggggctgtagattccttgacaaggatatcctagcggcgaaacaacaccgtactgggagtcagaacgtctgggttctagtcttgactgccattaactagcggtatgacattggagaagcttttttgacccttctggatttccgtttccttttctgtaaaatgaggagcttggaagatccggaaaatgaggcccataggaaacaagtgacttgctgagtccagataacactgactgtcagagagaaacatgaaccagaagctactgaagttggagaacttgctacgatttcacactatttataggcaactgcacagtctgtgtcaaagaagagcattaagacagtggaggcatgggttttcatctgcttaccctgtgtggacagctcaactgtgtgcctggccctggccaacagatgtgctcaatggggctgctttatctcagtataggcttctagtaacaaaaaaggaagaaggaccatggaaatctcagttatcttcaacaaaatctaaaaaggtggtagaagtatggattggaatgactattgaggaactggccagggcaatggaaaaaaacacagattatgtatatgaagctttattgaacactgatattgacatagattcactggaagcagactcacatttagatgaagtctggatcaaagaagtgataacgaaggcagggatgaagttaaagtggagtaaattaaaacaggacaaagtcagaaaaaataaagatgctgtaagaaggccccaggcagatccagctttattaaccccaaggtccccagttgttactataatgggccatgttgatcacgggaaaacgacattacttgacaaatttcgaaaaactcaagtggcagcagtggaaactggaggcatcactcagcacattggtgcctttcttgtctctctgccttctggggaaaagataacttttcttgatactccaggacatgctgctttctcagcaatgagagccagaggtgctcaggtcactgacattgtcgtattggttgtagctgcagatgatggagtgatgaaacaaactgtagaatctattcagcatgccaaagatgcacaggttcctattatccttgccgtaaataaatgtgacaaagctgaggctgatcctgagaaagtgaaaaaagagctgctggcttacgatgtggtatgtgaagattatggaggtgatgttcaagcagtgcctgtctccgcacttacgggcgataatctgatggctttggcagaagcaacagttgctcttgcagaaatgttagaattgaaagcagatcccaatggtccagtggaaggaacagtaatagagtctttcacagacaaaggaagaggtcttgttactacagctataattcaaagaggaactttaagaaaaggctctgttctggttgctggaaaatgttgggcaaaagtacgcttaatgtttgatgaaaatggaaaaacaattgatgaggcctatcccagcatgccagtgggaattacaggctggagagaccttccttctgcaggagaagaaattcttgaagtagaatctgagccaagggcacgtgaagttgttgactggaggaaatatgaacaagaacaggagaaaggtcaggaggatctgaaaataatagaagaaaagcgaaaggaacacaaagaagcacatcagaaagcccgtgagaagtatggccatctactgtggaagaagagatcaattctacggtttttagaaagaaaagaacaaatacccttaaagccaaaagagaaaagggaaagagattcaaatgtactttctgtgattattaaaggtgatgttgatggttctgttgaggccattttgaacattatagatacctatgatgcttcacacgagtgtgaactagaattagtacattttggagtgggtgatataagtgcaaatgatgttaaccttgctgaaacatttgatggtgttatatatggctttaatgtgaatgcaggcaatgttatccaacagtcagctgcaaaaaaaggagtaaaaattaaacttcacaaaataatttaccgtcttgttgaagatttgcaagaggaactgagcagcagattaccctgtgctgtggaagagcacccagtaggtgaggcatctatactagctaccttctctgtaacagaagggaagaaaaaagttcctgtggctggctgcagagtccaaaagggacagttagaaaaacaaaaaaaatttaaactaacccgtaatggacatgtaatttggaagggctcattaacctcattgaaacaccataaagatgacatttcaattgtcaaaacgggaatggattgtggtctcagtttagatgaagacaatatggaatttcaagtgggagacagaattgtttgttatgaagaaaagcaaattcaagccaagacttcttgggatccaggattttaaaattacattaaaaatgtaaataactcaa

SEQ ID NO: 302809 - DNA, 3020 bp, Homo sapiens
acggactgacctaccgaccattcttccgggtccagaaggtgatctccgcccgtgctcagaatccaggggcccggggctgtaggtaggagttaagtgggtaggatcccttaaccagggttgtccggtgcaggtggtgtgtgttgtttcgcctaacgtgtcagtggcacaaatcacgcgaacttcataaacattgtgcgttcggaagcctttccaagatgcatttaatccctgcgtgagcccacgttaggcattcacgaaggcatgtgcactgttctctcggaagcggctggccggcttcccctcctcgcgcgcggctgtgggtgcaggtcctcacttcccagcctcccatgggcccaaggccttctgggctccaatttgaggcgagccaccccagatccgtaatttttctgcagtgatttatttttacctttctgattccttgacaaggatatcctagcggcgaaacaacaccgtactgggagtcagaacgtctgggttctagtcttgactgccattaactagcggtatgacattggagaagcttttttgacccttctggatttccgtttccttttctgtaaaatgaggagcttggaagatccggaaaatgaggcccataggaaacaagtgacttgctgagtccagataacactgactgtcagaagtctcgctctgtctccccggctggagtgcagtggcgtgatcttggctcactgcaacctctgtctcccgggttcaagaaattctcctgcctcagcctcccaagtagctgggactacaggcatgtgccaccacgcccaggagaaacatgaaccagaagctactgaagttggagaacttgctacgatttcacactatttataggcaactgcacagtctgtgtcaaagaagagcattaagacagtggaggcatgggttttcatctgcttaccctgtgtggacagctcaactgtgtgcctggccctggccaacagatgtgctcaatggggctgctttatctcagtataggcttctagtaacaaaaaaggaagaaggaccatggaaatctcagttatcttcaacaaaatctaaaaaggtggtagaagtatggattggaatgactattgaggaactggccagggcaatggaaaaaaacacagattatgtatatgaagctttattgaacactgatattgacatagattcactggaagcagactcacatttagatgaagtctggatcaaagaagtgataacgaaggcagggatgaagttaaagtggagtaaattaaaacaggacaaagtcagaaaaaataaagatgctgtaagaaggccccaggcagatccagctttattaaccccaaggtccccagttgttactataatgggccatgttgatcacgggaaaacgacattacttgacaaatttcgaaaaactcaagtggcagcagtggaaactggaggcatcactcagcacattggtgcctttcttgtctctctgccttctggggaaaagataacttttcttgatactccaggacatgctgctttctcagcaatgagagccagaggtgctcaggtcactgacattgtcgtattggttgtagctgcagatgatggagtgatgaaacaaactgtagaatctattcagcatgccaaagatgcacaggttcctattatccttgccgtaaataaatgtgacaaagctgaggctgatcctgagaaagtgaaaaaagagctgctggcttacgatgtggtatgtgaagattatggaggtgatgttcaagcagtgcctgtctccgcacttacgggcgataatctgatggctttggcagaagcaacagttgctcttgcagaaatgttagaattgaaagcagatcccaatggtccagtggaaggaacagtaatagagtctttcacagacaaaggaagaggtcttgttactacagctataattcaaagaggaactttaagaaaaggctctgttctggttgctggaaaatgttgggcaaaagtacgcttaatgtttgatgaaaatggaaaaacaattgatgaggcctatcccagcatgccagtgggaattacaggctggagagaccttccttctgcaggagaagaaattcttgaagtagaatctgagccaagggcacgtgaagttgttgactggaggaaatatgaacaagaacaggagaaaggtcaggaggatctgaaaataatagaagaaaagcgaaaggaacacaaagaagcacatcagaaagcccgtgagaagtatggccatctactgtggaagaagagatcaattctacggtttttagaaagaaaagaacaaatacccttaaagccaaaagagaaaagggaaagagattcaaatgtactttctgtgattattaaaggtgatgttgatggttctgttgaggccattttgaacattatagatacctatgatgcttcacacgagtgtgaactagaattagtacattttggagtgggtgatataagtgcaaatgatgttaaccttgctgaaacatttgatggtgttatatatggctttaatgtgaatgcaggcaatgttatccaacagtcagctgcaaaaaaaggagtaaaaattaaacttcacaaaataatttaccgtcttgttgaagatttgcaagaggaactgagcagcagattaccctgtgctgtggaagagcacccagtaggtgaggcatctatactagctaccttctctgtaacagaagggaagaaaaaagttcctgtggctggctgcagagtccaaaagggacagttagaaaaacaaaaaaaatttaaactaacccgtaatggacatgtaatttggaagggctcattaacctcattgaaacaccataaagatgacatttcaattgtcaaaacgggaatggattgtggtctcagtttagatgaagacaatatggaatttcaagtgggagacagaattgtttgttatgaagaaaagcaaattcaagccaagacttcttgggatccaggattttaaaattacattaaaaatgtaaataactcaa

SEQ ID NO: 302810 - DNA, 3380 bp, Homo sapiens
acggactgacctaccgaccattcttccgggtccagaaggtgatctccgcccgtgctcagaatccaggggcccggggctgtaggtaggagttaagtgggtaggatcccttaaccagggttgtccggtgcaggtggtgtgtgttgtttcgcctaacgtgtcagtggcacaaatcacgcgaacttcataaacattgtgcgttcggaagcctttccaagatgcatttaatccctgcgtgagcccacgttaggcattcacgaaggcatgtgcactgttctctcggaagcggctggccggcttcccctcctcgcgcgcggctgtgggtgcaggtcctcacttcccagcctcccatgggcccaaggccttctgggctccaatttgaggcgagccaccccagatccgtaatttttctgcagtgatttatttttacctttctgattccttgacaaggatatcctagcggcgaaacaacaccgtactgggagtcagaacgtctgggttctagtcttgactgccattaactagcggtatgacattggagaagcttttttgacccttctggatttccgtttccttttctgtaaaatgaggagcttggaagatccggaaaatgaggcccataggaaacaagtgacttgctgagtccagataacactgactgtcagaagtctcgctctgtctccccggctggagtgcagtggcgtgatcttggctcactgcaacctctgtctcccgggttcaagaaattctcctgcctcagcctcccaagtagctgggactacaggcatgtgccaccacgcccaggagaaacatgaaccagaagctactgaagttggagaacttgctacgatttcacactatttataggcaactgcacagtctgtgtcaaagaagagcattaagacagtggaggcatgggttttcatctgcttaccctgtgtggacagctcaactgtgtgcctggccctggccaacagatgtgctcaatggggctgctttatctcagtataggcttctagtaacaaaaaaggaagaaggaccatggaaatctcagttatcttcaacaaaatctaaaaaggtggtagaagtatggattggaatgactattgaggaactggccagggcaatggaaaaaaacacagattatgtatatgaagctttattgaacactgatattgacatagattcactggaagcagactcacatttagatgaagtctggatcaaagaagtgataacgaaggcagggatgaagttaaagtggagtaaattaaaacaggacaaagtcagaaaaaataaagatgctgtaagaaggccccaggcagatccagctttattaaccccaaggtccccagttgttactataatgggccatgttgatcacgggaaaacgacattacttgacaaatttcgaaaaactcaagtggcagcagtggaaactggaggcatcactcagcacattggtgcctttcttgtctctctgccttctggggaaaagataacttttcttgatactccaggacatgctgctttctcagcaatgagagccagaggtgctcaggtcactgacattgtcgtattggttgtagctgcagatgatggagtgatgaaacaaactgtagaatctattcagcatgccaaagatgcacaggttcctattatccttgccgtaaataaatgtgacaaagctgaggctgatcctgagaaagtgaaaaaagagctgctggcttacgatgtggtatgtgaagattatggaggtgatgttcaagcagtgcctgtctccgcacttacgggcgataatctgatggctttggcagaagcaacagttgctcttgcagaaatgttagaattgaaagcagatcccaatggtccagtggaaggaacagtaatagagtctttcacagacaaaggaagaggtcttgttactacagctataattcaaagaggaactttaagaaaaggctctgttctggttgctggaaaatgttgggcaaaagtacgcttaatgtttgatgaaaatggaaaaacaattgatgaggcctatcccagcatgccagtgggaattacaggctggagagaccttccttctgcaggagaagaaattcttgaagtagaatctgaggtgtatcaagcttaattcctatatattagatataatataatgattttaaatgccagtttacaatgttataccaaatatgtgtattaatgttaacaaatctagattataaggggctgtgaggatgcaagttgtgctattttagcattagactatagaattttgggggtggggataagatttttaaatcatttcaattatacaagctctcaaattaaaattttacatgtttcttgaaacttataaaagtagtagtttcatacatgagttaagctaatttcctaatgcaggacaacacaaaggctttaatctagcagttattgatgtctatttcattaaataatacgtttttcccctataaagccaagggcacgtgaagttgttgactggaggaaatatgaacaagaacaggagaaaggtcaggaggatctgaaaataatagaagaaaagcgaaaggaacacaaagaagcacatcagaaagcccgtgagaagtatggccatctactgtggaagaagagatcaattctacggtttttagaaagaaaagaacaaatacccttaaagccaaaagagaaaagggaaagagattcaaatgtactttctgtgattattaaaggtgatgttgatggttctgttgaggccattttgaacattatagatacctatgatgcttcacacgagtgtgaactagaattagtacattttggagtgggtgatataagtgcaaatgatgttaaccttgctgaaacatttgatggtgttatatatggctttaatgtgaatgcaggcaatgttatccaacagtcagctgcaaaaaaaggagtaaaaattaaacttcacaaaataatttaccgtcttgttgaagatttgcaagaggaactgagcagcagattaccctgtgctgtggaagagcacccagtaggtgaggcatctatactagctaccttctctgtaacagaagggaagaaaaaagttcctgtggctggctgcagagtccaaaagggacagttagaaaaacaaaaaaaatttaaactaacccgtaatggacatgtaatttggaagggctcattaacctcattgaaacaccataaagatgacatttcaattgtcaaaacgggaatggattgtggtctcagtttagatgaagacaatatggaatttcaagtgggagacagaattgtttgttatgaagaaaagcaaattcaagccaagacttcttgggatccaggattttaaaattacattaaaaatgtaaataactcaa

SEQ ID NO: 302811 - DNA, 2720 bp, Homo sapiens
acggactgacctaccgaccattcttccgggtccagaaggtgatctccgcccgtgctcagaatccaggggcccggggctgtaggtaggagttaagtgggtaggatcccttaaccagggttgtccggtgcaggtggtgtgtgttgtttcgcctaacgtgtcagtggcacaaatcacgcgaacttcataaacattgtgcgttcggaagcctttccaagatgcatttaatccctgcgtgagcccacgttaggcattcacgaaggcatgtgcactgttctctcggaagcggctggccggcttcccctcctcgcgcgcggctgtgggtgcaggtcctcacttcccagcctcccatgggcccaaggccttctgggctccaatttgaggcgagccaccccagatccgtaatttttctgcagtgatttatttttacctttctgagatccggaaaatgaggcccataggaaacaagtgacttgctgagtccagataacactgactgtcagagagaaacatgaaccagaagctactgaagttggagaacttgctacgatttcacactatttataggcaactgcacagtctgtgtcaaagaagagcattaagacagtggaggcatgggttttcatctgcttaccctgtgtggacagctcaactgtgtgcctggccctggccaacagatgtgctcaatggggctgctttatctcagtataggcttctagtaacaaaaaaggaagaaggaccatggaaatctcagttatcttcaacaaaatctaaaaaggtggtagaagtatggattggaatgactattgaggaactggccagggcaatggaaaaaaacacagattatgtatatgaagctttattgaacactgatattgacatagattcactggaagcagactcacatttagatgaagtctggatcaaagaagtgataacgaaggcagggatgaagttaaagtggagtaaattaaaacaggacaaagtcagaaaaaataaagatgctgtaagaaggccccaggcagatccagctttattaaccccaaggtccccagttgttactataatgggccatgttgatcacgggaaaacgacattacttgacaaatttcgaaaaactcaagtggcagcagtggaaactggaggcatcactcagcacattggtgcctttcttgtctctctgccttctggggaaaagataacttttcttgatactccaggacatgctgctttctcagcaatgagagccagaggtgctcaggtcactgacattgtcgtattggttgtagctgcagatgatggagtgatgaaacaaactgtagaatctattcagcatgccaaagatgcacaggttcctattatccttgccgtaaataaatgtgacaaagctgaggctgatcctgagaaagtgaaaaaagagctgctggcttacgatgtggtatgtgaagattatggaggtgatgttcaagcagtgcctgtctccgcacttacgggcgataatctgatggctttggcagaagcaacagttgctcttgcagaaatgttagaattgaaagcagatcccaatggtccagtggaaggaacagtaatagagtctttcacagacaaaggaagaggtcttgttactacagctataattcaaagaggaactttaagaaaaggctctgttctggttgctggaaaatgttgggcaaaagtacgcttaatgtttgatgaaaatggaaaaacaattgatgaggcctatcccagcatgccagtgggaattacaggctggagagaccttccttctgcaggagaagaaattcttgaagtagaatctgagccaagggcacgtgaagttgttgactggaggaaatatgaacaagaacaggagaaaggtcaggaggatctgaaaataatagaagaaaagcgaaaggaacacaaagaagcacatcagaaagcccgtgagaagtatggccatctactgtggaagaagagatcaattctacggtttttagaaagaaaagaacaaatacccttaaagccaaaagagaaaagggaaagagattcaaatgtactttctgtgattattaaaggtgatgttgatggttctgttgaggccattttgaacattatagatacctatgatgcttcacacgagtgtgaactagaattagtacattttggagtgggtgatataagtgcaaatgatgttaaccttgctgaaacatttgatggtgttatatatggctttaatgtgaatgcaggcaatgttatccaacagtcagctgcaaaaaaaggagtaaaaattaaacttcacaaaataatttaccgtcttgttgaagatttgcaagaggaactgagcagcagattaccctgtgctgtggaagagcacccagtaggtgaggcatctatactagctaccttctctgtaacagaagggaagaaaaaagttcctgtggctggctgcagagtccaaaagggacagttagaaaaacaaaaaaaatttaaactaacccgtaatggacatgtaatttggaagggctcattaacctcattgaaacaccataaagatgacatttcaattgtcaaaacgggaatggattgtggtctcagtttagatgaagacaatatggaatttcaagtgggagacagaattgtttgttatgaagaaaagcaaattcaagccaagacttcttgggatccaggattttaaaattacattaaaaatgtaaataactcaa

SEQ ID NO: 302812 - DNA, 2075 bp, Homo sapiens
taagcaattctcctgcctcagcctcctgagtagctggggttacaggcattagccaccgcacccgctatagttacagatttctgaagaaggaccatggaaatctcagttatcttcaacaaaatctaaaaaggtggtagaagtatggattggaatgactattgaggaactggccagggcaatggaaaaaaacacagattatgtatatgaagctttattgaacactgatattgacatagattcactggaagcagactcacatttagatgaagtctggatcaaagaagtgataacgaaggcagggatgaagttaaagtggagtaaattaaaacaggacaaagtcagaaaaaataaagatgctgtaagaaggccccaggcagatccagctttattaaccccaaggtccccagttgttactataatgggccatgttgatcacgggaaaacgacattacttgacaaatttcgaaaaactcaagtggcagcagtggaaactggaggcatcactcagcacattggtgcctttcttgtctctctgccttctggggaaaagataacttttcttgatactccaggacatgctgctttctcagcaatgagagccagaggtgctcaggtcactgacattgtcgtattggttgtagctgcagatgatggagtgatgaaacaaactgtagaatctattcagcatgccaaagatgcacaggttcctattatccttgccgtaaataaatgtgacaaagctgaggctgatcctgagaaagtgaaaaaagagctgctggcttacgatgtggtatgtgaagattatggaggtgatgttcaagcagtgcctgtctccgcacttacgggcgataatctgatggctttggcagaagcaacagttgctcttgcagaaatgttagaattgaaagcagatcccaatggtccagtggaaggaacagtaatagagtctttcacagacaaaggaagaggtcttgttactacagctataattcaaagaggaactttaagaaaaggctctgttctggttgctggaaaatgttgggcaaaagtacgcttaatgtttgatgaaaatggaaaaacaattgatgaggcctatcccagcatgccagtgggaattacaggctggagagaccttccttctgcaggagaagaaattcttgaagtagaatctgagccaagggcacgtgaagttgttgactggaggaaatatgaacaagaacaggagaaaggtcaggaggatctgaaaataatagaagaaaagcgaaaggaacacaaagaagcacatcagaaagcccgtgagaagtatggccatctactgtggaagaagagatcaattctacggtttttagaaagaaaagaacaaatacccttaaagccaaaagagaaaagggaaagagattcaaatgtactttctgtgattattaaaggtgatgttgatggttctgttgaggccattttgaacattatagatacctatgatgcttcacacgagtgtgaactagaattagtacattttggagtgggtgatataagtgcaaatgatgttaaccttgctgaaacatttgatggtgttatatatggctttaatgtgaatgcaggcaatgttatccaacagtcagctgcaaaaaaaggagtaaaaattaaacttcacaaaataatttaccgtcttgttgaagatttgcaagaggaactgagcagcagattaccctgtgctgtggaagagcacccagtaggtgaggcatctatactagctaccttctctgtaacagaagggaagaaaaaagttcctgtggctggctgcagagtccaaaagggacagttagaaaaacaaaaaaaatttaaactaacccgtaatggacatgtaatttggaagggctcattaacctcattgaaacaccataaagatgacatttcaattgtcaaaacgggaatggattgtggtctcagtttagatgaagacaatatggaatttcaagtgggagacagaattgtttgttatgaagaaaagcaaattcaagccaagacttcttgggatccaggattttaaaattacattaaaaatgtaaataactcaa

SEQ ID NO: 302813 - DNA, 2369 bp, Homo sapiens
acggactgacctaccgaccattcttccgggtccagaaggtgatctccgcccgtgctcagaatccaggggcccggggctgtagattccttgacaaggatatcctagcggcgaaacaacaccgtactgggagtcagaacgtctgggttctagtcttgactgccattaactagcggtatgacattggagaagcttttttgacccttctggatttccgtttccttttctgtaaaatgaggagcttggaagatccggaaaatgaggcccataggaaacaagtgacttgctgagtccagataacactgactgtcagagagaaacatgaaccagaagctactgaagttggagaacttgctacgatttcacactatttataggcaactgcacagtctgtgtcaaagaagagcattaagacagtggaggcatgggttttcatctgcttaccctgtgtggacagctcaactgtgtgcctggccctggccaacagatgtgctcaatggggctgctttatctcagtataggcttctagtaacaaaaaaggaagaaggaccatggaaatctcagttatcttcaacaaaatctaaaaaggtggtagaagtatggattggaatgactattgaggaactggccagggcaatggaaaaaaacacagattatgtatatgaagctttattgaacactgatattgacatagattcactggaagcagactcacatttagatgaagtctggatcaaagaagtgataacgaaggcagggatgaagttaaagtggagtaaattaaaacaggacaaagtcagaaaaaataaagatgctgtaagaagtctctctgccttctggggaaaagataacttttcttgatactccaggacatgctgctttctcagcaatgagagccagaggtgctcaggtcactgacattgtcgtattggttgtagctgcagatgatggagtgatgaaacaaactgtagaatctattcagcatgccaaagatgcacaggttcctattatccttgccgtaaataaatgtgacaaagctgaggctgatcctgagaaagtgaaaaaagagctgctggcttacgatgtggtatgtgaagattatggaggtgatgttcaagcagtgcctgtctccgcacttacgggcgataatctgatggctttggcagaagcaacagttgctcttgcagaaatgttagaattgaaagcagatcccaatggtccagtggaaggaacagtaatagagtctttcacagacaaaggaagaggtcttgttactacagctataattcaaagaggaactttaagaaaaggctctgttctggttgctggaaaatgttgggcaaaagtacgcttaatgtttgatgaaaatggaaaaacaattgatgaggcctatcccagcatgccagtgggaattacaggctggagagaccttccttctgcaggagaagaaattcttgaagtagaatctgagccaagggcacgtgaagttgttgactggaggaaatatgaacaagaacaggagaaaggtcaggaggatctgaaaataatagaagaaaagcgaaaggaacacaaagaagcacatcagaaagcccgtgagaagtatggccatctactgtggaagaagagatcaattctacggtttttagaaagaaaagaacaaatacccttaaagccaaaagagaaaagggaaagagattcaaatgtactttctgtgattattaaaggtgatgttgatggttctgttgaggccattttgaacattatagatacctatgatgcttcacacgagtgtgaactagaattagtacattttggagtgggtgatataagtgcaaatgatgttaaccttgctgaaacatttgatggtgttatatatggctttaatgtgaatgcaggcaatgttatccaacagtcagctgcaaaaaaaggagtaaaaattaaacttcacaaaataatttaccgtcttgttgaagatttgcaagaggaactgagcagcagattaccctgtgctgtggaagagcacccagtaggtgaggcatctatactagctaccttctctgtaacagaagggaagaaaaaagttcctgtggctggctgcagagtccaaaagggacagttagaaaaacaaaaaaaatttaaactaacccgtaatggacatgtaatttggaagggctcattaacctcattgaaacaccataaagatgacatttcaattgtcaaaacgggaatggattgtggtctcagtttagatgaagacaatatggaatttcaagtgggagacagaattgtttgttatgaagaaaagcaaattcaagccaagacttcttgggatccaggattttaaaattacattaaaaatgtaaataactcaa

SEQ ID NO: 302814 - DNA, 3036 bp, Homo sapiens
acggactgacctaccgaccattcttccgggtccagaaggtgatctccgcccgtgctcagaatccaggggcccggggctgtaggtaggagttaagtgggtaggatcccttaaccagggttgtccggtgcaggtggtgtgtgttgtttcgcctaacgtgtcagtggcacaaatcacgcgaacttcataaacattgtgcgttcggaagcctttccaagatgcatttaatccctgcgtgagcccacgttaggcattcacgaaggcatgtgcactgttctctcggaagcggctggccggcttcccctcctcgcgcgcggctgtgggtgcaggtcctcacttcccagcctcccatgggcccaaggccttctgggctccaatttgaggcgagccaccccagatccgtaatttttctgcagtgatttatttttacctttctgattccttgacaaggatatcctagcggcgaaacaacaccgtactgggagtcagaacgtctgggttctagtcttgactgccattaactagcggtatgacattggagaagcttttttgacccttctggatttccgtttccttttctgtaaaatgaggagcttggaagatccggaaaatgaggcccataggaaacaagtgacttgctgagtccagataacactgactgtcagaagtctcgctctgtctccccggctggagtgcagtggcgtgatcttggctcactgcaacctctgtctcccgggttcaagaaattctcctgcctcagcctcccaagtagctgggactacaggcatgtgccaccacgcccaggagaaacatgaaccagaagctactgaagttggagaacttgctacgatttcacactatttataggcaactgcacagtctgtgtcaaagaagagcattaagacagtggaggcatgggttttcatctgcttaccctgtgtggacagctcaactgtgtgcctggccctggccaacagatgtgctcaatggggctgctttatctcagtataggcttctagtaacaaaaaaggaagaaggaccatggaaatctcagttatcttcaacaaaatctaaaaaggtggtagaagtatggattggaatgactattgaggaactggccagggcaatggaaaaaaacacagattatgtatatgaagctttattgaacactgatattgacatagattcactggaagcagactcacatttagatgaagtctggatcaaagaagtgataacgaaggcagggatgaagttaaagtggagtaaattaaaacaggacaaagtcagaaaaaataaagatgctgtaagaaggccccaggcagatccagctttattaaccccaaggtccccagttgttactataatgggccatgttgatcacgggaaaacgacattacttgacaaatttcgaaaaactcaagtggcagcagtggaaactggaggcatcactcagcacattggtgcctttcttgtctctctgccttctggggaaaagataacttttcttgatactccaggacatgctgctttctcagcaatgagagccagaggtgctcaggtcactgacattgtcgtattggttgtagctgcagatgatggagtgatgaaacaaactgtagaatctattcagcatgccaaagatgcacaggttcctattatccttgccgtaaataaatgtgacaaagctgaggctgatcctgagaaagtgaaaaaagagctgctggcttacgatgtggtatgtgaagattatggaggtgatgttcaagcagtgcctgtctccgcacttacgggcgataatctgatggctttggcagaagcaacagttgctcttgcagaaatgttagaattgaaagcagatcccaatggtccagtggaaggaacagtaatagagtctttcacagacaaaggaagaggtcttgttactacagctataattcaaagaggaactttaagaaaaggctctgttctggttgctggaaaatgttgggcaaaagtacgcttaatgtttgatgaaaatggaaaaacaattgatgaggcctatcccagcatgccagtgggaattacaggctggagagaccttccttctgcaggagaagaaattcttgaagtagaatctgagccaagggcacgtgaagttgttgactggaggaaatatgaacaagaacaggagaaaggtcaggaggatctgaaaataatagaagaaaagcgaaaggaacacaaagaagcacatcagaaagcccgtgagaagtatggccatctactgtggaagaagagatcaattctacggtttttagaaagaaaagaacaaatacccttaaagccaaaagagaaaagggaaagagattcaaatgtactttctgtgattattaaaggtgatgttgatggttctgttgaggccattttgaacattatagatacctatgatgcttcacacgagtgtgaactagaattagtacattttggagtgggtgatataagtgcaaatgatgttaaccttgctgaaacatttgatggtgttatatatggctttaatgtgaatgcaggcaatgttatccaacagtcagctgcaaaaaaaggagtaaaaattaaacttcacaaaataatttaccgtcttgttgaagatttgcaagaggaactgagcagcagattaccctgtgctgtggaagagcacccagtaggtgaggcatctatactagctaccttctctgtaacagaagggaagaaaaaagttcctgtggctggctgcagagtccaaaagggacagttagaaaaacaaaaaaaatttaaactaacccgtaatggacatgtaatttggaagggctcattaacctcattgaaacaccataaagatgacatttcaattgtcaaaacgggaatggattgtggtctcagtttagatgaagacaatatggattcaggggggaccgaatgtgtgtgacgaaagcaattcagcagatcttggtccggcttcaatcttacatgttttccaaaaaaaggggggcaaataccggggcgctggcccttgtaaaggccagg

SEQ ID NO: 302815 - DNA, 2286 bp, Homo sapiens
acggactgacctaccgaccattcttccgggtccagaaggtgatctccgcccgtgctcagaatccaggggcccggggctgtaggtaggagttaagtgggtaggatcccttaaccagggttgtccggtgcaggtggtgtgtgttgtttcgcctaacgtgtcagtggcacaaatcacgcgaacttcataaacattgtgcgttcggaagcctttccaagatgcatttaatccctgcgtgagcccacgttaggcattcacgaaggcatgtgcactgttctctcggaagcggctggccggcttcccctcctcgcgcgcggctgtgggtgcaggtcctcacttcccagcctcccatgggcccaaggccttctgggctccaatttgaggcgagccaccccagatccgtaatttttctgcagtgatttatttttacctttctgattccttgacaaggatatcctagcggcgaaacaacaccgtactgggagtcagaacgtctgggttctagtcttgactgccattaactagcggtatgacattggagaagcttttttgacccttctggatttccgtttccttttctgtaaaatgaggagcttggaagatccggaaaatgaggcccataggaaacaagtgacttgctgagtccagataacactgactgtcagaagtctcgctctgtctccccggctggagtgcagtggcgtgatcttggctcactgcaacctctgtctcccgggttcaagaaattctcctgcctcagcctcccaagtagctgggactacaggcatgtgccaccacgcccaggagaaacatgaaccagaagctactgaagttggagaacttgctacgatttcacactatttataggcaactgcacagtctgtgtcaaagaagagcattaagacagtggaggcatgggttttcatctgcttaccctgtgtggacagctcaactgtgtgcctggccctggccaacagatgtgctcaatggggctgctttatctcagtataggcttctagtaacaaaaaaggaagaaggaccatggaaatctcagttatcttcaacaaaatctaaaaaggtggtagaagtatggattggaatgactattgaggaactggccagggcaatggaaaaaaacacagattatgtatatgaagctttattgaacactgatattgacatagattcactggaagcagactcacatttagatgaagtctggatcaaagaagtgataacgaaggcagggatgaagttaaagtggagtaaattaaaacaggacaaagtcagaaaaaataaagatgctgtaagaaggccccaggcagatccagctttattaaccccaaggtccccagttgttactataatgggccatgttgatcacgggaaaacgacattacttgacaaatttcgaaaaactcaagtggcagcagtggaaactggaggcatcactcagcacattggtgcctttcttgtctctctgccttctggggaaaagataacttttcttgatactccaggacatgctgctttctcagcaatgagagccagaggtgctcaggtcactgacattgtcgtattggttgtagctgcagatgatggagtgatgaaacaaactgtagaatctattcagcatgccaaagatgcacaggttcctattatccttgccgtaaataaatgtgacaaagctgaggctgatcctgagaaagtgaaaaaagagctgctggcttacgatgtggtatgtgaagattatggaggtgatgttcaagcagtgcctgtctccgcacttacgggcgataatctgatggctttggcagaagcaacagttgctcttgcagaaatgttagaattgaaagcagatcccaatggtccagtggaaggaacagtaatagagtctttcacagacaaaggaagaggtcttgttactacagctataattcaaagaggaactttaagaaaaggctctgttctggttgctggaaaatgttgggcaaaagtacgcttaatgtttgatgaaaatggaaaaacaattgatgaggcctatcccagcatgccagtgggaattacaggctggagagaccttccttctgcaggagaagaaattcttgaagtagaatctgagccaagggcacgtgaagttgttgactggaggaaatatgaacaagaacaggagaaaggtcaggaggatctgatatagagaaaggaagggaccaagagccttagaagccggaaagttggccctacggggggagagatatccggtagagaaagaacatctagcagaaaggg

SEQ ID NO: 302816 - DNA, 1854 bp, Homo sapiens
  misc_feature (1724)..(1724): n is a, c, g, or t
acggactgacctaccgaccattcttccgggtccagaaggtgatctccgcccgtgctcagaatccaggggcccggggctgtaggtaggagttaagtgggtaggatcccttaaccagggttgtccggtgcaggtggtgtgtgttgtttcgcctaacgtgtcagtggcacaaatcacgcgaacttcataaacattgtgcgttcggaagcctttccaagatgcatttaatccctgcgtgagcccacgttaggcattcacgaaggcatgtgcactgttctctcggaagcggctggccggcttcccctcctcgcgcgcggctgtgggtgcaggtcctcacttcccagcctcccatgggcccaaggccttctgggctccaatttgaggcgagccaccccagatccgtaatttttctgcagtgatttatttttacctttctgattccttgacaaggatatcctagcggcgaaacaacaccgtactgggagtcagaacgtctgggttctagtcttgactgccattaactagcggtatgacattggagaagcttttttgacccttctggatttccgtttccttttctgtaaaatgaggagcttggaagatccggaaaatgaggcccataggaaacaagtgacttgctgagtccagataacactgactgtcagaagtctcgctctgtctccccggctggagtgcagtggcgtgatcttggctcactgcaacctctgtctcccgggttcaagaaattctcctgcctcagcctcccaagtagctgggactacaggcatgtgccaccacgcccaggagaaacatgaaccagaagctactgaagttggagaacttgctacgatttcacactatttataggcaactgcacagtctgtgtcaaagaagagcattaagacagtggaggcatgggttttcatctgcttaccctgtgtggacagctcaactgtgtgcctggccctggccaacagatgtgctcaatggggctgctttatctcagtataggcttctagtaacaaaaaaggaagaaggaccatggaaatctcagttatcttcaacaaaatctaaaaaggtggtagaagtatggattggaatgactattgaggaactggccagggcaatggaaaaaaacacagattatgtatatgaagctttattgaacactgatattgacatagattcactggaagcagactcacatttagatgaagtctggatcaaagaagtgataacgaaggcagggatgaagttaaagtggagtaaattaaaacaggacaaagtcagaaaaaataaagatgctgtaagaaggccccaggcagatccagctttattaaccccaaggtccccagttgttactataatgggccatgttgatcacgggaaaacgacattacttgacaaatttcgaaaaactcaagtggcagcagtggaaactggaggcatcactcagcacattggtgcctttcttgtctctctgccttctggggaaaagataacttttcttgatactccaggacatgctgctttctcagcaatgagagccagaggtgctcaggtcactgacattgtcgtattggttgtagctgcagatgatggagtgatgaaacaaactgtagaatctattcagcatgccaaagatgcacaggttcctattatccttgccgtaaataaatgtgacaaagctgaggctgatcctgagaaaaaaaaaaaaaaaaaaaaanaaaaaacaccctttggggcccccctcacgccccagagaaaagtttttaaacccaatgcgtttgggcgcccgcggcgcccaagagggggaggcgacacagcggggccaaagccggggtcccaagggaaccc

SEQ ID NO: 302817 - DNA, 712 bp, Homo sapiens
gaaaagataacttttcttgatactccaggacatgctgctttctcagcaatgagagccagaggtgctcaggtcactgacattgtcgtattggttgtagctgcagatgatggagtgatgaaacaaactgtagaatctattcagcatgccaaagatgcacagggtactgtgtggctgacttaatggatctactacataaagtcaaagttctggggccatttacatatagctcatttagtcttcacaacaatcccagagttattatacgtgtattacagataagcctcaaagataaattgttttcccacagacttataactaataggaagagtatagcaggattcaacttgggagttgtgaccataagtacagaccacaggtacaatctttcctctactatgccctttttttttcaactttttatcatagaaattttaaacagatacaaaagtaagaaaagaataatgaaattcgatctatccatcacataaattcattaggagttgcatagtggttatattctgttatttcctgttaatttattatgtggaattcttctctaaagagaaactttcccttctgctttaaataagttcttatctgatcaaatgtataaaattcagacttttggaaaatcacttaaccatcttctcccttatttcttcatttaaaagttataataataaatacccacacatgtaattatacattctag

SEQ ID NO: 302818 - DNA, 2530 bp, Homo sapiens
acggactgacctaccgaccattcttccgggtccagaaggtgatctccgcccgtgctcagaatccaggggcccggggctgtagattccttgacaaggatatcctagcggcgaaacaacaccgtactgggagtcagaacgtctgggttctagtcttgactgccattaactagcggtatgacattggagaagcttttttgacccttctggatttccgtttccttttctgtaaaatgaggagcttggaagatccggaaaatgaggcccataggaaacaagtgacttgctgagtccagataacactgactgtcagagagaaacatgaaccagaagctactgaagttggagaacttgctacgatttcacactatttataggcaactgcacagtctgtgtcaaagaagagcattaagacagtggaggcatgggttttcatctgcttaccctgtgtggacagctcaactgtgtgcctggccctggccaacagatgtgctcaatggggctgctttatctcagtataggcttctagtaacaaaaaaggaagaaggaccatggaaatctcagttatcttcaacaaaatctaaaaaggtggtagaagtatggattggaatgactattgaggaactggccagggcaatggaaaaaaacacagattatgtatatgaagctttattgaacactgatattgacatagattcactggaagcagactcacatttagatgaagtctggatcaaagaagtgataacgaaggcagggatgaagttaaagtggagtaaattaaaacaggacaaagtcagaaaaaataaagatgctgtaagaaggccccaggcagatccagctttattaaccccaaggtccccagttgttactataatgggccatgttgatcacgggaaaacgacattacttgacaaatttcgaaaaactcaagtggcagcagtggaaactggaggcatcactcagcacattggtgcctttcttgtctctctgccttctggggaaaagataacttttcttgatactccaggacatgctgctttctcagcaatgagagccagaggtgctcaggtcactgacattgtcgtattggttgtagctgcagatgatggagtgatgaaacaaactgtagaatctattcagcatgccaaagatgcacaggttcctattatccttgccgtaaataaatgtgacaaagctgaggctgatcctgagaaagtgaaaaaagagctgctggcttacgatgtggtatgtgaagattatggaggtgatgttcaagcagtgcctgtctccgcacttacgggcgataatctgatggctttggcagaagcaacagttgctcttgcagaaatgttagaattgaaagcagatcccaatggtccagtggaaggaacagtaatagagtctttcacagacaaaggaagaggtcttgttactacagctataattcaaagaggaactttaagaaaaggctctgttctggttgctggaaaatgttgggcaaaagtacgcttaatgtttgatgaaaatggaaaaacaattgatgaggcctatcccagcatgccagtgggaattacaggctggagagaccttccttctgcaggagaagaaattcttgaagtagaatctgagccaagggcacgtgaagttgttgactggaggaaatatgaacaagaacaggagaaaggtcaggaggatctgaaaataatagaagaaaagcgaaaggaacacaaagaagcacatcagaaagcccgtgagaagtatggccatctactgtggaagaagagatcaattctacggtttttagaaagaaaagaacaaatacccttaaagccaaaagagaaaagggaaagagattcaaatgtactttctgtgattattaaaggtgatgttgatggttctgttgaggccattttgaacattatagatacctatgatgcttcacacgagtgtgaactagaattagtacattttggagtgggtgatataagtgcaaatgatgttaaccttgctgaaacatttgatggtgttatatatggctttaatgtgaatgcaggcaatgttatccaacagtcagctgcaaaaaaaggagtaaaaattaaacttcacaaaataatttaccgtcttgttgaagatttgcaagaggaactgagcagcagattaccctgtgctgtggaagagcacccagtaggtgaggcatctatactagctaccttctctgtaacagaagggaagaaaaaagttcctgtggctggctgcagagtccaaaagggacagttagaaaaacaaaaaaaatttaaactaacccgtaatggacatgtaatttggaagggctcattaacctcattgaaacaccataaagatgacatttcaattgtcaaaacgggaatggattgtggtctcagtttagatgaagacaatatggaatttcaagtgggagacagaattgtttgttatgaagaaaagcaaattcaagccaagacttcttgggatccaggattttaaaattacattaaaaatgtaaataactcaa

SEQ ID NO: 302819 - DNA, 2368 bp, Homo sapiens
acggactgacctaccgaccattcttccgggtccagaaggtgatctccgcccgtgctcagaatccaggggcccggggctgtagagatccggaaaatgaggcccataggaaacaagtgacttgctgagtccagataacactgactgtcagagagaaacatgaaccagaagctactgaagttggagaacttgctacgatttcacactatttataggcaactgcacagtctgtgtcaaagaagagcattaagacagtggaggcatgggttttcatctgcttaccctgtgtggacagctcaactgtgtgcctggccctggccaacagatgtgctcaatggggctgctttatctcagtataggcttctagtaacaaaaaaggaagaaggaccatggaaatctcagttatcttcaacaaaatctaaaaaggtggtagaagtatggattggaatgactattgaggaactggccagggcaatggaaaaaaacacagattatgtatatgaagctttattgaacactgatattgacatagattcactggaagcagactcacatttagatgaagtctggatcaaagaagtgataacgaaggcagggatgaagttaaagtggagtaaattaaaacaggacaaagtcagaaaaaataaagatgctgtaagaaggccccaggcagatccagctttattaaccccaaggtccccagttgttactataatgggccatgttgatcacgggaaaacgacattacttgacaaatttcgaaaaactcaagtggcagcagtggaaactggaggcatcactcagcacattggtgcctttcttgtctctctgccttctggggaaaagataacttttcttgatactccaggacatgctgctttctcagcaatgagagccagaggtgctcaggtcactgacattgtcgtattggttgtagctgcagatgatggagtgatgaaacaaactgtagaatctattcagcatgccaaagatgcacaggttcctattatccttgccgtaaataaatgtgacaaagctgaggctgatcctgagaaagtgaaaaaagagctgctggcttacgatgtggtatgtgaagattatggaggtgatgttcaagcagtgcctgtctccgcacttacgggcgataatctgatggctttggcagaagcaacagttgctcttgcagaaatgttagaattgaaagcagatcccaatggtccagtggaaggaacagtaatagagtctttcacagacaaaggaagaggtcttgttactacagctataattcaaagaggaactttaagaaaaggctctgttctggttgctggaaaatgttgggcaaaagtacgcttaatgtttgatgaaaatggaaaaacaattgatgaggcctatcccagcatgccagtgggaattacaggctggagagaccttccttctgcaggagaagaaattcttgaagtagaatctgagccaagggcacgtgaagttgttgactggaggaaatatgaacaagaacaggagaaaggtcaggaggatctgaaaataatagaagaaaagcgaaaggaacacaaagaagcacatcagaaagcccgtgagaagtatggccatctactgtggaagaagagatcaattctacggtttttagaaagaaaagaacaaatacccttaaagccaaaagagaaaagggaaagagattcaaatgtactttctgtgattattaaaggtgatgttgatggttctgttgaggccattttgaacattatagatacctatgatgcttcacacgagtgtgaactagaattagtacattttggagtgggtgatataagtgcaaatgatgttaaccttgctgaaacatttgatggtgttatatatggctttaatgtgaatgcaggcaatgttatccaacagtcagctgcaaaaaaaggagtaaaaattaaacttcacaaaataatttaccgtcttgttgaagatttgcaagaggaactgagcagcagattaccctgtgctgtggaagagcacccagtaggtgaggcatctatactagctaccttctctgtaacagaagggaagaaaaaagttcctgtggctggctgcagagtccaaaagggacagttagaaaaacaaaaaaaatttaaactaacccgtaatggacatgtaatttggaagggctcattaacctcattgaaacaccataaagatgacatttcaattgtcaaaacgggaatggattgtggtctcagtttagatgaagacaatatggaatttcaagtgggagacagaattgtttgttatgaagaaaagcaaattcaagccaagacttcttgggatccaggattttaaaattacattaaaaatgtaaataactcaa

SEQ ID NO: 302820 - DNA, 2438 bp, Homo sapiens
atcctcaaagcttataagcgagtatcaagacatgtgatatggttttaaaatagctgatgataaagtatatacatcatctcattttctcctcttagtcttgtaataggaaggacagatattcaaacacttatttatttatttatttttaacagagatccggaaaatgaggcccataggaaacaagtgacttgctgagtccagataacactgactgtcagagagaaacatgaaccagaagctactgaagttggagaacttgctacgatttcacactatttataggcaactgcacagtctgtgtcaaagaagagcattaagacagtggaggcatgggttttcatctgcttaccctgtgtggacagctcaactgtgtgcctggccctggccaacagatgtgctcaatggggctgctttatctcagtataggcttctagtaacaaaaaaggaagaaggaccatggaaatctcagttatcttcaacaaaatctaaaaaggtggtagaagtatggattggaatgactattgaggaactggccagggcaatggaaaaaaacacagattatgtatatgaagctttattgaacactgatattgacatagattcactggaagcagactcacatttagatgaagtctggatcaaagaagtgataacgaaggcagggatgaagttaaagtggagtaaattaaaacaggacaaagtcagaaaaaataaagatgctgtaagaaggccccaggcagatccagctttattaaccccaaggtccccagttgttactataatgggccatgttgatcacgggaaaacgacattacttgacaaatttcgaaaaactcaagtggcagcagtggaaactggaggcatcactcagcacattggtgcctttcttgtctctctgccttctggggaaaagataacttttcttgatactccaggacatgctgctttctcagcaatgagagccagaggtgctcaggtcactgacattgtcgtattggttgtagctgcagatgatggagtgatgaaacaaactgtagaatctattcagcatgccaaagatgcacaggttcctattatccttgccgtaaataaatgtgacaaagctgaggctgatcctgagaaagtgaaaaaagagctgctggcttacgatgtggtatgtgaagattatggaggtgatgttcaagcagtgcctgtctccgcacttacgggcgataatctgatggctttggcagaagcaacagttgctcttgcagaaatgttagaattgaaagcagatcccaatggtccagtggaaggaacagtaatagagtctttcacagacaaaggaagaggtcttgttactacagctataattcaaagaggaactttaagaaaaggctctgttctggttgctggaaaatgttgggcaaaagtacgcttaatgtttgatgaaaatggaaaaacaattgatgaggcctatcccagcatgccagtgggaattacaggctggagagaccttccttctgcaggagaagaaattcttgaagtagaatctgagccaagggcacgtgaagttgttgactggaggaaatatgaacaagaacaggagaaaggtcaggaggatctgaaaataatagaagaaaagcgaaaggaacacaaagaagcacatcagaaagcccgtgagaagtatggccatctactgtggaagaagagatcaattctacggtttttagaaagaaaagaacaaatacccttaaagccaaaagagaaaagggaaagagattcaaatgtactttctgtgattattaaaggtgatgttgatggttctgttgaggccattttgaacattatagatacctatgatgcttcacacgagtgtgaactagaattagtacattttggagtgggtgatataagtgcaaatgatgttaaccttgctgaaacatttgatggtgttatatatggctttaatgtgaatgcaggcaatgttatccaacagtcagctgcaaaaaaaggagtaaaaattaaacttcacaaaataatttaccgtcttgttgaagatttgcaagaggaactgagcagcagattaccctgtgctgtggaagagcacccagtaggtgaggcatctatactagctaccttctctgtaacagaagggaagaaaaaagttcctgtggctggctgcagagtccaaaagggacagttagaaaaacaaaaaaaatttaaactaacccgtaatggacatgtaatttggaagggctcattaacctcattgaaacaccataaagatgacatttcaattgtcaaaacgggaatggattgtggtctcagtttagatgaagacaatatggaatttcaagtgggagacagaattgtttgttatgaagaaaagcaaattcaagccaagacttcttgggatccaggattttaaaattacattaaaaatgtaaataactcaa

SEQ ID NO: 302821 - DNA, 2101 bp, Homo sapiens
acggactgacctaccgaccattcttccgggtccagaaggtgatctccgcccgtgctcagaatccaggggcccggggctgtagattccttgacaaggatatcctagcggcgaaacaacaccgtactgggagtcagaacgtctgggttctagtcttgactgccattaactagcggtatgacattggagaagcttttttgacccttctggatttccgtttccttttctgtaaaatgaggagcttggaagatccggaaaatgaggcccataggaaacaaattatgtatatgaagctttattgaacactgatattgacatagattcactggaagcagactcacatttagatgaagtctggatcaaagaagtgataacgaaggcagggatgaagttaaagtggagtaaattaaaacaggacaaagtcagaaaaaataaagatgctgtaagaaggccccaggcagatccagctttattaaccccaaggtccccagttgttactataatgggccatgttgatcacgggaaaacgacattacttgacaaatttcgaaaaactcaagtggcagcagtggaaactggaggcatcactcagcacattggtgcctttcttgtttctcagcaatgagagccagaggtgctcaggtcactgacattgtcgtattggttgtagctgcagatgatggagtgatgaaacaaactgtagaatctattcagcatgccaaagatgcacaggttcctattatccttgccgtaaataaatgtgacaaagctgaggctgatcctgagaaagtgaaaaaagagctgctggcttacgatgtggtatgtgaagattatggaggtgatgttcaagcagtgcctgtctccgcacttacgggcgataatctgatggctttggcagaagcaacagttgctcttgcagaaatgttagaattgaaagcagatcccaatggtccagtggaaggaacagtaatagagtctttcacagacaaaggaagaggtcttgttactacagctataattcaaagaggaactttaagaaaaggctctgttctggttgctggaaaatgttgggcaaaagtacgcttaatgtttgatgaaaatggaaaaacaattgatgaggcctatcccagcatgccagtgggaattacaggctggagagaccttccttctgcaggagaagaaattcttgaagtagaatctgagccaagggcacgtgaagttgttgactggaggaaatatgaacaagaacaggagaaaggtcaggaggatctgaaaataatagaagaaaagcgaaaggaacacaaagaagcacatcagaaagcccgtgagaagtatggccatctactgtggaagaagagatcaattctacggtttttagaaagaaaagaacaaatacccttaaagccaaaagagaaaagggaaagagattcaaatgtactttctgtgattattaaaggtgatgttgatggttctgttgaggccattttgaacattatagatacctatgatgcttcacacgagtgtgaactagaattagtacattttggagtgggtgatataagtgcaaatgatgttaaccttgctgaaacatttgatggtgttatatatggctttaatgtgaatgcaggcaatgttatccaacagtcagctgcaaaaaaaggagtaaaaattaaacttcacaaaataatttaccgtcttgttgaagatttgcaagaggaactgagcagcagattaccctgtgctgtggaagagcacccagtaggtgaggcatctatactagctaccttctctgtaacagaagggaagaaaaaagttcctgtggctggctgcagagtccaaaagggacagttagaaaaacaaaaaaaatttaaactaacccgtaatggacatgtaatttggaagggctcattaacctcattgaaacaccataaagatgacatttcaattgtcaaaacgggaatggattgtggtctcagtttagatgaagacaatatggaatttcaagtgggagacagaattgtttgttatgaagaaaagcaaattcaagccaagacttcttgggatccaggattttaaaattacattaaaaatgtaaataactcaa

SEQ ID NO: 302822 - DNA, 3169 bp, Homo sapiens
  misc_feature (3039)..(3039): n is a, c, g, or t
acggactgacctaccgaccattcttccgggtccagaaggtgatctccgcccgtgctcagaatccaggggcccggggctgtaggtaggagttaagtgggtaggatcccttaaccagggttgtccggtgcaggtggtgtgtgttgtttcgcctaacgtgtcagtggcacaaatcacgcgaacttcataaacattgtgcgttcggaagcctttccaagatgcatttaatccctgcgtgagcccacgttaggcattcacgaaggcatgtgcactgttctctcggaagcggctggccggcttcccctcctcgcgcgcggctgtgggtgcaggtcctcacttcccagcctcccatgggcccaaggccttctgggctccaatttgaggcgagccaccccagatccgtaatttttctgcagtgatttatttttacctttctgattccttgacaaggatatcctagcggcgaaacaacaccgtactgggagtcagaacgtctgggttctagtcttgactgccattaactagcggtatgacattggagaagcttttttgacccttctggatttccgtttccttttctgtaaaatgaggagcttggaagatccggaaaatgaggcccataggaaacaagtgacttgctgagtccagataacactgactgtcagaagtctcgctctgtctccccggctggagtgcagtggcgtgatcttggctcactgcaacctctgtctcccgggttcaagaaattctcctgcctcagcctcccaagtagctgggactacaggcatgtgccaccacgcccaggagaaacatgaaccagaagctactgaagttggagaacttgctacgatttcacactatttataggcaactgcacagtctgtgtcaaagaagagcattaagacagtggaggcatgggttttcatctgcttaccctgtgtggacagctcaactgtgtgcctggccctggccaacagatgtgctcaatggggctgctttatctcagtataggcttctagtaacaaaaaaggaagaaggaccatggaaatctcagttatcttcaacaaaatctaaaaaggtggtagaagtatggattggaatgactattgaggaactggccagggcaatggaaaaaaacacagattatgtatatgaagctttattgaacactgatattgacatagattcactggaagcagactcacatttagatgaagtctggatcaaagaagtgataacgaaggcagggatgaagttaaagtggagtaaattaaaacaggacaaagtcagaaaaaataaagatgctgtaagaaggccccaggcagatccagctttattaaccccaaggtccccagttgttactataatgggccatgttgatcacgggaaaacgacattacttgacaaatttcgaaaaactcaagtggcagcagtggaaactggaggcatcactcagcacattggtgcctttcttgtctctctgccttctggggaaaagataacttttcttgatactccaggacatgctgctttctcagcaatgagagccagaggtgctcaggtcactgacattgtcgtattggttgtagctgcagatgatggagtgatgaaacaaactgtagaatctattcagcatgccaaagatgcacaggttcctattatccttgccgtaaataaatgtgacaaagctgaggctgatcctgagaaagtgaaaaaagagctgctggcttacgatgtggtatgtgaagattatggaggtgatgttcaagcagtgcctgtctccgcacttacgggcgataatctgatggctttggcagaagcaacagttgctcttgcagaaatgttagaattgaaagcagatcccaatggtccagtggaaggaacagtaatagagtctttcacagacaaaggaagaggtcttgttactacagctataattcaaagaggaactttaagaaaaggctctgttctggttgctggaaaatgttgggcaaaagtacgcttaatgtttgatgaaaatggaaaaacaattgatgaggcctatcccagcatgccagtgggaattacaggctggagagaccttccttctgcaggagaagaaattcttgaagtagaatctgagccaagggcacgtgaagttgttgactggaggaaatatgaacaagaacaggagaaaggtcaggaggatctgaaaataatagaagaaaagcgaaaggaacacaaagaagcacatcagaaagcccgtgagaagtatggccatctactgtggaagaagagatcaattctacggtttttagaaagaaaagaacaaatacccttaaagccaaaagagaaaagggaaagagattcaaatgtactttctgtgattattaaaggtgatgttgatggttctgttgaggccattttgaacattatagatacctatgatgcttcacacgagtgtgaactagaattagtacattttggagtgggtgatataagtgcaaatgatgttaaccttgctgaaacatttgatggtgttatatatggctttaatgtgaatgcaggcaatgttatccaacagtcagctgcaaaaaaaggagtaaaaattaaacttcacaaaataatttaccgtcttgttgaagatttgcaagaggaactgagcagcagattaccctgtgctgtggaagagcacccagtaggtgaggcatctatactagctaccttctctgtaacagaagggaagaaaaaagttcctgtggctggctgcagagtccaaaagggacagttagaaaaacaaaaaaaatttaaactaacccgtaatggacatgtaatttggaagggctcattaacctcattgaaacaccataaagatgacatttcaattgtcaaaacgggaatggattgtggtctcagtttagatgaagacaatatggaatttcaagtgggagacagaattgtttgttatgaagaaaagcaaattcaagccaagacttcttgggatccaggattttaaaattacattaaaaatgtaaataactcaaaaaaaaaaaaaaaaaaaanaaaaaacaccctttggggcccccctcacgccccagagaaaagtttttaaacccaatgcgtttgggcgcccgcggcgcccaagagggggaggcgacacagcggggccaaagccggggtcccaagggaaccc

SEQ ID NO: 302823 - DNA, 3046 bp, Homo sapiens
acggactgacctaccgaccattcttccgggtccagaaggtgatctccgcccgtgctcagaatccaggggcccggggctgtaggtaggagttaagtgggtaggatcccttaaccagggttgtccggtgcaggtggtgtgtgttgtttcgcctaacgtgtcagtggcacaaatcacgcgaacttcataaacattgtgcgttcggaagcctttccaagatgcatttaatccctgcgtgagcccacgttaggcattcacgaaggcatgtgcactgttctctcggaagcggctggccggcttcccctcctcgcgcgcggctgtgggtgcaggtcctcacttcccagcctcccatgggcccaaggccttctgggctccaatttgaggcgagccaccccagatccgtaatttttctgcagtgatttatttttacctttctgattccttgacaaggatatcctagcggcgaaacaacaccgtactgggagtcagaacgtctgggttctagtcttgactgccattaactagcggtatgacattggagaagcttttttgacccttctggatttccgtttccttttctgtaaaatgaggagcttggaagatccggaaaatgaggcccataggaaacaagtgacttgctgagtccagataacactgactgtcagaagtctcgctctgtctccccggctggagtgcagtggcgtgatcttggctcactgcaacctctgtctcccgggttcaagaaattctcctgcctcagcctcccaagtagctgggactacaggcatgtgccaccacgcccaggagaaacatgaaccagaagctactgaagttggagaacttgctacgatttcacactatttataggcaactgcacagtctgtgtcaaagaagagcattaagacagtggaggcatgggttttcatctgcttaccctgtgtggacagctcaactgtgtgcctggccctggccaacagatgtgctcaatggggctgctttatctcagtataggcttctagtaacaaaaaaggaagaaggaccatggaaatctcagttatcttcaacaaaatctaaaaaggtggtagaagtatggattggaatgactattgaggaactggccagggcaatggaaaaaaacacagattatgtatatgaagctttattgaacactgatattgacatagattcactggaagcagactcacatttagatgaagtctggatcaaagaagtgataacgaaggcagggatgaagttaaagtggagtaaattaaaacaggacaaagtcagaaaaaataaagatgctgtaagaaggccccaggcagatccagctttattaaccccaaggtccccagttgttactataatgggccatgttgatcacgggaaaacgacattacttgacaaatttcgaaaaactcaagtggcagcagtggaaactggaggcatcactcagcacattggtgcctttcttgtctctctgccttctggggaaaagataacttttcttgatactccaggacatgctgctttctcagcaatgagagccagaggtgctcaggtcactgacattgtcgtattggttgtagctgcagatgatggagtgatgaaacaaactgtagaatctattcagcatgccaaagatgcacaggttcctattatccttgccgtaaataaatgtgacaaagctgaggctgatcctgagaaagtgaaaaaagagctgctggcttacgatgtggtatgtgaagattatggaggtgatgttcaagcagtgcctgtctccgcacttacgggcgataatctgatggctttggcagaagcaacagttgctcttgcagaaatgttagaattgaaagcagatcccaatggtccagtggaaggaacagtaatagagtctttcacagacaaaggaagaggtcttgttactacagctataattcaaagaggaactttaagaaaaggctctgttctggttgctggaaaatgttgggcaaaagtacgcttaatgtttgatgaaaatggaaaaacaattgatgaggcctatcccagcatgccagtgggaattacaggctggagagaccttccttctgcaggagaagaaattcttgaagtagaatctgagccaagggcacgtgaagttgttgactggaggaaatatgaacaagaacaggagaaaggtcaggaggatctgaaaataatagaagaaaagcgaaaggaacacaaagaagcacatcagaaagcccgtgagaagtatggccatctactgtggaagaagagatcaattctacggtttttagaaagaaaagaacaaatacccttaaagccaaaagagaaaagggaaagagattcaaatgtactttctgtgattattaaaggtgatgttgatggttctgttgaggccattttgaacattatagatacctatgatgcttcacacgagtgtgaactagaattagtacattttggagtgggtgatataagtgcaaatgatgttaaccttgctgaaacatttgatggtgttatatatggctttaatgtgaatgcaggcaatgttatccaacagtcagctgcaaaaaaaggagtaaaaattaaacttcacaaaataatttaccgtcttgttgaagatttgcaagaggaactgagcagcagattaccctgtgctgtggaagagcacccagtaggtgaggcatctatactagctaccttctctgtaacagaagggaagaaaaaagttcctgtggctggctgcagagtccaaaagggacagttagaaaaacaaaaaaaatttaaactaacccgtaatggacatgtaatttggaagggctcattaacctcattgaaacaccataaagatgacatttcaattgtcaaaacgggaatggattgtggtctcagtttagatgaagacaatatggaatttcaagtgggagacagaattgtttgttatgaagaaaagcaaattcaagccaagacttcttgggatccaggattttaaaattacattaaaaatgtaaataactcaacgtgttgtttgtttgaaggtagaaat

SEQ ID NO: 302824 - DNA, 2036 bp, Homo sapiens
acggactgacctaccgaccattcttccgggtccagaaggtgatctccgcccgtgctcagaatccaggggcccggggctgtaggtaggagttaagtgggtaggatcccttaaccagggttgtccggtgcaggtggtgtgtgttgtttcgcctaacgtgtcagtggcacaaatcacgcgaacttcataaacattgtgcgttcggaagcctttccaagatgcatttaatccctgcgtgagcccacgttaggcattcacgaaggcatgtgcactgttctctcggaagcggctggccggcttcccctcctcgcgcgcggctgtgggtgcaggtcctcacttcccagcctcccatgggcccaaggccttctgggctccaatttgaggcgagccaccccagatccgtaatttttctgcagtgatttatttttacctttctgattccttgacaaggatatcctagcggcgaaacaacaccgtactgggagtcagaacgtctgggttctagtcttgactgccattaactagcggtatgacattggagaagcttttttgacccttctggatttccgtttccttttctgtaaaatgaggagcttggaagatccggaaaatgaggcccataggaaacaagtgacttgctgagtccagataacactgactgtcagaagtctcgctctgtctccccggctggagtgcagtggcgtgatcttggctcactgcaacctctgtctcccgggttcaagaaattctcctgcctcagcctcccaagtagctgggactacaggcatgtgccaccacgcccaggagaaacatgaaccagaagctactgaagttggagaacttgctacgatttcacactatttataggcaactgcacagtctgtgtcaaagaagagcattaagacagtggaggcatgggttttcatctgcttaccctgtgtggacagctcaactgtgtgcctggccctggccaacagatgtgctcaatggggctgctttatctcagtataggcttctagtaacaaaaaaggaagaaggaccatggaaatctcagttatcttcaacaaaatctaaaaaggtggtagaagtatggattggaatgactattgaggaactggccagggcaatggaaaaaaacacagattatgtatatgaagctttattgaacactgatattgacatagattcactggaagcagactcacatttagatgaagtctggatcaaagaagtgataacgaaggcagggatgaagttaaagtggagtaaattaaaacaggacaaagtcagaaaaaataaagatgctgtaagaaggccccaggcagatccagctttattaaccccaaggtccccagttgttactataatgggccatgttgatcacgggaaaacgacattacttgacaaatttcgaaaaactcaagtggcagcagtggaaactggaggcatcactcagcacattggtgcctttcttgtctctctgccttctggggaaaagataacttttcttgatactccaggacatgctgctttctcagcaatgagagccagaggtgctcaggtcactgacattgtcgtattggttgtagctgcagatgatggagtgatgaaacaaactgtagaatctattcagcatgccaaagatgcacaggttcctattatccttgccgtaaataaatgtgacaaagctgaggctgatcctgagaaagtgaaaaaagagctgctggcttacgatgtggtatgtgaagattatggaggtgatgttcaagcagtgcctgtctccgcacttacgggcgataatctgatggctttggcagaagcaacagttgctcttgcagaaatgttagaattgaaagcagatcccaatggtccagtggaaggaacagtaatagagtctttcacagacaaaggaagaggtcttgttactacagctataattcaaagaggaactttaagaaaaggctctgttctggttgctggaaaatgttgggcaaaagtacgcttaatgtttgatgtggagccttccttctgcaggagag

SEQ ID NO: 302825 - DNA, 2354 bp, Homo sapiens
gggaggaccccaatctaggcccaagagggaaaggccacgtgcctgtatgagcgtatgagcatgtgcatgcgcgtgtgtgcacagggtggtgcacctggcaggggtccttgagtgaggcatgccccattctgtagcagggaacctggaatgggctgtgtgttctgcaagaaattggagccggtggccacggccaaggaggatgctggcctggaaggggacttcagaagctacggggcagcagaccactatgggcctgaccccactaaggcccggcctgcatcctcatttgcccacatccccaactacagcaacttctcctctcaggccatcaaccctggcttccttgatagtggcaccatcaggggtgtgtcagggattggggtgaccctgttcattgccctgtatgactatgaggctcgaactgaggatgacctcaccttcaccaagggcgagaagttccacatcctgaacaatactgaaggtgactggtgggaggctcggtctctcagctccggaaaaactggctgcattcccagcaactacgtggcccctgttgactcaatccaagctgaagagtggtactttggaaagattgggagaaaggatgcagagaggcagctgctttcaccaggcaacccccagggggcctttctcattcgggaaagcgagaccaccaaaggtgcctactccctgtccatccgggactgggatcagaccagaggcgatcatgtgaagcattacaagatccgcaaactggacatgggcggctactacatcaccacacgggttcagttcaactcggtgcaggagctggtgcagcactacatggaggtgaatgacgggctgtgcaacctgctcatcgcgccctgcaccatcatgaagccgcagacgctgggcctggccaaggacgcctgggagatcagccgcagctccatcacgctggagcgccggctgggcaccggctgcttcggggatgtgtggctgggcacgtggaacggcagcactaaggtggcggtgaagacgctgaagccgggcaccatgtccccgaaggccttcctggaggaggcgcaggtcatgaagctgctgcggcacgacaagctggtgcagctgtacgccgtggtgtcggaggagcccatctacatcgtgaccgagttcatgtgtcacggcagcttgctggattttctcaagaacccagagggccaggatttgaggctgccccaattggtggacatggcagcccaggtagctgagggcatggcctacatggaacgcatgaactacattcaccgcgacctgagggcagccaacatcctggttggggagcggctggcgtgcaagatcgcagactttggcttggcgcgtctcatcaaggacgatgagtacaacccctgccaaggttccaagttccccatcaagtggacagccccagaagctgccctctttggcagattcaccatcaagtcagacgtgtggtcctttgggatcctgctcactgagctcatcaccaagggccgaatcccctacccaggcatgaataaacgggaagtgttggaacaggtggagcagggctaccacatgccgtgccctccaggctgcccagcatccctgtacgaggccatggaacagacctggcgtctggacccggaggagaggcctaccttcgagtacctgcagtccttcctggaggactacttcacctccgctgaaccacagtaccagcccggggatcagacatagcctgtccgggcatcaaccctctctggcggtggccaccagtccttgccaatccccagagctgttcttccaaagcccccaggctggcttagaaccccatagagtcctagcatcaccgaggacgtggctgctctgacaccacctagggcaacctacttgttttacagatggggcaaaaggaggcccagagctgatctctcatccgctctggccccaagcactatttcttccttttccacttaggcccctacatgcctgtagcctttctcactccatccccacccaaagtgctcagaccttgtctagttatttataaaactgtatgtacctccctcacttctctcctatcactgctttcctactctccttttatctcactctagtccaggtgccaagaatttcccttctaccctctattctcttgtgtctgtaagttacaaagtcaggaaaagtcttggctggacccctttcctgctgggtggatgcagtggtccaggactggggtctgggcccaggtttgagggagaaggttgcagagcacttcccacctctctgaatagtgtgtatgtgttggtttattgattctgtaaataagtaaaatgacaatatgaatcctcaaa

SEQ ID NO: 302826 - DNA, 2280 bp, Homo sapiens
caaagggtgagaggggcaggtggggctagggtggagaccaaagcactgatgtgacggaaccatcagccaggcaactggacctggtggatccaggaagactttctggaagaggtctctgacccctcccaaggatcatgccgcagccccactgacccaggagtaggggcctaagggcagggaacctggaatgggctgtgtgttctgcaagaaattggagccggtggccacggccaaggaggatgctggcctggaaggggacttcagaagctacggggcagcagaccactatgggcctgaccccactaaggcccggcctgcatcctcatttgcccacatccccaactacagcaacttctcctctcaggccatcaaccctggcttccttgatagtggcaccatcaggggtgtgtcagggattggggtgaccctgttcattgccctgtatgactatgaggctcgaactgaggatgacctcaccttcaccaagggcgagaagttccacatcctgaacaatactgaaggtgactggtgggaggctcggtctctcagctccggaaaaactggctgcattcccagcaactacgtggcccctgttgactcaatccaagctgaagagtggtactttggaaagattgggagaaaggatgcagagaggcagctgctttcaccaggcaacccccagggggcctttctcattcgggaaagcgagaccaccaaaggtgcctactccctgtccatccgggactgggatcagaccagaggcgatcatgtgaagcattacaagatccgcaaactggacatgggcggctactacatcaccacacgggttcagttcaactcggtgcaggagctggtgcagcactacatggaggtgaatgacgggctgtgcaacctgctcatcgcgccctgcaccatcatgaagccgcagacgctgggcctggccaaggacgcctgggagatcagccgcagctccatcacgctggagcgccggctgggcaccggctgcttcggggatgtgtggctgggcacgtggaacggcagcactaaggtggcggtgaagacgctgaagccgggcaccatgtccccgaaggccttcctggaggaggcgcaggtcatgaagctgctgcggcacgacaagctggtgcagctgtacgccgtggtgtcggaggagcccatctacatcgtgaccgagttcatgtgtcacggcagcttgctggattttctcaagaacccagagggccaggatttgaggctgccccaattggtggacatggcagcccaggtagctgagggcatggcctacatggaacgcatgaactacattcaccgcgacctgagggcagccaacatcctggttggggagcggctggcgtgcaagatcgcagactttggcttggcgcgtctcatcaaggacgatgagtacaacccctgccaaggttccaagttccccatcaagtggacagccccagaagctgccctctttggcagattcaccatcaagtcagacgtgtggtcctttgggatcctgctcactgagctcatcaccaagggccgaatcccctacccaggcatgaataaacgggaagtgttggaacaggtggagcagggctaccacatgccgtgccctccaggctgcccagcatccctgtacgaggccatggaacagacctggcgtctggacccggaggagaggcctaccttcgagtacctgcagtccttcctggaggactacttcacctccgctgaaccacagtaccagcccggggatcagacatagcctgtccgggcatcaaccctctctggcggtggccaccagtccttgccaatccccagagctgttcttccaaagcccccaggctggcttagaaccccatagagtcctagcatcaccgaggacgtggctgctctgacaccacctagggcaacctacttgttttacagatggggcaaaaggaggcccagagctgatctctcatccgctctggccccaagcactatttcttccttttccacttaggcccctacatgcctgtagcctttctcactccatccccacccaaagtctacaataaaactcaggtcaccttcgaattaattaagctgacaaaatgaaaatgacttaattacccaaggtttggcatgtaaagatcttaagagggtgcagaacgaaccactcgaaaacgagtagcagtgtaatgaaggcttcttttttaaacaataacaaatgcttcatcaatctgagtgtggaaggtgatttatcaaaataaatattactaattg

SEQ ID NO: 302827 - DNA, 2394 bp, Homo sapiens
caaagggtgagaggggcaggtggggctagggtggagaccaaagcactgatgtgacggaaccatcagccaggcaactggacctggtggatccaggaagactttctggaagaggtctctgacccctcccaaggatcatgccgcagccccactgacccaggagtaggggcctaagggcagggaacctggaatgggctgtgtgttctgcaagaaattggagccggtggccacggccaaggaggatgctggcctggaaggggacttcagaagctacggggcagcagaccactatgggcctgaccccactaaggcccggcctgcatcctcatttgcccacatccccaactacagcaacttctcctctcaggccatcaaccctggcttccttgatagtggcaccatcaggggtgtgtcagggattggggtgaccctgttcattgccctgtatgactatgaggctcgaactgaggatgacctcaccttcaccaagggcgagaagttccacatcctgaacaatactgaaggtgactggtgggaggctcggtctctcagctccggaaaaactggctgcattcccagcaactacgtggcccctgttgactcaatccaagctgaagagtggtactttggaaagattgggagaaaggatgcagagaggcagctgctttcaccaggcaacccccagggggcctttctcattcgggaaagcgagaccaccaaaggtgcctactccctgtccatccgggactgggatcagaccagaggcgatcatgtgaagcattacaagatccgcaaactggacatgggcggctactacatcaccacacgggttcagttcaactcggtgcaggagctggtgcagcactacatggaggtgaatgacgggctgtgcaacctgctcatcgcgccctgcaccatcatgaagccgcagacgctgggcctggccaaggacgcctgggagatcagccgcagctccatcacgctggagcgccggctgggcaccggctgcttcggggatgtgtggctgggcacgtggaacggcagcactaaggtggcggtgaagacgctgaagccgggcaccatgtccccgaaggccttcctggaggaggcgcaggtcatgaagctgctgcggcacgacaagctggtgcagctgtacgccgtggtgtcggaggagcccatctacatcgtgaccgagttcatgtgtcacggcagcttgctggattttctcaagaacccagagggccaggatttgaggctgccccaattggtggacatggcagcccaggtagctgagggcatggcctacatggaacgcatgaactacattcaccgcgacctgagggcagccaacatcctggttggggagcggctggcgtgcaagatcgcagactttggcttggcgcgtctcatcaaggacgatgagtacaacccctgccaaggttccaagttccccatcaagtggacagccccagaagctgccctctttggcagattcaccatcaagtcagacgtgtggtcctttgggatcctgctcactgagctcatcaccaagggccgaatcccctacccaggcatgaataaacgggaagtgttggaacaggtggagcagggctaccacatgccgtgccctccaggctgcccagcatccctgtacgaggccatggaacagacctggcgtctggacccggaggagaggcctaccttcgagtacctgcagtccttcctggaggactacttcacctccgctgaaccacagtaccagcccggggatcagacatagcctgtccgggcatcaaccctctctggcggtggccaccagtccttgccaatccccagagctgttcttccaaagcccccaggctggcttagaaccccatagagtcctagcatcaccgaggacgtggctgctctgacaccacctagggcaacctacttgttttacagatggggcaaaaggaggcccagagctgatctctcatccgctctggccccaagcactatttcttccttttccacttaggcccctacatgcctgtagcctttctcactccatccccacccaaagtgctcagaccttgtctagttatttataaaactgtatgtacctccctcacttctctcctatcactgctttcctactctccttttatctcactctagtccaggtgccaagaatttcccttctaccctctattctcttgtgtctgtaagttacaaagtcaggaaaagtcttggctggacccctttcctgctgggtggatgcagtggtccaggactggggtctgggcccaggtttgagggagaaggttgcagagcacttcccacctctctgaatagtgtgtatgtgttggtttattgattctgtaaataagtaaaatgacaatatgaatcctcaaa

SEQ ID NO: 302828 - DNA, 2568 bp, Homo sapiens
caaagggtgagaggggcaggtggggctagggtggagaccaaagcactgatgtgacggaaccatcagccaggcaactggacctggtggatccaggaagactttctggaagaggtctctgacccctcccaaggatcatgccgcagccccactgacccaggagtaggggcctaagggcagggaacctggaatgggctgtgtgttctgcaagaaattggagccggtggccacggccaaggaggatgctggcctggaaggggacttcagaagctacggggcagcagaccactatgggcctgaccccactaaggcccggcctgcatcctcatttgcccacatccccaactacagcaacttctcctctcaggccatcaaccctggcttccttgatagtggcaccatcaggggtgtgtcagggattggggtgaccctgttcattgccctgtatgactatgaggctcgaactgaggatgacctcaccttcaccaagggcgagaagttccacatcctgaacaatactgaaggtgactggtgggaggctcggtctctcagctccggaaaaactggctgcattcccagcaactacgtggcccctgttgactcaatccaagctgaagagtggtactttggaaagattgggagaaaggatgcagagaggcagctgctttcaccaggcaacccccagggggcctttctcattcgggaaagcgagaccaccaaaggtgcctactccctgtccatccgggactgggatcagaccagaggcgatcatgtgaagcattacaagatccgcaaactggacatgggcggctactacatcaccacacgggttcagttcaactcggtgcaggagctggtgcagcactacatggaggtgaatgacgggctgtgcaacctgctcatcgcgccctgcaccatcatgaagccgcagacgctgggcctggccaaggacgcctgggagatcagccgcagctccatcacgctggagcgccggctgggcaccggctgcttcggggatgtgtggctgggcacgtggaacggcagcactaaggtggcggtgaagacgctgaagccgggcaccatgtccccgaaggccttcctggaggaggcgcaggtcatgaagctgctgcggcacgacaagctggtgcagctgtacgccgtggtgtcggaggagcccatctacatcgtgaccgagttcatgtgtcacggcagcttgctggattttctcaagaacccagagggccaggatttgaggctgccccaattggtggacatggcagcccaggtagctgagggcatggcctacatggaacgcatgaactacattcaccgcgacctgagggcagccaacatcctggttggggagcggctggcgtgcaagatcgcagactttggcttggcgcgtctcatcaaggacgatgagtacaacccctgccaaggttccaagttccccatcaagtggacagccccagaagctgccctctttggcagattcaccatcaagtcagacgtgtggtcctttgggatcctgctcactgagctcatcaccaagggccgaatcccctacccaggcatgaataaacgggaagtgttggaacaggtggagcagggctaccacatgccgtgccctccaggctgcccagcatccctgtacgaggccatggaacagacctggcgtctggacccggaggagaggcctaccttcgagtacctgcagtccttcctggaggactacttcacctccgctgaaccacagtaccagcccggggatcagacatagcctgtccgggcatcaaccctctctggcggtggccaccagtccttgccaatccccagagctgttcttccaaagcccccaggctggcttagaaccccatagagtcctagcatcaccgaggacgtggctgctctgacaccacctagggcaacctacttgttttacagatggggcaaaaggaggcccagagctgatctctcatccgctctggccccaagcactatttcttccttttccacttaggcccctacatgcctgtagcctttctcactccatccccacccaaagtgctcagaccttgtctagttatttataaaactgtatgtacctccctcacttctctcctatcactgctttcctactctccttttatctcactctagtccaggtgccaagaatttcccttctaccctctattctcttgtgtctgtaagttacaaagtcaggaaaagtcttggctggacccctttcctgctgggtggatgcagtggtccaggactggggtctgggcccaggtttgagggagaaggttgcagagcacttcccacctctctgaatagtgtgtatgtgttggtttattgattctgtaaataagtaaaatgacaatatgaatcctcaaaagaaaagaaagcagcgaacgacaccggcaccaagcacagcagccccgcaacccaacaacacaagcgcaaacaaggaacacaccgagggggggggcgccctccaaatcccccccgggggcgcgcgaaacgccccccccaccgttagcgggacacggggaccccacagcgcgctaa

SEQ ID NO: 302829 - DNA, 1685 bp, Homo sapiens
caaagggtgagaggggcaggtggggctagggtggagaccaaagcactgatgtgacggaaccatcagccaggcaactggacctggtggatccaggaagactttctggaagaggtctctgacccctcccaaggatcatgccgcagccccactgacccaggagtaggggcctaagggcagggaacctggaatgggctgtgtgttctgcaagaaattggagccggtggccacggccaaggaggatgctggcctggaaggggacttcagaagctacggggcagcagaccactatgggcctgaccccactaaggcccggcctgcatcctcatttgcccacatccccaactacagcaacttctcctctcaggccatcaaccctggcttccttgatagtggcaccatcaggggtgtgtcagggattggggtgaccctgttcattgccctgtatgactatgaggctcgaactgaggatgacctcaccttcaccaagggcgagaagttccacatcctgaacaatactgaaggtgactggtgggaggctcggtctctcagctccggaaaaactggctgcattcccagcaactacgtggcccctgttgactcaatccaagctgaagagtggtactttggaaagattgggagaaaggatgcagagaggcagctgctttcaccaggcaacccccagggggcctttctcattcgggaaagcgagaccaccaaaggtgcctactccctgtccatccgggactgggatcagaccagaggcgatcatgtgaagcattacaagatccgcaaactggacatgggcggctactacatcaccacacgggttcagttcaactcggtgcaggagctggtgcagcactacatggaggtgaatgacgggctgtgcaacctgctcatcgcgccctgcaccatcatgaagccgcagacgctgggcctggccaaggacgcctgggagatcagccgcagctccatcacgctggagcgccggctgggcaccggctgcttcggggatgtgtggctgggcacgtggaacggcagcactaaggtggcggtgaagacgctgaagccgggcaccatgtccccgaaggccttcctggaggaggcgcaggtcatgaagctgctgcggcacgacaagctggtgcagctgtacgccgtggtgtcggaggagcccatctacatcgtgaccgagttcatgtgtcacggcagcttgctggattttctcaagaacccagagggccaggatttgaggctgccccaattggtggacatggcagcccaggtagctgagggcatggcctacatggaacgcatgaactacattcaccgcgacctgagggcagccaacatcctggttggggagcggctggcgtgcaagatcgcagactttggcttggcgcgtctcatcaaggacgatgagtacaacccctgccaaggttccaagttccccatcaagtggacagccccagaagctgtcggtgcttgatgtcaacacaggaagagcatgagattgggccatttcaggaaacaaccacacctctacaatggctgtgggttgcctgggtactgccttgctagagtaagttcgtaagtcaataacatggatgtcatgttactgtgcccctagacatcaaacttgtctgggagattctcgccaggctacaaacatagtcagagttacttat

SEQ ID NO: 302830 - DNA, 1186 bp, Homo sapiens
  misc_feature (1156)..(1156): n is a, c, g, or t
  misc_feature (1169)..(1169): n is a, c, g, or t
caaagggtgagaggggcaggtggggctagggtggagaccaaagcactgatgtgacggaaccatcagccaggcaactggacctggtggatccaggaagactttctggaagaggtctctgacccctcccaaggatcatgccgcagccccactgacccaggagtaggggcctaagggcagggaacctggaatgggctgtgtgttctgcaagaaattggagccggtggccacggccaaggaggatgctggcctggaaggggacttcagaagctacggggcagcagaccactatgggcctgaccccactaaggcccggcctgcatcctcatttgcccacatccccaactacagcaacttctcctctcaggccatcaaccctggcttccttgatagtggcaccatcaggggtgtgtcagggattggggtgaccctgttcattgccctgtatgactatgaggctcgaactgaggatgacctcaccttcaccaagggcgagaagttccacatcctgaacaatactgaaggtgactggtgggaggctcggtctctcagctccggaaaaactggctgcattcccagcaactacgtggcccctgttgactcaatccaagctgaagagtggtactttggaaagattgggagaaaggatgcagagaggcagctgctttcaccaggcaacccccagggggcctttctcattcgggaaagcgagaccaccaaaggtgcctactccctgtccatccgggactgggatcagaccagaggcgatcatgtgaagcattacaagatccgcaaactggacatgggcggctactacatcaccacacgggttcagttcaactcggtgcaggagctggtgcagcactacatggaggtgaatgacgggctgtgcaacctgctcatcgcgccctgcaccatcatgaagccgcagacgctgggcctggccaaggacgcctgggagatcagccgcagctccatcacgctggagcgccggctgggcaccggctgcttcggggatgtgtggctgggtacggagctcccgggggccgggacgagggcctgggctcgggggagagggtcctgacaagacagcctccgagcaggcacggacagcgacgccaccatccggggctccctgagcggggtgcgggcgctgganccttaaccggccncaaccgcatcacccgtt

SEQ ID NO: 302831 - DNA, 781 bp, Homo sapiens
ctctgagtgttgcaatggcaatgtttctggcagggtgtgggggacccttgctcaatgacctcctgccctgttgctcagaggataccgctgccagaaaagggttggctcattgtggggcttcccaaggtactctggtagccccagcttctgacctggtcctttctctggtatggggataggaggagagctccggaggtctctgacccctcccaaggatcatgccgcagccccactgacccaggagtaggggcctaagggcagggaacctggaatgggctgtgtgttctgcaagaaattggagccggtggccacggccaaggaggatgctggcctggaaggggacttcagaagctacggggcagcagaccactatgggcctgaccccactaaggcccggcctgcatcctcatttgcccacatccccaactacagcaacttctcctctcaggccatcaaccctggcttccttgatagtggcaccatcaggggtgtgtcaggtgagtccaaggggtcggaggcaggagctgcctggatcctgggagaaactgagggaagaagaagagatgcgaacttgcccttaggagcctccaggaggatgtggcagatacaaccccgctttcaagatcacatgggctgagggagtctgtacagccctcccatcagaaaccacagtctgcaggggagggtcaagaagctctactcccagtctgagaggggcaggatcctgtgacagatgcaagtgacaaagagaaacttcttgcccttttaggtgccacttccc

SEQ ID NO: 302832 - DNA, 2469 bp, Homo sapiens
caaagggtgagaggggcaggtggggctagggtggagaccaaagcactgatgtgacggaaccatcagccaggcaactggacctggtggatccaggaagactttctggaagaggtctctgacccctcccaaggatcatgccgcagccccactgacccaggagtaggggcctaagggcagggaacctggaatgggctgtgtgttctgcaagaaattggagccggtggccacggccaaggaggatgctggcctggaaggggacttcagaagctacggggcagcagaccactatgggcctgaccccactaaggcccggcctgcatcctcatttgcccacatccccaactacagcaacttctcctctcaggccatcaaccctggcttccttgatagtggcaccatcaggggtgtgtcagggattggggtgaccctgttcattgccctgtatgactatgaggctcgaactgaggatgacctcaccttcaccaagggcgagaagttccacatcctgaacaatactgaaggtgactggtgggaggctcggtctctcagctccggaaaaactggctgcattcccagcaactacgtggcccctgttgactcaatccaagctgaagagtggtactttggaaagattgggagaaaggatgcagagaggcagctgctttcaccaggcaacccccagggggcctttctcattcgggaaagcgagaccaccaaaggtgcctactccctgtccatccgggactgggatcagaccagaggcgatcatgtgaagcattacaagatccgcaaactggacatgggcggctactacatcaccacacgggttcagttcaactcggtgcaggagctggtgcagcactacatggaggtgaatgacgggctgtgcaacctgctcatcgcgccctgcaccatcatgaagccgcagacgctgggcctggccaaggacgcctgggagatcagccgcagctccatcacgctggagcgccggctgggcaccggctgcttcggggatgtgtggctgggtacggagctcccgggggccgggacgagggcctgggctcgggggagagggtcctgacaagacagcctccgagcaggcacgtggaacggcagcactaaggtggcggtgaagacgctgaagccgggcaccatgtccccgaaggccttcctggaggaggcgcaggtcatgaagctgctgcggcacgacaagctggtgcagctgtacgccgtggtgtcggaggagcccatctacatcgtgaccgagttcatgtgtcacggcagcttgctggattttctcaagaacccagagggccaggatttgaggctgccccaattggtggacatggcagcccaggtagctgagggcatggcctacatggaacgcatgaactacattcaccgcgacctgagggcagccaacatcctggttggggagcggctggcgtgcaagatcgcagactttggcttggcgcgtctcatcaaggacgatgagtacaacccctgccaaggttccaagttccccatcaagtggacagccccagaagctgccctctttggcagattcaccatcaagtcagacgtgtggtcctttgggatcctgctcactgagctcatcaccaagggccgaatcccctacccaggcatgaataaacgggaagtgttggaacaggtggagcagggctaccacatgccgtgccctccaggctgcccagcatccctgtacgaggccatggaacagacctggcgtctggacccggaggagaggcctaccttcgagtacctgcagtccttcctggaggactacttcacctccgctgaaccacagtaccagcccggggatcagacatagcctgtccgggcatcaaccctctctggcggtggccaccagtccttgccaatccccagagctgttcttccaaagcccccaggctggcttagaaccccatagagtcctagcatcaccgaggacgtggctgctctgacaccacctagggcaacctacttgttttacagatggggcaaaaggaggcccagagctgatctctcatccgctctggccccaagcactatttcttccttttccacttaggcccctacatgcctgtagcctttctcactccatccccacccaaagtgctcagaccttgtctagttatttataaaactgtatgtacctccctcacttctctcctatcactgctttcctactctccttttatctcactctagtccaggtgccaagaatttcccttctaccctctattctcttgtgtctgtaagttacaaagtcaggaaaagtcttggctggacccctttcctgctgggtggatgcagtggtccaggactggggtctgggcccaggtttgagggagaaggttgcagagcacttcccacctctctgaatagtgtgtatgtgttggtttattgattctgtaaataagtaaaatgacaatatgaatcctcaaa

SEQ ID NO: 302833 - DNA, 2373 bp, Homo sapiens
gcagcaccccagttctccccgcacgccggcactcgcggctgctggagccccggctggctcaccccggggccgggcagaattgggctccaggtctctgacccctcccaaggatcatgccgcagccccactgacccaggagtaggggcctaagggcagggaacctggaatgggctgtgtgttctgcaagaaattggagccggtggccacggccaaggaggatgctggcctggaaggggacttcagaagctacggggcagcagaccactatgggcctgaccccactaaggcccggcctgcatcctcatttgcccacatccccaactacagcaacttctcctctcaggccatcaaccctggcttccttgatagtggcaccatcaggggtgtgtcagggattggggtgaccctgttcattgccctgtatgactatgaggctcgaactgaggatgacctcaccttcaccaagggcgagaagttccacatcctgaacaatactgaaggtgactggtgggaggctcggtctctcagctccggaaaaactggctgcattcccagcaactacgtggcccctgttgactcaatccaagctgaagagtggtactttggaaagattgggagaaaggatgcagagaggcagctgctttcaccaggcaacccccagggggcctttctcattcgggaaagcgagaccaccaaaggtgcctactccctgtccatccgggactgggatcagaccagaggcgatcatgtgaagcattacaagatccgcaaactggacatgggcggctactacatcaccacacgggttcagttcaactcggtgcaggagctggtgcagcactacatggaggtgaatgacgggctgtgcaacctgctcatcgcgccctgcaccatcatgaagccgcagacgctgggcctggccaaggacgcctgggagatcagccgcagctccatcacgctggagcgccggctgggcaccggctgcttcggggatgtgtggctgggcacgtggaacggcagcactaaggtggcggtgaagacgctgaagccgggcaccatgtccccgaaggccttcctggaggaggcgcaggtcatgaagctgctgcggcacgacaagctggtgcagctgtacgccgtggtgtcggaggagcccatctacatcgtgaccgagttcatgtgtcacggcagcttgctggattttctcaagaacccagagggccaggatttgaggctgccccaattggtggacatggcagcccaggtagctgagggcatggcctacatggaacgcatgaactacattcaccgcgacctgagggcagccaacatcctggttggggagcggctggcgtgcaagatcgcagactttggcttggcgcgtctcatcaaggacgatgagtacaacccctgccaaggttccaagttccccatcaagtggacagccccagaagctgccctctttggcagattcaccatcaagtcagacgtgtggtcctttgggatcctgctcactgagctcatcaccaagggccgaatcccctacccaggcatgaataaacgggaagtgttggaacaggtggagcagggctaccacatgccgtgccctccaggctgcccagcatccctgtacgaggccatggaacagacctggcgtctggacccggaggagaggcctaccttcgagtacctgcagtccttcctggaggactacttcacctccgctgaaccacagtaccagcccggggatcagacatagcctgtccgggcatcaaccctctctggcggtggccaccagtccttgccaatccccagagctgttcttccaaagcccccaggctggcttagaaccccatagagtcctagcatcaccgaggacgtggctgctctgacaccacctagggcaacctacttgttttacagatggggcaaaaggaggcccagagctgatctctcatccgctctggccccaagcactatttcttccttttccacttaggcccctacatgcctgtagcctttctcactccatccccacccaaagtgctcagaccttgtctagttatttataaaactgtatgtacctccctcacttctctcctatcactgctttcctactctccttttatctcactctagtccaggtgccaagaatttcccttctaccctctattctcttgtgtctgtaagttacaaagtcaggaaaagtcttggctggacccctttcctgctgggtggatgcagtggtccaggactggggtctgggcccaggtttgagggagaaggttgcagagcacttcccacctctctgaatagtgtgtatgtgttggtttattgattctgtaaataagtaaaatgacaatatgaatcctcaaa

SEQ ID NO: 302834 - DNA, 883 bp, Homo sapiens
gttgtaacaggaaatacttcagcttgcaatactgatagtaatgtgtggcacccagatcacgctgtttttatctgcagttcctttttagtattgtacaaagtttcttgaagatttttaaatacataagtttaaaagagaattaactttcaatttgcaaattaaaatgagaatggttgccttttcttcattatcaagagatggtgagttgtcctcctgtaagtaaattggttcttttctttctaatattgtgttccttgaaaccttactctagtatgcagggagagtggagggtgcctaagtgtaaaataattaaaacttaagctgatataattatcaataatagtaaccagttctgatatctacttgataccataacggtgagcattgatagactttcatagatttttacataagattagcttgagcaagttttcctcttttgtaggtactggggggaaaattctggaaaaatttttagagagttctttctaaaatgtcgaaatgcaaagctgtataaattgctgttgacgttagctgtctgaccaggaagtactctctttaagcctcacttaaaaaactaagtgtctgtaataacttcctttctcgggatgaaggtgctgatagcctggggtgttcttataacttaagttcagttttttctttcctgtgaggaagaggcagttttttaaatgaagccatctctggggaaatcgtattgattgttgtagctaaatacggaatttttaaagtctttagtatgttgaactggaaatataggacatgcgtttgagatctactgtgagtaagtgtcattggtattttattttacatttaatgttgattataaatatggtttgtgtctaaacactgttaaaaaaaatga

SEQ ID NO: 302835 - DNA, 2936 bp, Homo sapiens
acggccattaccaatcgcgaaaccgttgcatcataaatacaaaggactgaagttataaaagagaaaagagaagtttgctgctaaaatgaatctgagcaatatggaatattttgtgccacacacaaaaaggtactgaagatttaccccccaaaaaaaattgtcaatgagaaataaagctaactgatatcaaaaagcagagcctgctctactggccatcatgcgtaaaggggtgctgaaggacccagagattgccgatctattctacaaagatgatcctgaggaactttttattggtttgcatgaaattggacatggaagttttggagcagtttattttgctacaaatgctcacaccagtgaggtggtggcaattaagaagatgtcctatagtgggaagcagacccatgagaaatggcaagatattcttaaggaagttaaatttttacgacaattgaagcatcctaatactattgagtacaaaggctgttacttgaaagaacacactgcttggttggtgatggaatattgcttaggctcagcctctgatttattagaagttcataaaaaaccacttcaggaagtggagatcgctgccattactcatggagccttgcatggactagcctacctacattctcatgcattgattcatagggatattaaagcaggaaatattcttctaacagagccaggtcaggtaaaactagctgattttggatctgcttcaatggcttctcctgccaactccttcgtgggcacaccttactggatggctccagaggtgatcttagctatggatgaaggacagtatgatgggaaagttgatatttggtcacttggcatcacttgtattgaattggcggaacggaagccgccccttttcaacatgaatgcaatgagtgccttatatcacattgcccagaatgactccccaacgttacagtctaatgaatggacagactcctttaggagatttgttgattactgcttgcagaaaatacctcaggaaaggccaacatcagcagaactattaaggcatgactttgttcgacgagaccggccactacgtgtcctcattgacctcatacagaggacaaaagatgcagttcgtgagctagataacctacagtaccgaaaaatgaaaaaaatacttttccaagagacacggaatggacccttgaatgagtcacaggaggatgaggaagacagtgaacatggaaccagcctgaacagggaaatggacagcctgggcagcaaccattccattccaagcatgtccgtgagcacaggcagccagagcagcagtgtgaacagcatgcaggaagtcatggacgagagcagttccgaacttgtcatgatgcacgatgacgaaagcacaatcaattccagctcctccgtcgtgcataagaaagatcatgtattcataagggatgaggcgggccacggcgatcccaggcctgagccgcggcctacccagtcagttcagagccaggccctccactaccggaacagagagcgctttgccacgatcaaatcagcatctttggttacacgacagatccatgagcatgagcaggagaacgagttgcgggaacagatgtcaggttataagcggatgcggcgccagcaccagaagcagctgatcgccctggagaacaagctgaaggctgagatggacgagcaccgcctcaagctacagaaggaggtggagacgcatgccaacaactcgtccatcgagctggagaagctggccaagaagcaagtggctatcatagaaaaggaggcaaaggtagctgcagcagatgagaagaagttccagcaacagatcttggcccagcagaagaaagatttgacaactttcttagaaagtcagaagaagcagtataagatttgtaaggaaaaaataaaagaggaaatgaatgaggaccatagcacacccaagaaagagaagcaagagcggatctccaaacataaagagaacttgcagcacacacaggctgaagaggaagcccaccttctcactcaacagagactgtactacgacaaaaattgtcgtttcttcaagcggaaaataatgatcaagcggcacgaggtggagcagcagaacattcgggaggaactaaataaaaagaggacccagaaggagatggagcatgccatgctaatccggcacgacgagtccacccgagagctagagtacaggcagctgcacacgttacagaagctacgcatggatctgatccgtttacagcaccagacggaactggaaaaccagctggagtacaataagaggcgagaaagagaactgcacagaaagcatgtcatggaacttcggcaacagccaaaaaacttaaaggccatggaaatgcaaattaaaaaacagtttcaggacacttgcaaagtacagaccaaacagtataaagcactcaagaatcaccagttggaagttactccaaagaatgagcacaaaacaatcttaaagacactgaaagatgagcagacaagaaaacttgccattttggcagagcagtatgaacagagtataaatgaaatgatggcctctcaagcgttacggctagatgaggctcaagaagcagaatgccaggccttgaggctacagctccagcaggaaatggagctgctcaacgcctaccagagcaaaatcaagatgcaaacagaggcacaacatgaacgtgagctccagaagctagagcagagagtgtctctgcgcagagcacaccttgagcagaagattgaagaggagctggctgcccttcagaaggaacgcagcgagagaataaagaacctattggaaaggcaagagcgagagattgaaacttttgacatggagagcctcagaatgggatttgggaatttggttacattagattttcctaaggaggactacagatgagattaaattttttgccatttac

SEQ ID NO: 302836 - DNA, 711 bp, Homo sapiens
ggcaaatagtgagcattcaacaatatttgttgaatgaaagaatgagttgggtaagtggatggatccttaggttgatgacctgtgtatactagtgaactaactagactatgaagtaatgtatgttgtcacctatggctatgtctcaagaaaaaaatacctcttagcactatcagttttacttaattaattagtttcttttttttcttctcctagcatgagccaccgcgcccggccatatgtccattctttatttgggtttttttgtccttttgttattgagttgtgagaccaagaggcttttaatatttgtatgtatttgtattgccaccaagtaaaatgtgttagaaataatttaatggcaaaccttatttttctacaggtactgaagatttaccccccaaaaaaaattgtcaatgagaaataaagctaactgatatcaaaaagcagagcctgctctactggccatcatgcgtaaaggggtgctgaaggacccagagattgccgatctattctacaaagatgatcctgaggaactttttattggtttgcatgaaattggacatggaagttttggagcagtttattttgtaagtacttaaaagagtcttttagatagatcagattaagaaaggttggactctaggcctggcacagtgactcacgcctgtaatcctagcactttgcaaggccaaggtgggaggaaagaccagc

SEQ ID NO: 302837 - DNA, 3147 bp, Homo sapiens
aagcttgcggccgcgggagggtccttgtggcgccgggcggcggggtcctgcgtggagagtgggacgcaacgccgagaccgcgagcagaggctgcgcacagccggatccggcactcagcgaccggacccaaggatccgccggggaacaagccacaggagagcgactcaggaacaagtgtgggagaggaagcggcggcggcggcgccgggcccgggggtggtgacagcaggtctgaggttgcatcataaatacaaaggactgaagttataaaagagaaaagagaagtttgctgctaaaatgaatctgagcaatatggaatattttgtgccacacacaaaaaggtactgaagatttaccccccaaaaaaaattgtcaatgagaaataaagctaactgatatcaaaaagcagagcctgctctactggccatcatgcgtaaaggggtgctgaaggacccagagattgccgatctattctacaaagatgatcctgaggaactttttattggtttgcatgaaattggacatggaagttttggagcagtttattttgctacaaatgctcacaccaatgaggtggtggcaattaagaagatgtcctatagtgggaagcagacccatgagaaatggcaagatattcttaaggaagttaaatttttacgacaattgaagcatcctaatactattgagtacaaaggctgttacttgaaagaacacactgcttggttggtgatggaatattgcttaggctcagcctctgatttattagaagttcataaaaaaccacttcaggaagtggagatcgctgccattactcatggagccttgcatggactagcctacctacattctcatgcattgattcatagggatattaaagcaggaaatattcttctaacagagccaggtcaggtaaaactagctgattttggatctgcttcaatggcttctcctgccaactccttcgtgggcacaccttactggatggctccagaggtgatcttagctatggatgaaggacagtatgatgggaaagttgatatttggtcacttggcatcacttgtattgaattggcggaacggaagccgccccttttcaacatgaatgcaatgagtgccttatatcacattgcccagaatgactccccaacgttacagtctaatgaatggacagactcctttaggagatttgttgattactgcttgcagaaaatacctcaggaaaggccaacatcagcagaactattaaggcatgactttgttcgacgagaccggccactacgtgtcctcattgacctcatacagaggacaaaagatgcagttcgtgagctagataacctacagtaccgaaaaatgaaaaaaatacttttccaagagacacggaatggacccttgaatgagtcacaggaggatgaggaagacagtgaacatggaaccagcctgaacagggaaatggacagcctgggcagcaaccattccattccaagcatgtccgtgagcacaggcagccagagcagcagtgtgaacagcatgcaggaagtcatggacgagagcagttccgaacttgtcatgatgcacgatgacgaaagcacaatcaattccagctcctccgtcgtgcataagaaagatcatgtattcataagggatgaggcgggccacggcgatcccaggcctgagccgcggcctacccagtcagttcagagccaggccctccactaccggaacagagagcgctttgccacgatcaaatcagcatctttggttacacgacagatccatgagcatgagcaggagaacgagttgcgggaacagatgtcaggttataagcggatgcggcgccagcaccagaagcagctgatcgccctggagaacaagctgaaggctgagatggacgagcaccgcctcaagctacagaaggaggtggagacgcatgccaacaactcgtccatcgagctggagaagctggccaagaagcaagtggctatcatagaaaaggaggcaaaggtagctgcagcagatgagaagaagttccagcaacagatcttggcccagcagaagaaagatttgacaactttcttagaaagtcagaagaagcagtataagatttgtaaggaaaaaataaaagaggaaatgaatgaggaccatagcacacccaagaaagagaagcaagagcggatctccaaacataaagagaacttgcagcacacacaggctgaagaggaagcccaccttctcactcaacagagactgtactacgacaaaaattgtcgtttcttcaagcggaaaataatgatcaagcggcacgaggtggagcagcagaacattcgggaggaactaaataaaaagaggacccagaaggagatggagcatgccatgctaatccggcacgacgagtccacccgagagctagagtacaggcagctgcacacgttacagaagctacgcatggatctgatccgtttacagcaccagacggaactggaaaaccagctggagtacaataagaggcgagaaagagaactgcacagaaagcatgtcatggaacttcggcaacagccaaaaaacttaaaggccatggaaatgcaaattaaaaaacagtttcaggacacttgcaaagtacagaccaaacagtataaagcactcaagaatcaccagttggaagttactccaaagaatgagcacaaaacaatcttaaagacactgaaagatgagcagacaagaaaacttgccattttggcagagcagtatgaacagagtataaatgaaatgatggcctctcaagcgttacggctagatgaggctcaagaagcagaatgccaggccttgaggctacagctccagcaggaaatggagctgctcaacgcctaccagagcaaaatcaagatgcaaacagaggcacaacatgaacgtgagctccagaagctagagcagagagtgtctctgcgcagagcacaccttgagcagaagattgaagaggagctggctgcccttcagaaggaacgcagcgagagaataaagaacctattggaaaggcaagagcgagagattgaaacttttgacatggagagcctcagaatgggatttgggaatttggttacattagattttcctaaggaggactacagatgagattaaattttttgccatttac

SEQ ID NO: 302838 - DNA, 4191 bp, Homo sapiens
aagcttgcggccgcgggagggtccttgtggcgccgggcggcggggtcctgcgtggagagtgggacgcaacgccgagaccgcgagcagaggctgcgcacagccggatccggcactcagcgaccggacccaaggatccgccggggaacaagccacaggagagcgactcaggaacaagtgtgggagaggaagcggcggcggcggcgccgggcccgggggtggtgacagcaggtctgaggttgcatcataaatacaaaggactgaagttataaaagagaaaagagaagtttgctgctaaaatgaatctgagcaatatggaatattttgtgccacacacaaaaaggtactgaagatttaccccccaaaaaaaattgtcaatgagaaataaagctaactgatatcaaaaagcagagcctgctctactggccatcatgcgtaaaggggtgctgaaggacccagagattgccgatctattctacaaagatgatcctgaggaactttttattggtttgcatgaaattggacatggaagttttggagcagtttattttgctacaaatgctcacaccaatgaggtggtggcaattaagaagatgtcctatagtgggaagcagacccatgagaaatggcaagatattcttaaggaagttaaatttttacgacaattgaagcatcctaatactattgagtacaaaggctgttacttgaaagaacacactgcttggttggtgatggaatattgcttaggctcagcctctgatttattagaagttcataaaaaaccacttcaggaagtggagatcgctgccattactcatggagccttgcatggactagcctacctacattctcatgcattgattcatagggatattaaagcaggaaatattcttctaacagagccaggtcaggtaaaactagctgattttggatctgcttcaatggcttctcctgccaactccttcgtgggcacaccttactggatggctccagaggtgatcttagctatggatgaaggacagtatgatgggaaagttgatatttggtcacttggcatcacttgtattgaattggcggaacggaagccgccccttttcaacatgaatgcaatgagtgccttatatcacattgcccagaatgactccccaacgttacagtctaatgaatggacagactcctttaggagatttgttgattactgcttgcagaaaatacctcaggaaaggccaacatcagcagaactattaaggcatgactttgttcgacgagaccggccactacgtgtcctcattgacctcatacagaggacaaaagatgcagttcgtgagctagataacctacagtaccgaaaaatgaaaaaaatacttttccaagagacacggaatggacccttgaatgagtcacaggaggatgaggaagacagtgaacatggaaccagcctgaacagggaaatggacagcctgggcagcaaccattccattccaagcatgtccgtgagcacaggcagccagagcagcagtgtgaacagcatgcaggaagtcatggacgagagcagttccgaacttgtcatgatgcacgatgacgaaagcacaatcaattccagctcctccgtcgtgcataagaaagatcatgtattcataagggatgaggcgggccacggcgatcccaggcctgagccgcggcctacccagtcagttcagagccaggccctccactaccggaacagagagcgctttgccacgatcaaatcagcatctttggttacacgacagatccatgagcatgagcaggagaacgagttgcgggaacagatgtcaggttataagcggatgcggcgccagcaccagaagcagctgatcgccctggagaacaagctgaaggctgagatggacgagcaccgcctcaagctacagaaggaggtggagacgcatgccaacaactcgtccatcgagctggagaagctggccaagaagcaagtggctatcatagaaaaggaggcaaaggtagctgcagcagatgagaagaagttccagcaacagatcttggcccagcagaagaaagatttgacaactttcttagaaagtcagaagaagcagtataagatttgtaaggaaaaaataaaagaggaaatgaatgaggaccatagcacacccaagaaagagaagcaagagcggatctccaaacataaagagaacttgcagcacacacaggctgaagaggaagcccaccttctcactcaacagagactgtactacgacaaaaattgtcgtttcttcaagcggaaaataatgatcaagcggcacgaggtggagcagcagaacattcgggaggaactaaataaaaagaggacccagaaggagatggagcatgccatgctaatccggcacgacgagtccacccgagagctagagtacaggcagctgcacacgttacagaagctacgcatggatctgatccgtttacagcaccagacggaactggaaaaccagctggagtacaataagaggcgagaaagagaactgcacagaaagcatgtcatggaacttcggcaacagccaaaaaacttaaaggccatggaaatgcaaattaaaaaacagtttcaggacacttgcaaagtacagaccaaacagtataaagcactcaagaatcaccagttggaagttactccaaagaatgagcacaaaacaatcttaaagacactgaaagatgagcagacaagaaaacttgccattttggcagagcagtatgaacagagtataaatgaaatgatggcctctcaagcgttacggctagatgaggctcaagaagcagaatgccaggccttgaggctacagctccagcaggaaatggagctgctcaacgcctaccagagcaaaatcaagatgcaaacagaggcacaacatgaacgtgagctccagaagctagagcagagagtgtctctgcgcagagcacaccttgagcagaagattgaagaggagctggctgcccttcagaaggaacgcagcgagagaataaagaacctattggaaaggcaagagcgagagattgaaacttttgacatggagagcctcagaatgggatttgggaatttggttacattagattttcctaaggaggactacagatgagattaaattttttgccatttacaaaaaaaaaaaaaaaaagaaaacagaaaaaaattcagaccctgcaaaaccacattccccattttaacgggcgttgctctcactctctctctctcttactcttactgacatcgtgtcggactagtgcctgtttattcttactccatcaggggcccccttcctccccccgtgtcaactttcagtgctggccaaaacctggccgtctcttctattcacagtacacgtcacagtattgatgtgattcaaaatgtttcagtgaaaactttggagacagttttaacaaaaccaataaaccaacaacaaaaaaagtggatgtatattgctttaagcaatcactcattaccaccaatctgtgaaagtaaagcaaaaaataataataataaatgccaagggggagagagacacaatatccgcagccttacaccttaactagctgctgcattattttattttattttatttttttggtatttattcatcaggaataaaaaaaacaaagttttattaaagattgaaaatttgatacattttacagaaactaattgtgatgtacatatcagtggtgacatattattacttttttggggacggggggtgggtggggtgaagagatcttgtgatttttaagaacctgctggcaagagtttaacttgtcttcagcatattctgattgtatcataatcattttctgctgttgcagaggatgtgaatacacttaaggagctcacagaatcccagtagcacaaattgggctttggcaaatcgtgtattttgtgtatagaaggaatttaaggagaggtattacttattttcatattgtattttaactgtttctctgatcaaatttttttacttcctcctcctgttcctccccacctccctccttttccagttcagtatttggagttcaacactgtctctcaatcagatcatcttgatctttttctttatctcccttccccttcctaagtcccatttcttggtcataaatattgcattattcacactttcaaactgtgtattttcttacaataaaaaatgatga

SEQ ID NO: 302839 - DNA, 3127 bp, Homo sapiens
gttgtaacaggaaatacttcagcttgcaatactgatagtaatgtgtggcacccagatcacgctgtttttatctgcagttcctttttagtattgtacaaagtttcttgaagatttttaaatacataagtttaaaagagaattaactttcaatttgcaaattaaaatgagaatggttgccttttcttcattatcaagagatggtgagttgtcctcctgttgcatcataaatacaaaggactgaagttataaaagagaaaagagaagtttgctgctaaaatgaatctgagcaatatggaatattttgtgccacacacaaaaaggtactgaagatttaccccccaaaaaaaattgtcaatgagaaataaagctaactgatatcaaaaagcagagcctgctctactggccatcatgcgtaaaggggtgctgaaggacccagagattgccgatctattctacaaagatgatcctgaggaactttttattggtttgcatgaaattggacatggaagttttggagcagtttattttgctacaaatgctcacaccaatgaggtggtggcaattaagaagatgtcctatagtgggaagcagacccatgagaaatggcaagatattcttaaggaagttaaatttttacgacaattgaagcatcctaatactattgagtacaaaggctgttacttgaaagaacacactgcttggttggtgatggaatattgcttaggctcagcctctgatttattagaagttcataaaaaaccacttcaggaagtggagatcgctgccattactcatggagccttgcatggactagcctacctacattctcatgcattgattcatagggatattaaagcaggaaatattcttctaacagagccaggtcaggtaaaactagctgattttggatctgcttcaatggcttctcctgccaactccttcgtgggcacaccttactggatggctccagaggtgatcttagctatggatgaaggacagtatgatgggaaagttgatatttggtcacttggcatcacttgtattgaattggcggaacggaagccgccccttttcaacatgaatgcaatgagtgccttatatcacattgcccagaatgactccccaacgttacagtctaatgaatggacagactcctttaggagatttgttgattactgcttgcagaaaatacctcaggaaaggccaacatcagcagaactattaaggcatgactttgttcgacgagaccggccactacgtgtcctcattgacctcatacagaggacaaaagatgcagttcgtgagctagataacctacagtaccgaaaaatgaaaaaaatacttttccaagagacacggaatggacccttgaatgagtcacaggaggatgaggaagacagtgaacatggaaccagcctgaacagggaaatggacagcctgggcagcaaccattccattccaagcatgtccgtgagcacaggcagccagagcagcagtgtgaacagcatgcaggaagtcatggacgagagcagttccgaacttgtcatgatgcacgatgacgaaagcacaatcaattccagctcctccgtcgtgcataagaaagatcatgtattcataagggatgaggcgggccacggcgatcccaggcctgagccgcggcctacccagtcagttcagagccaggccctccactaccggaacagagagcgctttgccacgatcaaatcagcatctttggttacacgacagatccatgagcatgagcaggagaacgagttgcgggaacagatgtcaggttataagcggatgcggcgccagcaccagaagcagctgatcgccctggagaacaagctgaaggctgagatggacgagcaccgcctcaagctacagaaggaggtggagacgcatgccaacaactcgtccatcgagctggagaagctggccaagaagcaagtggctatcatagaaaaggaggcaaaggtagctgcagcagatgagaagaagttccagcaacagatcttggcccagcagaagaaagatttgacaactttcttagaaagtcagaagaagcagtataagatttgtaaggaaaaaataaaagaggaaatgaatgaggaccatagcacacccaagaaagagaagcaagagcggatctccaaacataaagagaacttgcagcacacacaggctgaagaggaagcccaccttctcactcaacagagactgtactacgacaaaaattgtcgtttcttcaagcggaaaataatgatcaagcggcacgaggtggagcagcagaacattcgggaggaactaaataaaaagaggacccagaaggagatggagcatgccatgctaatccggcacgacgagtccacccgagagctagagtacaggcagctgcacacgttacagaagctacgcatggatctgatccgtttacagcaccagacggaactggaaaaccagctggagtacaataagaggcgagaaagagaactgcacagaaagcatgtcatggaacttcggcaacagccaaaaaacttaaaggccatggaaatgcaaattaaaaaacagtttcaggacacttgcaaagtacagaccaaacagtataaagcactcaagaatcaccagttggaagttactccaaagaatgagcacaaaacaatcttaaagacactgaaagatgagcagacaagaaaacttgccattttggcagagcagtatgaacagagtataaatgaaatgatggcctctcaagcgttacggctagatgaggctcaagaagcagaatgccaggccttgaggctacagctccagcaggaaatggagctgctcaacgcctaccagagcaaaatcaagatgcaaacagaggcacaacatgaacgtgagctccagaagctagagcagagagtgtctctgcgcagagcacaccttgagcagaagattgaagaggagctggctgcccttcagaaggaacgcagcgagagaataaagaacctattggaaaggcaagagcgagagattgaaacttttgacatggagagcctcagaatgggatttgggaatttggttacattagattttcctaaggaggactacagatgagattaaattttttgccatttac

SEQ ID NO: 302840 - DNA, 3043 bp, Homo sapiens
aagcttgcggccgcgggagggtccttgtggcgccgggcggcggggtcctgcgtggagagtgggacgcaacgccgagaccgcgagcagaggctgcgcacagccggatccggcactcagcgaccggacccaaggatccgccggggaacaagccacaggagagcgactcaggaacaagtgtgggagaggaagcggcggcggcggcgccgggcccgggggtggtgacagcaggtctgaggttgcatcataaatacaaaggactgaagttataaaagagaaaagagaagtttgctgctaaaatgaatctgagcaatatggaatattttgtgccacacacaaaaaggtactgaagatttaccccccaaaaaaaattgtcaatgagaaataaagctaactgatatcaaaaagcagagcctgctctactggccatcatgcgtaaaggggtgctgaaggacccagagattgccgatctattctacaaagatgatcctgaggaactttttattggtttgcatgaaattggacatggaagttttggagcagtttattttgctacaaatgctcacaccaatgaggtggtggcaattaagaagatgtcctatagtgggaagcagacccatgagaaatggcaagatattcttaaggaagttaaatttttacgacaattgaagcatcctaatactattgagtacaaaggctgttacttgaaagaacacactgcttggttggtgatggaatattgcttaggctcagcctctgatttattagaagttcataaaaaaccacttcaggaagtggagatcgctgccattactcatggagccttgcatggactagcctacctacattctcatgcattgattcatagggatattaaagcaggaaatattcttctaacagagccaggtcaggtaaaactagctgattttggatctgcttcaatggcttctcctgccaactccttcgtgggcacaccttactggatggctccagaggtgatcttagctatggatgaaggacagtatgatgggaaagttgatatttggtcacttggcatcacttgtattgaattggcggaacggaagccgccccttttcaacatgaatgcaatgagtgccttatatcacattgcccagaatgactccccaacgttacagtctaatgaatggacagactcctttaggagatttgttgattactgcttgcagaaaatacctcaggaaaggccaacatcagcagaactattaaggcatgactttgttcgacgagaccggccactacgtgtcctcattgacctcatacagaggacaaaagatgcagttcgtgagctagataacctacagtaccgaaaaatgaaaaaaatacttttccaagagacacggaatggacccttgaatgagtcacaggaggatgaggaagacagtgaacatggaaccagcctgaacagggaaatggacagcctgggcagcaaccattccattccaagcatgtccgtgagcacaggcagccagagcagcagtgtgaacagcatgcaggaagtcatggacgagagcagttccgaacttgtcatgatgcacgatgacgaaagcacaatcaattccagctcctccgtcgtgcataagaaagatcatgtattcataagggatgaggcgggccacggcgatcccaggcctgagccgcggcctacccagtcagttcagagccaggccctccactaccggaacagagagcgctttgccacgatcaaatcagcatctttggttacacgacagatccatgagcatgagcaggagaacgagttgcgggaacagatgtcaggttataagcggatgcggcgccagcaccagaagcagctgatcgccctggagaacaagctgaaggctgagatggacgagcaccgcctcaagctacagaaggaggtggagacgcatgccaacaactcgtccatcgagctggagaagctggccaagaagcaagtggctatcatagaaaaggaggcaaaggtagctgcagcagatgagaagaagttccagcaacagatcttggcccagcagaagaaagatttgacaactttcttagaaagtcagaagaagcagtataagatttgtaaggaaaaaataaaagaggaaatgaatgaggaccatagcacacccaagaaagagaagcaagagcggatctccaaacataaagagaacttgcagcacacacaggctgaagaggaagcccaccttctcactcaacagagactgtactacgacaaaaattgtcgtttcttcaagcggaaaataatgatcaagcggcacgaggtggagcagcagaacattcgggaggaactaaataaaaagaggacccagaaggagatggagcatgccatgctaatccggcacgacgagtccacccgagagctagagtacaggcagctgcacacgttacagaagctacgcatggatctgatccgtttacagcaccagacggaactggaaaaccagctggagtacaataagaggcgagaaagagaactgcacagaaagcatgtcatggaacttcggcaacagccaaaaaacttaaaggccatggaaatgcaaattaaaaaacagtttcaggacacttgcaaagtacagaccaaacagtataaagcactcaagaatcaccagttggaagttactccaaagaatgagcacaaaacaatcttaaagacactgaaagatgagcagacaagaaaacttgccattttggcagagcagtatgaacagagtataaatgaaatgatggcctctcaagcgttacggctagatgaggctcaagaagcagaatgccaggccttgaggctacagctccagcaggaaatggagctgctcaacgcctaccagagcaaaatcaagatgcaaacagaaagcatgtcatggaacttcggcaacagccaaaaaacttaaaggccatggaaatgcaaaataaaaaaacagtttcaggacacttgcaaagtacagaccaaacagtataaagcactcaagaatcaccagttggaagttactccaaagaatgagct

SEQ ID NO: 302841 - DNA, 2357 bp, Homo sapiens
caggggtccggtgccactgggtggaagggggcgtggctgagggaactgccatatatgcagccttccttagttagagattaaactgggcacttttcacttatctgctttatgctactggtacccttgtgaggtaggcattgtcccccttctacaggccgaaacaccaaggcacgcatgtctgaccccacatcctaagtctttcttctgctctgctaggaaaccctcaacgttcccagccagaggaatgatgtgggttgctggggtggttgatgtgacacctgaaaggtactgtgagctgacagcagggctgccaaatggcacgaggaagccaaatgtacaatagatttgacttttcagctatttttaaaccgagagaaatcaccagcagggctgtttaaaaaaaaattaaaatgatgataggctgatattgccatgcataaatgttatcccaactgaaatattcattgctttagaaattctgaggaatatgaagtagttatttgcactttcttccagtagttccctgagaccaacgtaacagactattttcccagctcctgttctagaactaaattactaatgacccaggaggcatttggctctctgtgggaaagcagcacaatccaattgtgcttgagtgtcttttagcttctcatgagccatcccctaacacaggacactgacctagatccgcccagccgctgggcttgctagaacggcattgccagccccaggtggaccccaaacattgatattcttgtgagcaagttttaaatataatgatttagatgcattgatcacaggactcagccagccttcctcggtcctcccgtagttcctgtgtgtgtgtgtgtgtgtgtgtgtgtgcgcgcgcgcacttcatgtgtgtgtctatgtgtgtgtgcatgtcatatgtgtgcctatgggtgtatcgcgtgcacgtgggtgcctgttaggagatgctttccattaagaactgcatcgtgcttctttcagattgaagaggagctggctgcccttcagaaggaacgcagcgagagaataaagaacctattggaaaggcaagagcgagagattgaaacttttgacatggagagcctcagaatgggatttgggaatttggttacattagattttcctaaggaggactacagatgagattaaattttttgccatttacaaaaaaaaaaaaaaaaagaaaacagaaaaaaattcagaccctgcaaaaccacattccccattttaacgggcgttgctctcactctctctctctcttactcttactgacatcgtgtcggactagtgcctgtttattcttactccatcaggggcccccttcctccccccgtgtcaactttcagtgctggccaaaacctggccgtctcttctattcacagtacacgtcacagtattgatgtgattcaaaatgtttcagtgaaaactttggagacagttttaacaaaaccaataaaccaacaacaaaaaaagtggatgtatattgctttaagcaatcactcattaccaccaatctgtgaaagtaaagcaaaaaataataataataaatgccaagggggagagagacacaatatccgcagccttacaccttaactagctgctgcattattttattttattttatttttttggtatttattcatcaggaataaaaaaaacaaagttttattaaagattgaaaatttgatacattttacagaaactaattgtgatgtacatatcagtggtgacatattattacttttttggggacggggggtgggtggggtgaagagatcttgtgatttttaagaacctgctggcaagagtttaacttgtcttcagcatattctgattgtatcataatcattttctgctgttgcagaggatgtgaatacacttaaggagctcacagaatcccagtagcacaaattgggctttggcaaatcgtgtattttgtgtatagaaggaatttaaggagaggtattacttattttcatattgtattttaactgtttctctgatcaaatttttttacttcctcctcctgttcctccccacctccctccttttccagttcagtatttggagttcaacactgtctctcaatcagatcatcttgatctttttctttatctcccttccccttcctaagtcccatttcttggtcataaatattgcattattcacactttcaaactgtgtattttcttacaataaaaaatgatgaaaaaaaaaaaggctttacttcttttgcatgcactttaaaaacaaaacaaaacatttttcaggttccaaggaagagcatgataactgtcagagcttttaattatatttgtaaataaaagtgttcatcacaaaaa

SEQ ID NO: 302842 - DNA, 1302 bp, Homo sapiens
aagcttgcggccgcgggagggtccttgtggcgccgggcggcggggtcctgcgtggagagtgggacgcaacgccgagaccgcgagcagaggctgcgcacagccggatccggcactcagcgaccggacccaaggatccgccggggaacaagccacaggagagcgactcaggaacaagtgtgggagaggaagcggcggcggcggcgccgggcccgggggtggtgacagcaggtctgaggttgcatcataaatacaaaggactgaagttataaaagagaaaagagaagtttgctgctaaaatgaatctgagcaatatggaatattttgtgccacacacaaaaaggtactgaagatttaccccccaaaaaaaattgtcaatgagaaataaagctaactgatatcaaaaagcagagcctgctctactggccatcatgcgtaaaggggtgctgaaggacccagagattgccgatctattctacaaagatgatcctgaggaactttttattggtttgcatgaaattggacatggaagttttggagcagtttattttgctacaaatgctcacaccaatgaggtggtggcaattaagaagatgtcctatagtgggaagcagacccatgagaaatggcaagatattcttaaggaagttaaatttttacgacaattgaagcatcctaatactattgagtacaaaggctgttacttgaaagaacacactgcttggttggtgatggaatattgcttaggctcagcctctgatttattagaagttcataaaaaaccacttcaggaagtggagatcgctgccattactcatggagccttgcatggactagcctacctacattctcatgcattgattcatagggatattaaagcaggaaatattcttctaacagagccaggtcaggtaaaactagctgattttggatctgcttcaatggcttctcctgccaactccttcgtgggcacaccttactggatggctccagaggtgatcttagctatggatgaaggacagtatgatgggaaagttgatatttggtcacttggcatcacttgtattgaattggcggaacggaagccgccccttttcaacatgaatgcaatgagtgccttatatcacattgcccagaatgactccccaacgttacagtctaatgaatggacagactcctttaggagatttgttgattactgcttgcagaaaatacctcaggaaaggggaaaagggaaaggtgagaaaagagacacccaaattccagaacaatgtccagtgctaggtcaattccccctgtgaaggt

SEQ ID NO: 302843 - DNA, 1169 bp, Homo sapiens
aagcttgcggccgcgggagggtccttgtggcgccgggcggcggggtcctgcgtggagagtgggacgcaacgccgagaccgcgagcagaggctgcgcacagccggatccggcactcagcgaccggacccaaggatccgccggggaacaagccacaggagagcgactcaggaacaagtgtgggagaggaagcggcggcggcggcgccgggcccgggggtggtgacagcaggtctgaggttgcatcataaatacaaaggactgaagttataaaagagaaaagagaagtttgctgctaaaatgaatctgagcaatatggaatattttgtgccacacacaaaaaggtactgaagatttaccccccaaaaaaaattgtcaatgagaaataaagctaactgatatcaaaaagcagagcctgctctactggccatcatgcgtaaaggggtgctgaaggacccagagattgccgatctattctacaaagatgatcctgaggaactttttattggtttgcatgaaattggacatggaagttttggagcagtttattttgctacaaatgctcacaccaatgaggtggtggcaattaagaagatgtcctatagtgggaagcagacccatgagaaatggcaagatattcttaaggaagttaaatttttacgacaattgaagcatcctaatactattgagtacaaaggctgttacttgaaagaacacactgcttggttggtgatggaatattgcttaggctcagcctctgatttattagaagttcataaaaaaccacttcaggaagtggagatcgctgccattactcatggagccttgcatggactagcctacctacattctcatgcattgattcataggtaagattagagaccagttatgtttcttttcagttgcaggactgtctattccaggaaccttgaaaattagtgcatgctccaatttttaggttgcctaagcattcatgggaagcaaatagattgctgcttctggatataaaggataaagttgccagaatttagcttctatctcttattctctcctacgtatccacaattatatcatctttgttcagtaggtaactgttctccaggctaaatgttgcagggaaatttgaaaaagggcccaccaatctttagatactgtgtcatgaagaaaagaaaa

SEQ ID NO: 302844 - DNA, 3127 bp, Homo sapiens
gttgtaacaggaaatacttcagcttgcaatactgatagtaatgtgtggcacccagatcacgctgtttttatctgcagttcctttttagtattgtacaaagtttcttgaagatttttaaatacataagtttaaaagagaattaactttcaatttgcaaattaaaatgagaatggttgccttttcttcattatcaagagatggtgagttgtcctcctgttgcatcataaatacaaaggactgaagttataaaagagaaaagagaagtttgctgctaaaatgaatctgagcaatatggaatattttgtgccacacacaaaaaggtactgaagatttaccccccaaaaaaaattgtcaatgagaaataaagctaactgatatcaaaaagcagagcctgctctactggccatcatgcgtaaaggggtgctgaaggacccagagattgccgatctattctacaaagatgatcctgaggaactttttattggtttgcatgaaattggacatggaagttttggagcagtttattttgctacaaatgctcacaccagtgaggtggtggcaattaagaagatgtcctatagtgggaagcagacccatgagaaatggcaagatattcttaaggaagttaaatttttacgacaattgaagcatcctaatactattgagtacaaaggctgttacttgaaagaacacactgcttggttggtgatggaatattgcttaggctcagcctctgatttattagaagttcataaaaaaccacttcaggaagtggagatcgctgccattactcatggagccttgcatggactagcctacctacattctcatgcattgattcatagggatattaaagcaggaaatattcttctaacagagccaggtcaggtaaaactagctgattttggatctgcttcaatggcttctcctgccaactccttcgtgggcacaccttactggatggctccagaggtgatcttagctatggatgaaggacagtatgatgggaaagttgatatttggtcacttggcatcacttgtattgaattggcggaacggaagccgccccttttcaacatgaatgcaatgagtgccttatatcacattgcccagaatgactccccaacgttacagtctaatgaatggacagactcctttaggagatttgttgattactgcttgcagaaaatacctcaggaaaggccaacatcagcagaactattaaggcatgactttgttcgacgagaccggccactacgtgtcctcattgacctcatacagaggacaaaagatgcagttcgtgagctagataacctacagtaccgaaaaatgaaaaaaatacttttccaagagacacggaatggacccttgaatgagtcacaggaggatgaggaagacagtgaacatggaaccagcctgaacagggaaatggacagcctgggcagcaaccattccattccaagcatgtccgtgagcacaggcagccagagcagcagtgtgaacagcatgcaggaagtcatggacgagagcagttccgaacttgtcatgatgcacgatgacgaaagcacaatcaattccagctcctccgtcgtgcataagaaagatcatgtattcataagggatgaggcgggccacggcgatcccaggcctgagccgcggcctacccagtcagttcagagccaggccctccactaccggaacagagagcgctttgccacgatcaaatcagcatctttggttacacgacagatccatgagcatgagcaggagaacgagttgcgggaacagatgtcaggttataagcggatgcggcgccagcaccagaagcagctgatcgccctggagaacaagctgaaggctgagatggacgagcaccgcctcaagctacagaaggaggtggagacgcatgccaacaactcgtccatcgagctggagaagctggccaagaagcaagtggctatcatagaaaaggaggcaaaggtagctgcagcagatgagaagaagttccagcaacagatcttggcccagcagaagaaagatttgacaactttcttagaaagtcagaagaagcagtataagatttgtaaggaaaaaataaaagaggaaatgaatgaggaccatagcacacccaagaaagagaagcaagagcggatctccaaacataaagagaacttgcagcacacacaggctgaagaggaagcccaccttctcactcaacagagactgtactacgacaaaaattgtcgtttcttcaagcggaaaataatgatcaagcggcacgaggtggagcagcagaacattcgggaggaactaaataaaaagaggacccagaaggagatggagcatgccatgctaatccggcacgacgagtccacccgagagctagagtacaggcagctgcacacgttacagaagctacgcatggatctgatccgtttacagcaccagacggaactggaaaaccagctggagtacaataagaggcgagaaagagaactgcacagaaagcatgtcatggaacttcggcaacagccaaaaaacttaaaggccatggaaatgcaaattaaaaaacagtttcaggacacttgcaaagtacagaccaaacagtataaagcactcaagaatcaccagttggaagttactccaaagaatgagcacaaaacaatcttaaagacactgaaagatgagcagacaagaaaacttgccattttggcagagcagtatgaacagagtataaatgaaatgatggcctctcaagcgttacggctagatgaggctcaagaagcagaatgccaggccttgaggctacagctccagcaggaaatggagctgctcaacgcctaccagagcaaaatcaagatgcaaacagaggcacaacatgaacgtgagctccagaagctagagcagagagtgtctctgcgcagagcacaccttgagcagaagattgaagaggagctggctgcccttcagaaggaacgcagcgagagaataaagaacctattggaaaggcaagagcgagagattgaaacttttgacatggagagcctcagaatgggatttgggaatttggttacattagattttcctaaggaggactacagatgagattaaattttttgccatttac

SEQ ID NO: 302845 - DNA, 4324 bp, Homo sapiens
aagcttgcggccgcgggagggtccttgtggcgccgggcggcggggtcctgcgtggagagtgggacgcaacgccgagaccgcgagcagaggctgcgcacagccggatccggcactcagcgaccggacccaaggatccgccggggaacaagccacaggagagcgactcaggaacaagtgtgggagaggaagcggcggcggcggcgccgggcccgggggtggtgacagcaggtctgaggttgcatcataaatacaaaggactgaagttataaaagagaaaagagaagtttgctgctaaaatgaatctgagcaatatggaatattttgtgccacacacaaaaaggtactgaagatttaccccccaaaaaaaattgtcaatgagaaataaagctaactgatatcaaaaagcagagcctgctctactggccatcatgcgtaaaggggtgctgaaggacccagagattgccgatctattctacaaagatgatcctgaggaactttttattggtttgcatgaaattggacatggaagttttggagcagtttattttgctacaaatgctcacaccaatgaggtggtggcaattaagaagatgtcctatagtgggaagcagacccatgagaaatggcaagatattcttaaggaagttaaatttttacgacaattgaagcatcctaatactattgagtacaaaggctgttacttgaaagaacacactgcttggttggtgatggaatattgcttaggctcagcctctgatttattagaagttcataaaaaaccacttcaggaagtggagatcgctgccattactcatggagccttgcatggactagcctacctacattctcatgcattgattcatagggatattaaagcaggaaatattcttctaacagagccaggtcaggtaaaactagctgattttggatctgcttcaatggcttctcctgccaactccttcgtgggcacaccttactggatggctccagaggtgatcttagctatggatgaaggacagtatgatgggaaagttgatatttggtcacttggcatcacttgtattgaattggcggaacggaagccgccccttttcaacatgaatgcaatgagtgccttatatcacattgcccagaatgactccccaacgttacagtctaatgaatggacagactcctttaggagatttgttgattactgcttgcagaaaatacctcaggaaaggccaacatcagcagaactattaaggcatgactttgttcgacgagaccggccactacgtgtcctcattgacctcatacagaggacaaaagatgcagttcgtgagctagataacctacagtaccgaaaaatgaaaaaaatacttttccaagagacacggaatggacccttgaatgagtcacaggaggatgaggaagacagtgaacatggaaccagcctgaacagggaaatggacagcctgggcagcaaccattccattccaagcatgtccgtgagcacaggcagccagagcagcagtgtgaacagcatgcaggaagtcatggacgagagcagttccgaacttgtcatgatgcacgatgacgaaagcacaatcaattccagctcctccgtcgtgcataagaaagatcatgtattcataagggatgaggcgggccacggcgatcccaggcctgagccgcggcctacccagtcagttcagagccaggccctccactaccggaacagagagcgctttgccacgatcaaatcagcatctttggttacacgacagatccatgagcatgagcaggagaacgagttgcgggaacagatgtcaggttataagcggatgcggcgccagcaccagaagcagctgatcgccctggagaacaagctgaaggctgagatggacgagcaccgcctcaagctacagaaggaggtggagacgcatgccaacaactcgtccatcgagctggagaagctggccaagaagcaagtggctatcatagaaaaggaggcaaaggtagctgcagcagatgagaagaagttccagcaacagatcttggcccagcagaagaaagatttgacaactttcttagaaagtcagaagaagcagtataagatttgtaaggaaaaaataaaagaggaaatgaatgaggaccatagcacacccaagaaagagaagcaagagcggatctccaaacataaagagaacttgcagcacacacaggctgaagaggaagcccaccttctcactcaacagagactgtactacgacaaaaattgtcgtttcttcaagcggaaaataatgatcaagcggcacgaggtggagcagcagaacattcgggaggaactaaataaaaagaggacccagaaggagatggagcatgccatgctaatccggcacgacgagtccacccgagagctagagtacaggcagctgcacacgttacagaagctacgcatggatctgatccgtttacagcaccagacggaactggaaaaccagctggagtacaataagaggcgagaaagagaactgcacagaaagcatgtcatggaacttcggcaacagccaaaaaacttaaaggccatggaaatgcaaattaaaaaacagtttcaggacacttgcaaagtacagaccaaacagtataaagcactcaagaatcaccagttggaagttactccaaagaatgagcacaaaacaatcttaaagacactgaaagatgagcagacaagaaaacttgccattttggcagagcagtatgaacagagtataaatgaaatgatggcctctcaagcgttacggctagatgaggctcaagaagcagaatgccaggccttgaggctacagctccagcaggaaatggagctgctcaacgcctaccagagcaaaatcaagatgcaaacagaggcacaacatgaacgtgagctccagaagctagagcagagagtgtctctgcgcagagcacaccttgagcagaagattgaagaggagctggctgcccttcagaaggaacgcagcgagagaataaagaacctattggaaaggcaagagcgagagattgaaacttttgacatggagagcctcagaatgggatttgggaatttggttacattagattttcctaaggaggactacagatgagattaaattttttgccatttacaaaaaaaaaaaaaaaaagaaaacagaaaaaaattcagaccctgcaaaaccacattccccattttaacgggcgttgctctcactctctctctctcttactcttactgacatcgtgtcggactagtgcctgtttattcttactccatcaggggcccccttcctccccccgtgtcaactttcagtgctggccaaaacctggccgtctcttctattcacagtacacgtcacagtattgatgtgattcaaaatgtttcagtgaaaactttggagacagttttaacaaaaccaataaaccaacaacaaaaaaagtggatgtatattgctttaagcaatcactcattaccaccaatctgtgaaagtaaagcaaaaaataataataataaatgccaagggggagagagacacaatatccgcagccttacaccttaactagctgctgcattattttattttattttatttttttggtatttattcatcaggaataaaaaaaacaaagttttattaaagattgaaaatttgatacattttacagaaactaattgtgatgtacatatcagtggtgacatattattacttttttggggacggggggtgggtggggtgaagagatcttgtgatttttaagaacctgctggcaagagtttaacttgtcttcagcatattctgattgtatcataatcattttctgctgttgcagaggatgtgaatacacttaaggagctcacagaatcccagtagcacaaattgggctttggcaaatcgtgtattttgtgtatagaaggaatttaaggagaggtattacttattttcatattgtattttaactgtttctctgatcaaatttttttacttcctcctcctgttcctccccacctccctccttttccagttcagtatttggagttcaacactgtctctcaatcagatcatcttgatctttttctttatctcccttccccttcctaagtcccatttcttggtcataaatattgcattattcacactttcaaactgtgtattttcttacaataaaaaatgatgaaaaaaaaaaaggctttacttcttttgcatgcactttaaaaacaaaacaaaacatttttcaggttccaaggaagagcatgataactgtcagagcttttaattatatttgtaaataaaagtgttcatcacaaaaa

SEQ ID NO: 302846 - DNA, 3714 bp, Homo sapiens
gttgtaacaggaaatacttcagcttgcaatactgatagtaatgtgtggcacccagatcacgctgtttttatctgcagttcctttttagtattgtacaaagtttcttgaagatttttaaatacataagtttaaaagagaattaactttcaatttgcaaattaaaatgagaatggttgccttttcttcattatcaagagatggtgagttgtcctcctgtaagtaaattggttcttttctttctaatattgtgttccttgaaaccttactctagtatgcagggagagtggagggtgcctaagtgtaaaataattaaaacttaagctgatataattatcaataatagtaaccagttctgatatctacttgataccataacggtgagcattgatagactttcatagatttttacataagattagcttgagcaagttttcctcttttgtaggtactggggggaaaattctggaaaaatttttagagagttctttctaaaatgtcgaaatgcaaagctgtataaattgctgttgacgttagctgtctgaccaggaagtactctctttaagcctcacttaaaaaactaagtgtctgtaataacttcctttctcgggatgaaggtgctgatagcctggggtgttcttataacttaagttcagttttttctttcctgtgaggaagaggcagttttttaaatgaagccatctctggggaaatcgtattgattgttgtagctaaatacggaatttttaaagtctttagtatgttgaactggaaatataggacatgcgtttgagatctactgtgagttgcatcataaatacaaaggactgaagttataaaagagaaaagagaagtttgctgctaaaatgaatctgagcaatatggaatattttgtgccacacacaaaaaggtactgaagatttaccccccaaaaaaaattgtcaatgagaaataaagctaactgatatcaaaaagcagagcctgctctactggccatcatgcgtaaaggggtgctgaaggacccagagattgccgatctattctacaaagatgatcctgaggaactttttattggtttgcatgaaattggacatggaagttttggagcagtttattttgctacaaatgctcacaccaatgaggtggtggcaattaagaagatgtcctatagtgggaagcagacccatgagaaatggcaagatattcttaaggaagttaaatttttacgacaattgaagcatcctaatactattgagtacaaaggctgttacttgaaagaacacactgcttggttggtgatggaatattgcttaggctcagcctctgatttattagaagttcataaaaaaccacttcaggaagtggagatcgctgccattactcatggagccttgcatggactagcctacctacattctcatgcattgattcatagggatattaaagcaggaaatattcttctaacagagccaggtcaggtaaaactagctgattttggatctgcttcaatggcttctcctgccaactccttcgtgggcacaccttactggatggctccagaggtgatcttagctatggatgaaggacagtatgatgggaaagttgatatttggtcacttggcatcacttgtattgaattggcggaacggaagccgccccttttcaacatgaatgcaatgagtgccttatatcacattgcccagaatgactccccaacgttacagtctaatgaatggacagactcctttaggagatttgttgattactgcttgcagaaaatacctcaggaaaggccaacatcagcagaactattaaggcatgactttgttcgacgagaccggccactacgtgtcctcattgacctcatacagaggacaaaagatgcagttcgtgagctagataacctacagtaccgaaaaatgaaaaaaatacttttccaagagacacggaatggacccttgaatgagtcacaggaggatgaggaagacagtgaacatggaaccagcctgaacagggaaatggacagcctgggcagcaaccattccattccaagcatgtccgtgagcacaggcagccagagcagcagtgtgaacagcatgcaggaagtcatggacgagagcagttccgaacttgtcatgatgcacgatgacgaaagcacaatcaattccagctcctccgtcgtgcataagaaagatcatgtattcataagggatgaggcgggccacggcgatcccaggcctgagccgcggcctacccagtcagttcagagccaggccctccactaccggaacagagagcgctttgccacgatcaaatcagcatctttggttacacgacagatccatgagcatgagcaggagaacgagttgcgggaacagatgtcaggttataagcggatgcggcgccagcaccagaagcagctgatcgccctggagaacaagctgaaggctgagatggacgagcaccgcctcaagctacagaaggaggtggagacgcatgccaacaactcgtccatcgagctggagaagctggccaagaagcaagtggctatcatagaaaaggaggcaaaggtagctgcagcagatgagaagaagttccagcaacagatcttggcccagcagaagaaagatttgacaactttcttagaaagtcagaagaagcagtataagatttgtaaggaaaaaataaaagaggaaatgaatgaggaccatagcacacccaagaaagagaagcaagagcggatctccaaacataaagagaacttgcagcacacacaggctgaagaggaagcccaccttctcactcaacagagactgtactacgacaaaaattgtcgtttcttcaagcggaaaataatgatcaagcggcacgaggtggagcagcagaacattcgggaggaactaaataaaaagaggacccagaaggagatggagcatgccatgctaatccggcacgacgagtccacccgagagctagagtacaggcagctgcacacgttacagaagctacgcatggatctgatccgtttacagcaccagacggaactggaaaaccagctggagtacaataagaggcgagaaagagaactgcacagaaagcatgtcatggaacttcggcaacagccaaaaaacttaaaggccatggaaatgcaaattaaaaaacagtttcaggacacttgcaaagtacagaccaaacagtataaagcactcaagaatcaccagttggaagttactccaaagaatgagcacaaaacaatcttaaagacactgaaagatgagcagacaagaaaacttgccattttggcagagcagtatgaacagagtataaatgaaatgatggcctctcaagcgttacggctagatgaggctcaagaagcagaatgccaggccttgaggctacagctccagcaggaaatggagctgctcaacgcctaccagagcaaaatcaagatgcaaacagaggcacaacatgaacgtgagctccagaagctagagcagagagtgtctctgcgcagagcacaccttgagcagaagattgaagaggagctggctgcccttcagaaggaacgcagcgagagaataaagaacctattggaaaggcaagagcgagagattgaaacttttgacatggagagcctcagaatgggatttgggaatttggttacattagattttcctaaggaggactacagatgagattaaattttttgccatttac

SEQ ID NO: 302847 - DNA, 4338 bp, Homo sapiens
  misc_feature (35)..(35): n is a, c, g, or t
cagataggctaggtacgaggctggtgttaatcggncgagggtggcgccgggcggcggggtcctgcgtggagagtgggacgcaacgccgagaccgcgagcagaggctgcgcacagccggatccggcactcagcgaccggacccaaggatccgccggggaacaagccacaggagagcgactcaggaacaagtgtgggagaggaagcggcggcggcggcgccgggcccgggggtggtgacagcaggtctgaggttgcatcataaatacaaaggactgaagttataaaagagaaaagagaagtttgctgctaaaatgaatctgagcaatatggaatattttgtgccacacacaaaaaggtactgaagatttaccccccaaaaaaaattgtcaatgagaaataaagctaactgatatcaaaaagcagagcctgctctactggccatcatgcgtaaaggggtgctgaaggacccagagattgccgatctattctacaaagatgatcctgaggaactttttattggtttgcatgaaattggacatggaagttttggagcagtttattttgctacaaatgctcacaccagtgaggtggtggcaattaagaagatgtcctatagtgggaagcagacccatgagaaatggcaagatattcttaaggaagttaaatttttacgacaattgaagcatcctaatactattgagtacaaaggctgttacttgaaagaacacactgcttggttggtgatggaatattgcttaggctcagcctctgatttattagaagttcataaaaaaccacttcaggaagtggagatcgctgccattactcatggagccttgcatggactagcctacctacattctcatgcattgattcatagggatattaaagcaggaaatattcttctaacagagccaggtcaggtaaaactagctgattttggatctgcttcaatggcttctcctgccaactccttcgtgggcacaccttactggatggctccagaggtgatcttagctatggatgaaggacagtatgatgggaaagttgatatttggtcacttggcatcacttgtattgaattggcggaacggaagccgccccttttcaacatgaatgcaatgagtgccttatatcacattgcccagaatgactccccaacgttacagtctaatgaatggacagactcctttaggagatttgttgattactgcttgcagaaaatacctcaggaaaggccaacatcagcagaactattaaggcatgactttgttcgacgagaccggccactacgtgtcctcattgacctcatacagaggacaaaagatgcagttcgtgagctagataacctacagtaccgaaaaatgaaaaaaatacttttccaagagacacggaatggacccttgaatgagtcacaggaggatgaggaagacagtgaacatggaaccagcctgaacagggaaatggacagcctgggcagcaaccattccattccaagcatgtccgtgagcacaggcagccagagcagcagtgtgaacagcatgcaggaagtcatggacgagagcagttccgaacttgtcatgatgcacgatgacgaaagcacaatcaattccagctcctccgtcgtgcataagaaagatcatgtattcataagggatgaggcgggccacggcgatcccaggcctgagccgcggcctacccagtcagttcagagccaggccctccactaccggaacagagagcgctttgccacgatcaaatcagcatctttggttacacgacagatccatgagcatgagcaggagaacgagttgcgggaacagatgtcaggttataagcggatgcggcgccagcaccagaagcagctgatcgccctggagaacaagctgaaggctgagatggacgagcaccgcctcaagctacagaaggaggtggagacgcatgccaacaactcgtccatcgagctggagaagctggccaagaagcaagtggctatcatagaaaaggaggcaaaggtagctgcagcagatgagaagaagttccagcaacagatcttggcccagcagaagaaagatttgacaactttcttagaaagtcagaagaagcagtataagatttgtaaggaaaaaataaaagaggaaatgaatgaggaccatagcacacccaagaaagagaagcaagagcggatctccaaacataaagagaacttgcagcacacacaggctgaagaggaagcccaccttctcactcaacagagactgtactacgacaaaaattgtcgtttcttcaagcggaaaataatgatcaagcggcacgaggtggagcagcagaacattcgggaggaactaaataaaaagaggacccagaaggagatggagcatgccatgctaatccggcacgacgagtccacccgagagctagagtacaggcagctgcacacgttacagaagctacgcatggatctgatccgtttacagcaccagacggaactggaaaaccagctggagtacaataagaggcgagaaagagaactgcacagaaagcatgtcatggaacttcggcaacagccaaaaaacttaaaggccatggaaatgcaaattaaaaaacagtttcaggacacttgcaaagtacagaccaaacagtataaagcactcaagaatcaccagttggaagttactccaaagaatgagcacaaaacaatcttaaagacactgaaagatgagcagacaagaaaacttgccattttggcagagcagtatgaacagagtataaatgaaatgatggcctctcaagcgttacggctagatgaggctcaagaagcagaatgccaggccttgaggctacagctccagcaggaaatggagctgctcaacgcctaccagagcaaaatcaagatgcaaacagaggcacaacatgaacgtgagctccagaagctagagcagagagtgtctctgcgcagagcacaccttgagcagaagattgaagaggagctggctgcccttcagaaggaacgcagcgagagaataaagaacctattggaaaggcaagagcgagagattgaaacttttgacatggagagcctcagaatgggatttgggaatttggttacattagattttcctaaggaggactacagatgagattaaattttttgccatttacaaaaaaaaaaaaaaaaagaaaacagaaaaaaattcagaccctgcaaaaccacattccccattttaacgggcgttgctctcactctctctctctcttactcttactgacatcgtgtcggactagtgcctgtttattcttactccatcaggggcccccttcctccccccgtgtcaactttcagtgctggccaaaacctggccgtctcttctattcacagtacacgtcacagtattgatgtgattcaaaatgtttcagtgaaaactttggagacagttttaacaaaaccaataaaccaacaacaaaaaaagtggatgtatattgctttaagcaatcactcattaccaccaatctgtgaaagtaaagcaaaaaataataataataaatgccaagggggagagagacacaatatccgcagccttacaccttaactagctgctgcattattttattttattttatttttttggtatttattcatcaggaataaaaaaaacaaagttttattaaagattgaaaatttgatacattttacagaaactaattgtgatgtacatatcagtggtgacatattattacttttttggggacggggggtgggtggggtgaagagatcttgtgatttttaagaacctgctggcaagagtttaacttgtcttcagcatattctgattgtatcataatcattttctgctgttgcagaggatgtgaatacacttaaggagctcacagaatcccagtagcacaaattgggctttggcaaatcgtgtattttgtgtatagaaggaatttaaggagaggtattacttattttcatattgtattttaactgtttctctgatcaaatttttttacttcctcctcctgttcctccccacctccctccttttccagttcagtatttggagttcaacactgtctctcaatcagatcatcttgatctttttctttatctcccttccccttcctaagtcccatttcttggtcataaatattgcattattcacactttcaaactgtgtattttcttacaataaaaaatgatgaaaaaaaaaaaggctttacttcttttgcatgcactttaaaaacaaaacaaaacatttttcaggttccaaggaagagcatgataactgtcagagcttttaattatatttgtaaataaaagtgttcatcacaaaaa

SEQ ID NO: 302848 - DNA, 4327 bp, Homo sapiens
gtgacgcgttggtgcgtggacagtgtgtacagcaactgcgagtagcgtgacacttagaaggctgtctacatccctgtcatccgtgcactcagtgaccagacccgacggatcctgcggggtatcaagccacaggagagtgactcaggaactacgtgtgggagagtgaatgcggaggtgcgtggagtccggatgctcgtgggtggtggaccagccgtgtgcttgaggtatgcagtcgatcatagtacacaaggtgactggcatagttttaaatttgatgaggagagaagtttgctgctaaaatgaatctgagcaatatggaatattttgtgccacacacaaaaaggtactgaagatttaccccccaaaaaaaattgtcaatgagaaataaagctaactgatatcaaaaagcagagcctgctctactggccatcatgcgtaaaggggtgctgaaggacccagagattgccgatctattctacaaagatgatcctgaggaactttttattggtttgcatgaaattggacatggaagttttggagcagtttattttgctacaaatgctcacaccagtgaggtggtggcaattaagaagatgtcctatagtgggaagcagacccatgagaaatggcaagatattcttaaggaagttaaatttttacgacaattgaagcatcctaatactattgagtacaaaggctgttacttgaaagaacacactgcttggttggtgatggaatattgcttaggctcagcctctgatttattagaagttcataaaaaaccacttcaggaagtggagatcgctgccattactcatggagccttgcatggactagcctacctacattctcatgcattgattcatagggatattaaagcaggaaatattcttctaacagagccaggtcaggtaaaactagctgattttggatctgcttcaatggcttctcctgccaactccttcgtgggcacaccttactggatggctccagaggtgatcttagctatggatgaaggacagtatgatgggaaagttgatatttggtcacttggcatcacttgtattgaattggcggaacggaagccgccccttttcaacatgaatgcaatgagtgccttatatcacattgcccagaatgactccccaacgttacagtctaatgaatggacagactcctttaggagatttgttgattactgcttgcagaaaatacctcaggaaaggccaacatcagcagaactattaaggcatgactttgttcgacgagaccggccactacgtgtcctcattgacctcatacagaggacaaaagatgcagttcgtgagctagataacctacagtaccgaaaaatgaaaaaaatacttttccaagagacacggaatggacccttgaatgagtcacaggaggatgaggaagacagtgaacatggaaccagcctgaacagggaaatggacagcctgggcagcaaccattccattccaagcatgtccgtgagcacaggcagccagagcagcagtgtgaacagcatgcaggaagtcatggacgagagcagttccgaacttgtcatgatgcacgatgacgaaagcacaatcaattccagctcctccgtcgtgcataagaaagatcatgtattcataagggatgaggcgggccacggcgatcccaggcctgagccgcggcctacccagtcagttcagagccaggccctccactaccggaacagagagcgctttgccacgatcaaatcagcatctttggttacacgacagatccatgagcatgagcaggagaacgagttgcgggaacagatgtcaggttataagcggatgcggcgccagcaccagaagcagctgatcgccctggagaacaagctgaaggctgagatggacgagcaccgcctcaagctacagaaggaggtggagacgcatgccaacaactcgtccatcgagctggagaagctggccaagaagcaagtggctatcatagaaaaggaggcaaaggtagctgcagcagatgagaagaagttccagcaacagatcttggcccagcagaagaaagatttgacaactttcttagaaagtcagaagaagcagtataagatttgtaaggaaaaaataaaagaggaaatgaatgaggaccatagcacacccaagaaagagaagcaagagcggatctccaaacataaagagaacttgcagcacacacaggctgaagaggaagcccaccttctcactcaacagagactgtactacgacaaaaattgtcgtttcttcaagcggaaaataatgatcaagcggcacgaggtggagcagcagaacattcgggaggaactaaataaaaagaggacccagaaggagatggagcatgccatgctaatccggcacgacgagtccacccgagagctagagtacaggcagctgcacacgttacagaagctacgcatggatctgatccgtttacagcaccagacggaactggaaaaccagctggagtacaataagaggcgagaaagagaactgcacagaaagcatgtcatggaacttcggcaacagccaaaaaacttaaaggccatggaaatgcaaattaaaaaacagtttcaggacacttgcaaagtacagaccaaacagtataaagcactcaagaatcaccagttggaagttactccaaagaatgagcacaaaacaatcttaaagacactgaaagatgagcagacaagaaaacttgccattttggcagagcagtatgaacagagtataaatgaaatgatggcctctcaagcgttacggctagatgaggctcaagaagcagaatgccaggccttgaggctacagctccagcaggaaatggagctgctcaacgcctaccagagcaaaatcaagatgcaaacagaggcacaacatgaacgtgagctccagaagctagagcagagagtgtctctgcgcagagcacaccttgagcagaagattgaagaggagctggctgcccttcagaaggaacgcagcgagagaataaagaacctattggaaaggcaagagcgagagattgaaacttttgacatggagagcctcagaatgggatttgggaatttggttacattagattttcctaaggaggactacagatgagattaaattttttgccatttacaaaaaaaaaaaaaaaaagaaaacagaaaaaaattcagaccctgcaaaaccacattccccattttaacgggcgttgctctcactctctctctctcttactcttactgacatcgtgtcggactagtgcctgtttattcttactccatcaggggcccccttcctccccccgtgtcaactttcagtgctggccaaaacctggccgtctcttctattcacagtacacgtcacagtattgatgtgattcaaaatgtttcagtgaaaactttggagacagttttaacaaaaccaataaaccaacaacaaaaaaagtggatgtatattgctttaagcaatcactcattaccaccaatctgtgaaagtaaagcaaaaaataataataataaatgccaagggggagagagacacaatatccgcagccttacaccttaactagctgctgcattattttattttattttatttttttggtatttattcatcaggaataaaaaaaacaaagttttattaaagattgaaaatttgatacattttacagaaactaattgtgatgtacatatcagtggtgacatattattacttttttggggacggggggtgggtggggtgaagagatcttgtgatttttaagaacctgctggcaagagtttaacttgtcttcagcatattctgattgtatcataatcattttctgctgttgcagaggatgtgaatacacttaaggagctcacagaatcccagtagcacaaattgggctttggcaaatcgtgtattttgtgtatagaaggaatttaaggagaggtattacttattttcatattgtattttaactgtttctctgatcaaatttttttacttcctcctcctgttcctccccacctccctccttttccagttcagtatttggagttcaacactgtctctcaatcagatcatcttgatctttttctttatctcccttccccttcctaagtcccatttcttggtcataaatattgcattattcacactttcaaactgtgtattttcttacaataaaaaatgatgaaaaaaaaaaaggctttacttcttttgcatgcactttaaaaacaaaacaaaacatttttcaggttccaaggaagagcatgataactgtcagagcttttaattatatttgtaaataaaagtgttcatcacaaaaa

SEQ ID NO: 302849 - DNA, 3247 bp, Homo sapiens
gaatcttcccagcacaagatagagaggcagttcagcacaagcctacattggttctaggcagaacgatgatcctaccgaacagatctcaaataaaattaaattgagaaagcagatctttcaagggaatgaggcggaggctcgcttttatgttaaaagccaccagcatcctccttgctagacatggacatgacatttttaaaggaattatctggttacagcgttttaagcaaactgttctaaggagtctgtacattgcattattttttctattctttttttcttttgcatatatgtaattctggaggtaaagaaaaagcctgccagggattcagaaggcatcccactagcgatcagctgacattcctaactgaaggctgcaatgtgttgcttattcattttgtaccgtgggagctgcggggactagcagagagctaaactatgcatttcaaacagcagtgcttgtgcagaaagaggggtgagagagaggcagccggcgaggaaagagcacagctggactttctccttgtttttatccatttctgcaggatcatgtattcataagggatgaggcgggccacggcgatcccaggcctgagccgcggcctacccagtcagttcagagccaggccctccactaccggaacagagagcgctttgccacgatcaaatcagcatctttggttacacgacagatccatgagcatgagcaggagaacgagttgcgggaacagatgtcaggttataagcggatgcggcgccagcaccagaagcagctgatcgccctggagaacaagctgaaggctgagatggacgagcaccgcctcaagctacagaaggaggtggagacgcatgccaacaactcgtccatcgagctggagaagctggccaagaagcaagtggctatcatagaaaaggaggcaaaggtagctgcagcagatgagaagaagttccagcaacagatcttggcccagcagaagaaagatttgacaactttcttagaaagtcagaagaagcagtataagatttgtaaggaaaaaataaaagaggaaatgaatgaggaccatagcacacccaagaaagagaagcaagagcggatctccaaacataaagagaacttgcagcacacacaggctgaagaggaagcccaccttctcactcaacagagactgtactacgacaaaaattgtcgtttcttcaagcggaaaataatgatcaagcggcacgaggtggagcagcagaacattcgggaggaactaaataaaaagaggacccagaaggagatggagcatgccatgctaatccggcacgacgagtccacccgagagctagagtacaggcagctgcacacgttacagaagctacgcatggatctgatccgtttacagcaccagacggaactggaaaaccagctggagtacaataagaggcgagaaagagaactgcacagaaagcatgtcatggaacttcggcaacagccaaaaaacttaaaggccatggaaatgcaaattaaaaaacagtttcaggacacttgcaaagtacagaccaaacagtataaagcactcaagaatcaccagttggaagttactccaaagaatgagcacaaaacaatcttaaagacactgaaagatgagcagacaagaaaacttgccattttggcagagcagtatgaacagagtataaatgaaatgatggcctctcaagcgttacggctagatgaggctcaagaagcagaatgccaggccttgaggctacagctccagcaggaaatggagctgctcaacgcctaccagagcaaaatcaagatgcaaacagaggcacaacatgaacgtgagctccagaagctagagcagagagtgtctctgcgcagagcacaccttgagcagaagattgaagaggagctggctgcccttcagaaggaacgcagcgagagaataaagaacctattggaaaggcaagagcgagagattgaaacttttgacatggagagcctcagaatgggatttgggaatttggttacattagattttcctaaggaggactacagatgagattaaattttttgccatttacaaaaaaaaaaaaaaaaagaaaacagaaaaaaattcagaccctgcaaaaccacattccccattttaacgggcgttgctctcactctctctctctcttactcttactgacatcgtgtcggactagtgcctgtttattcttactccatcaggggcccccttcctccccccgtgtcaactttcagtgctggccaaaacctggccgtctcttctattcacagtacacgtcacagtattgatgtgattcaaaatgtttcagtgaaaactttggagacagttttaacaaaaccaataaaccaacaacaaaaaaagtggatgtatattgctttaagcaatcactcattaccaccaatctgtgaaagtaaagcaaaaaataataataataaatgccaagggggagagagacacaatatccgcagccttacaccttaactagctgctgcattattttattttattttatttttttggtatttattcatcaggaataaaaaaaacaaagttttattaaagattgaaaatttgatacattttacagaaactaattgtgatgtacatatcagtggtgacatattattacttttttggggacggggggtgggtggggtgaagagatcttgtgatttttaagaacctgctggcaagagtttaacttgtcttcagcatattctgattgtatcataatcattttctgctgttgcagaggatgtgaatacacttaaggagctcacagaatcccagtagcacaaattgggctttggcaaatcgtgtattttgtgtatagaaggaatttaaggagaggtattacttattttcatattgtattttaactgtttctctgatcaaatttttttacttcctcctcctgttcctccccacctccctccttttccagttcagtatttggagttcaacactgtctctcaatcagatcatcttgatctttttctttatctcccttccccttcctaagtcccatttcttggtcataaatattgcattattcacactttcaaactgtgtattttcttacaataaaaaatgatgaaaaaaaaaaaggctttacttcttttgcatgcactttaaaaacaaaacaaaacatttttcaggttccaaggaagagcatgataactgtcagagcttttaattatatttgtaaataaaagtgttcatcacaaaaa

SEQ ID NO: 302850 - DNA, 2610 bp, Homo sapiens
ttatgttctgacccaccatacacaaaaatcaatcagcatcttggttacacgacagatccatgagcatgagcaggagaacgagttgcgggaacagatgtcaggttataagcggatgcggcgccagcaccagaagcagctgatcgccctggagaacaagctgaaggctgagatggacgagcaccgcctcaagctacagaaggaggtggagacgcatgccaacaactcgtccatcgagctggagaagctggccaagaagcaagtggctatcatagaaaaggaggcaaaggtagctgcagcagatgagaagaagttccagcaacagatcttggcccagcagaagaaagatttgacaactttcttagaaagtcagaagaagcagtataagatttgtaaggaaaaaataaaagaggaaatgaatgaggaccatagcacacccaagaaagagaagcaagagcggatctccaaacataaagagaacttgcagcacacacaggctgaagaggaagcccaccttctcactcaacagagactgtactacgacaaaaattgtcgtttcttcaagcggaaaataatgatcaagcggcacgaggtggagcagcagaacattcgggaggaactaaataaaaagaggacccagaaggagatggagcatgccatgctaatccggcacgacgagtccacccgagagctagagtacaggcagctgcacacgttacagaagctacgcatggatctgatccgtttacagcaccagacggaactggaaaaccagctggagtacaataagaggcgagaaagagaactgcacagaaagcatgtcatggaacttcggcaacagccaaaaaacttaaaggccatggaaatgcaaattaaaaaacagtttcaggacacttgcaaagtacagaccaaacagtataaagcactcaagaatcaccagttggaagttactccaaagaatgagcacaaaacaatcttaaagacactgaaagatgagcagacaagaaaacttgccattttggcagagcagtatgaacagagtataaatgaaatgatggcctctcaagcgttacggctagatgaggctcaagaagcagaatgccaggccttgaggctacagctccagcaggaaatggagctgctcaacgcctaccagagcaaaatcaagatgcaaacagaggcacaacatgaacgtgagctccagaagctagagcagagagtgtctctgcgcagagcacaccttgagcagaagattgaagaggagctggctgcccttcagaaggaacgcagcgagagaataaagaacctattggaaaggcaagagcgagagattgaaacttttgacatggagagcctcagaatgggatttgggaatttggttacattagattttcctaaggaggactacagatgagattaaattttttgccatttacaaaaaaaaaaaaaaaaagaaaacagaaaaaaattcagaccctgcaaaaccacattccccattttaacgggcgttgctctcactctctctctctcttactcttactgacatcgtgtcggactagtgcctgtttattcttactccatcaggggcccccttcctccccccgtgtcaactttcagtgctggccaaaacctggccgtctcttctattcacagtacacgtcacagtattgatgtgattcaaaatgtttcagtgaaaactttggagacagttttaacaaaaccaataaaccaacaacaaaaaaagtggatgtatattgctttaagcaatcactcattaccaccaatctgtgaaagtaaagcaaaaaataataataataaatgccaagggggagagagacacaatatccgcagccttacaccttaactagctgctgcattattttattttattttatttttttggtatttattcatcaggaataaaaaaaacaaagttttattaaagattgaaaatttgatacattttacagaaactaattgtgatgtacatatcagtggtgacatattattacttttttggggacggggggtgggtggggtgaagagatcttgtgatttttaagaacctgctggcaagagtttaacttgtcttcagcatattctgattgtatcataatcattttctgctgttgcagaggatgtgaatacacttaaggagctcacagaatcccagtagcacaaattgggctttggcaaatcgtgtattttgtgtatagaaggaatttaaggagaggtattacttattttcatattgtattttaactgtttctctgatcaaatttttttacttcctcctcctgttcctccccacctccctccttttccagttcagtatttggagttcaacactgtctctcaatcagatcatcttgatctttttctttatctcccttccccttcctaagtcccatttcttggtcataaatattgcattattcacactttcaaactgtgtattttcttacaataaaaaatgatgaaaaaaaaaaaggctttacttcttttgcatgcactttaaaaacaaaacaaaacatttttcaggttccaaggaagagcatgataactgtcagagcttttaattatatttgtaaataaaagtgttcatcacaaaaa

SEQ ID NO: 302851 - DNA, 3176 bp, Homo sapiens
aagcttgcggccgcgggagggtccttgtggcgccgggcggcggggtcctgcgtggagagtgggacgcaacgccgagaccgcgagcagaggctgcgcacagccggatccggcactcagcgaccggacccaaggatccgccggggaacaagccacaggagagcgactcaggaacaagtgtgggagaggaagcggcggcggcggcgccgggcccgggggtggtgacagcaggtctgaggttgcatcataaatacaaaggactgaagttataaaagagaaaagagaagtttgctgctaaaatgaatctgagcaatatggaatattttgtgccacacacaaaaaggtactgaagatttaccccccaaaaaaaattgtcaatgagaaataaagctaactgatatcaaaaagcagagcctgctctactggccatcatgcgtaaaggggtgctgaaggacccagagattgccgatctattctacaaagatgatcctgaggaactttttattggtttgcatgaaattggacatggaagttttggagcagtttattttgctacaaatgctcacaccaatgaggtggtggcaattaagaagatgtcctatagtgggaagcagacccatgagaaatggcaagatattcttaaggaagttaaatttttacgacaattgaagcatcctaatactattgagtacaaaggctgttacttgaaagaacacactgcttggttggtgatggaatattgcttaggctcagcctctgatttattagaagttcataaaaaaccacttcaggaagtggagatcgctgccattactcatggagccttgcatggactagcctacctacattctcatgcattgattcatagggatattaaagcaggaaatattcttctaacagagccaggtcaggtaaaactagctgattttggatctgcttcaatggcttctcctgccaactccttcgtgggcacaccttactggatggctccagaggtgatcttagctatggatgaaggacagtatgatgggaaagttgatatttggtcacttggcatcacttgtattgaattggcggaacggaagccgccccttttcaacatgaatgcaatgagtgccttatatcacattgcccagaatgactccccaacgttacagtctaatgaatggacagactcctttaggagatttgttgattactgcttgcagaaaatacctcaggaaaggccaacatcagcagaactattaaggcatgactttgttcgacgagaccggccactacgtgtcctcattgacctcatacagaggacaaaagatgcagttcgtgagctagataacctacagtaccgaaaaatgaaaaaaatacttttccaagagacacggaatggacccttgaatgagtcacaggaggatgaggaagacagtgaacatggaaccagcctgaacagggaaatggacagcctgggcagcaaccattccattccaagcatgtccgtgagcacaggcagccagagcagcagtgtgaacagcatgcaggaagtcatggacgagagcagttccgaacttgtcatgatgcacgatgacgaaagcacaatcaattccagctcctccgtcgtgcataagaaagatcatgtattcataagggatgaggcgggccacggcgatcccaggcctgagccgcggcctacccagtcagttcagagccaggccctccactaccggaacagagagcgctttgccacgatcaaatcagcatctttggttacacgacagatccatgagcatgagcaggagaacgagttgcgggaacagatgtcaggttataagcggatgcggcgccagcaccagaagcagctgatcgccctggagaacaagctgaaggctgagatggacgagcaccgcctcaagctacagaaggaggtggagacgcatgccaacaactcgtccatcgagctggagaagctggccaagaagcaagtggctatcatagaaaaggaggcaaaggtagctgcagcagatgagaagaagttccagcaacagatcttggcccagcagaagaaagatttgacaactttcttagaaagtcagaagaagcagtataagatttgtaaggaaaaaataaaagaggaaatgaatgaggaccatagcacacccaagaaagagaagcaagagcggatctccaaacataaagagaacttgcagcacacacaggctgaagaggaagcccaccttctcactcaacagagactgtactacgacaaaaattgtcgtttcttcaagcggaaaataatgatcaagcggcacgaggtggagcagcagaacattcgggaggaactaaataaaaagaggacccagaaggagatggagcatgccatgctaatccggcacgacgagtccacccgagagctagagtacaggcagctgcacacgttacagaagctacgcatggatctgatccgtttacagcaccagacggaactggaaaaccagctggagtacaataagaggcgagaaagagaactgcacagaaagcatgtcatggaacttcggcaacagccaaaaaacttaaaggccatggaaatgcaaattaaaaaacagtttcaggacacttgcaaagtacagaccaaacagtataaagcactcaagaatcaccagttggaagttactccaaagaatgagcacaaaacaatcttaaagacactgaaagatgagcagacaagaaaacttgccattttggcagagcagtatgaacagagtataaatgaaatgatggcctctcaagcgttacggctagatgaggctcaagaagcagaatgccaggccttgaggctacagctccagcaggaaatggagctgctcaacgcctaccagagcaaaatcaagatgcaaacagaggcacaacatgaacgtgagctccagaagctagagcagagagtgtctctgcgcagagcacaccttgagcagaagattgaagaggagctggctgcccttcagaaggaacgcagcgagagaataaagaacctattggaaagtatttggagttcaacactgtctctcaatcagatcatcttgatctttttctttatctcccttccccttcctaagtcccatttcttggtcataaatattgcattattcacactttcaaactgtgtattttcttacaataaaaaatgatga

SEQ ID NO: 302852 - DNA, 3602 bp, Homo sapiens
aagcttgcggccgcgggagggtccttgtggcgccgggcggcggggtcctgcgtggagagtgggacgcaacgccgagaccgcgagcagaggctgcgcacagccggatccggcactcagcgaccggacccaaggatccgccggggaacaagccacaggagagcgactcaggaacaagtgtgggagaggaagcggcggcggcggcgccgggcccgggggtggtgacagcaggtctgaggttgcatcataaatacaaaggactgaagttataaaagagaaaagagaagtttgctgctaaaatgaatctgagcaatatggaatattttgtgccacacacaaaaaggtactgaagatttaccccccaaaaaaaattgtcaatgagaaataaagctaactgatatcaaaaagcagagcctgctctactggccatcatgcgtaaaggggtgctgaaggacccagagattgccgatctattctacaaagatgatcctgaggaactttttattggtttgcatgaaattggacatggaagttttggagcagtttattttgctacaaatgctcacaccaatgaggtggtggcaattaagaagatgtcctatagtgggaagcagacccatgagaaatggcaagatattcttaaggaagttaaatttttacgacaattgaagcatcctaatactattgagtacaaaggctgttacttgaaagaacacactgcttggttggtgatggaatattgcttaggctcagcctctgatttattagaagttcataaaaaaccacttcaggaagtggagatcgctgccattactcatggagccttgcatggactagcctacctacattctcatgcattgattcatagggatattaaagcaggaaatattcttctaacagagccaggtcaggtaaaactagctgattttggatctgcttcaatggcttctcctgccaactccttcgtgggcacaccttactggatggctccagaggtgatcttagctatggatgaaggacagtatgatgggaaagttgatatttggtcacttggcatcacttgtattgaattggcggaacggaagccgccccttttcaacatgaatgcaatgagtgccttatatcacattgcccagaatgactccccaacgttacagtctaatgaatggacagactcctttaggagatttgttgattactgcttgcagaaaatacctcaggaaaggccaacatcagcagaactattaaggcatgactttgttcgacgagaccggccactacgtgtcctcattgacctcatacagaggacaaaagatgcagttcgtgagctagataacctacagtaccgaaaaatgaaaaaaatacttttccaagagacacggaatggacccttgaatgagtcacaggaggatgaggaagacagtgaacatggaaccagcctgaacagggaaatggacagcctgggcagcaaccattccattccaagcatgtccgtgagcacaggcagccagagcagcagtgtgaacagcatgcaggaagtcatggacgagagcagttccgaacttgtcatgatgcacgatgacgaaagcacaatcaattccagctcctccgtcgtgcataagaaagatcatgtattcataagggatgaggcgggccacggcgatcccaggcctgagccgcggcctacccagtcagttcagagccaggccctccactaccggaacagagagcgctttgccacgatcaaatcagcatctttggttacacgacagatccatgagcatgagcaggagaacgagttgcgggaacagatgtcaggttataagcggatgcggcgccagcaccagaagcagctgatcgccctggagaacaagctgaaggctgagatggacgagcaccgcctcaagctacagaaggaggtggagacgcatgccaacaactcgtccatcgagctggagaagctggccaagaagcaagtggctatcatagaaaaggaggcaaaggtagctgcagcagatgagaagaagttccagcaacagatcttggcccagcagaagaaagatttgacaactttcttagaaagtcagaagaagcagtataagatttgtaaggaaaaaataaaagaggaaatgaatgaggaccatagcacacccaagaaagagaagcaagagcggatctccaaacataaagagaacttgcagcacacacaggctgaagaggaagcccaccttctcactcaacagagactgtactacgacaaaaattgtcgtttcttcaagcggaaaataatgatcaagcggcacgaggtggagcagcagaacattcgggaggaactaaataaaaagaggacccagaaggagatggagcatgccatgctaatccggcacgacgagtccacccgagagctagagtacaggcagctgcacacgttacagaagctacgcatggatctgatccgtttacagcaccagacggaactggaaaaccagctggagtacaataagaggcgagaaagagaactgcacagaaagcatgtcatggaacttcggcaacagccaaaaaacttaaaggccatggaaatgcaaattaaaaaacagtttcaggacacttgcaaagtacagaccaaacagtataaagcactcaagaatcaccagttggaagttactccaaagaatgagcacaaaacaatcttaaagacactgaaagatgagcagacaagaaaacttgccattttggcagagcagtatgaacagagtataaatgaaatgatggcctctcaagcggtaagtggttaggtttggtgccacggcttcgagagctttgggaatcaagaaaatccaagatccagcctgttgttcccaagatgattcttgcacaaatttaggatattgatgtttttctgcccaaaggactgaggaaaggacgacgttgaataaagccaagccaatgtggatacttgctggagtgtcttataagatggaactcaaggagtgacatgccacatcagacctgtggcacatagggactttgagggcaaatgtgatagataccacatatgataccatgtgttcatttatcaaagattttactgactgccctccccgcaactaatatcaggcacaaatgaataagagtccctgcccttagggagcccacagtcaagtgaggaagacagatacacagacacactcatgcaataaacttttattaagcatcagtgttcagcactctgctggactcagaggtggaggatgagctagacagacaatttgtcagtcaagccaggtggtcagataattaagcagtaatagtaaaacatggtaagtggggccgggcgcggtggctcacgcctgtaatcccagcattttgggaggccgaggcaggtggatcacaaggtcaggagttcgaaaccaggctgaccaacatggtgaaaccccatctctaccaaaagtacaaaaattagctgggcaggcacctgtagtcccagctactcaggaggctgaggcaggagaatcacttgaacccgggaggtggaggttgcagtgagctgagatcacatcactgcactccagcctgggtgacagagcaagactctgtctcaaaaa

SEQ ID NO: 302853 - DNA, 1589 bp, Homo sapiens
ctgtaggcaagggtgcatgaccgtgtgtgtcttctgtgtccgcagttacggctagatgaggctcaagaagcagaatgccaggccttgaggctacagctccagcaggaaatggagctgctcaacgcctaccagagcaaaatcaagatgcaaacagaggcacaacatgaacgtgagctccagaagctagagcagagagtgtctctgcgcagagcacaccttgagcagaagattgaagaggagctggctgcccttcagaaggaacgcagcgagagaataaagaacctattggaaaggcaagagcgagagattgaaacttttgacatggagagcctcagaatgggatttgggaatttggttacattagattttcctaaggaggactacagatgagattaaattttttgccatttacaaaaaaaaaaaaaaaaagaaaacagaaaaaaattcagaccctgcaaaaccacattccccattttaacgggcgttgctctcactctctctctctcttactcttactgacatcgtgtcggactagtgcctgtttattcttactccatcaggggcccccttcctccccccgtgtcaactttcagtgctggccaaaacctggccgtctcttctattcacagtacacgtcacagtattgatgtgattcaaaatgtttcagtgaaaactttggagacagttttaacaaaaccaataaaccaacaacaaaaaaagtggatgtatattgctttaagcaatcactcattaccaccaatctgtgaaagtaaagcaaaaaataataataataaatgccaagggggagagagacacaatatccgcagccttacaccttaactagctgctgcattattttattttattttatttttttggtatttattcatcaggaataaaaaaaacaaagttttattaaagattgaaaatttgatacattttacagaaactaattgtgatgtacatatcagtggtgacatattattacttttttggggacggggggtgggtggggtgaagagatcttgtgatttttaagaacctgctggcaagagtttaacttgtcttcagcatattctgattgtatcataatcattttctgctgttgcagaggatgtgaatacacttaaggagctcacagaatcccagtagcacaaattgggctttggcaaatcgtgtattttgtgtatagaaggaatttaaggagaggtattacttattttcatattgtattttaactgtttctctgatcaaatttttttacttcctcctcctgttcctccccacctccctccttttccagttcagtatttggagttcaacactgtctctcaatcagatcatcttgatctttttctttatctcccttccccttcctaagtcccatttcttggtcataaatattgcattattcacactttcaaactgtgtattttcttacaataaaaaatgatgaaaaaaaaaaaggctttacttcttttgcatgcactttaaaaacaaaacaaaacatttttcaggttccaaggaagagcatgataactgtcagagcttttaattatatttgtaaataaaagtgttcatcacaaaaa

SEQ ID NO: 302854 - DNA, 3515 bp, Homo sapiens
  misc_feature (52)..(52): n is a, c, g, or t
  misc_feature (746)..(746): n is a, c, g, or t
gttctcggtggtctcctcctgcttggagttgctcagctgggtctctttctgnaggaaaagctgcgggagcatctggcagagaaggagaagctgaacgaggagaggctagagcaagaggagaagctcaaagccaaaatcaggcaactgacggaagagaaggcggctttggaggagtacattactcaagagagaaacagagcgaaagagactttagaggaagaacggaagagaatgcaagaactggagagcctcctggcccagcagaagaaggctttggcgaaaagcattacccaggagaagaacagagtgaaggaagcattagaggaagagcagacaagagtccaagagctggaggaacgcttggcccgccagaaggagatctcagagagcaacattgcgtacgagaaacgcaaagcaaaggaggccatggagaaggaaaagaaaaaggtgcaagacctggagaatcgcttaaccaagcagaaagaggaattagaattaaaagagcaaaaagaggacgttttaaataataaattaagtgacgcactggccatggttgaagagactcagaaaacaaaggcaactgaaagtctaaaagcagagagcctcgccttgaaattaaatgaaacattagccgaactggaaactaccaagacaaaaatgatcatggtggaagagcggctaatcctgcagcagaagatggtaaaggccctccaggatgagcaggaatcacagagacacgggtttgnagaagagatcatggaatataaggagcaaatcaaacagcacgcccagacaattgtgagcctcgaagagaaactccagaaagtcactcagcaccataaaaaaatagaaggcgagattgcaacattgaaggacaatgacccagccccaaaggaggaaaggccgcaagaccctctggtggctcccatgacagagagcagtgccaaagacatggcgtacgaacatctgatagatgacttattggctgctcagaaggaaattctgtctcagcaggaagtcatcatgaagttaaggaaagaccttaccgaagcccacagcagaatgtcggatttgagaggggagctaaacgagaagcagaagatggaactggagcagaacgtggtgctggtccagcagcagagcaaggagctgagtgtgctcaaggagaagatggcccagatgagcagcctggtagaaaagaaagatcgggagctgaaggcccttgaggaggcactcagggcttcccaagagaaacacagactccagctgaacacagagaaggaacagaagccccggaagaagacccagacgtgtgacacctctgtgcagatagaacccgtccacactgaggccttctccagcagccaagagcagcaatccttcagcgatctaggggtcaggtgcaaagggtcccggcacgaggaggtcattcagcgtcagaaaaaggccttatctgaacttcgagcgcgaattaaagaactcgagaaggcgcgctcaccagatcataaagaccaccagaatgaatcatttctagatttaaagaacctcagaatggaaaacaatgtccagaaaatactactggatgcaaaaccggatttgccaactctctcaagaatagagatcctagcgcctcagaatggcctttgcaacgcaaggttcggctcagccatggagaagtcagggaagatggatgtggctgaggctttagagctcagtgaaaagctgtacctggatatgagcaaaaccctcggaagtctcatgaacatcaagaatatgtcaggccacgtgtccatgaaatacctctcccgccaggagagggagaaggtcaaccagcttcgacaaagggacctcgacctggtgtttgataagatcacccaactcaagaaccagctggggaggaaagaggagctgttgagaggatatgaaaaggacgttgaacagctcaggcggagcaaagtgtccattgagatgtaccagtcgcaggtggcaaagctggaggatgatatctacaaagaggccgaagagaaggccctgctgaaggaggccctggagcgcatggagcaccagctgtgccaggagaagaggatcaacagggccatccggcagcagaagtagatgggagcttccagcccctgcctcgcagacagatggtgaggatgaaagaatgcaggcatccctcgctatctgctgtccactctcgctgtcgtcatacctcaggagccaagtgcttttggatggtgagggtgcttgtcccgtctctgaagcacctgcccagggcctggcaccagccggcggacactgccttccccatgctgcccatgacccatgctgcccgtgacccatgcaggtggtctcctgggtgagtcctgcctcagacccggtagggtctacacactggaaagtttccccaaagcaagtcacacatgagcagcacccgggcggcttccaaagctccctgaaagctggcagaggggctttcctgtctgctttgcagttgacatattcatcatccactcctgcagtccacaaggcactggaacagtgacctctaaatagagccagactctccctttccttcactcttgcctaaggtggagcagatcccaaggctggggttaggcaagtcagggaaagaaccacagtcactgtttcttcatgaccgtctccaggccagggactgggctcacctgagctttgcagccgtgatagggcttattaatgcctctaatagccctgcctggtacgatgatccctattttacagatgaggaaactgcgcctcagagagttaagaggcgcccaagtgcacacagcggctggtaaggacagctgggacctgaccccagatccctctgaccctggttctcctgctgtctgcagggttggccgtgagtcccctccttgtaactgtcagcttttatgtgtgtgtgcattctcgtgtgtgtgtacattctcatgtgtgtgtgtgtgtgcacatgtgtaccatgtgcatgagggtttggctgtgtgtgacactatgtgtgtgtgtttgtgtgtgttgcctgcctgagctcagagagagccaaacccccagagaagggtgccccctccaccaaccaggtgagctccttgcagaggcctggccttcatcccacaaaccttgcagaccacaggctccctggcttgcagcccccaaaaatgaaggcagcgctctgctctggacgtggcctttccagcactcaccactctgaattaaacatcacaggcccccatctgcacatgtcgtggggctgcctcgggcagaggaccgtttccttttacgctgtgccatgccagggagatctgggcagcagcagagtcctgagatgtcctttgatgtacccacaggagagttcgctccttcccgaggcagtgtcccccagggcttggcaggccaggcccacagcagagacaccaaaccacagaatgggacggcagagggccctaaaaagcccattgtcatgcactggctgaaaatgaaagaaaacctgcagattt

SEQ ID NO: 302855 - DNA, 842 bp, Homo sapiens
aggcccctaaagggagttcaaccatcatgggccccaccatccctgagccattgggataccgaggtgtgaaccaccgggcatctgcagccccttccacttgctctgggaggcgctgcctcgagctaaaacagacgtgtcctccgagaagagcattgttcctcacaggccctgggttgagcagcctccacctctgctggaatctagaacagagacccccaagagactcagcaagatggggcactgtggctcccaaaagctgtgcccccttctcgttgagaaaatggatttttctcaattttcagatgctacctgtttggaatgctgtccctgggaaggcccagcgttccaaatggttagcatctaaaagtggagaaaaatccatttttctttgatgcaaaaggcaaagaggaatctaagctagattttgttcttattctttctgtattgaagagacgagtatttgtagagatggtgaagaacaggatgcagaactcaaattcccaggttggaaccagaaaagcctccctaaagatggaccaagaaagagagatgctgaggaaagagacctccagcaagtccagccagagccttttgcattctaagcccagtggaaagtactagagaaacctcgtcccaccaggcctcatgtgatcctctaccagaagctggagcagccaccttggggatcagcagacaccagcagcaggccaaaggatagtggagtggagggacaagaaggcctgggtgagccttctctgagaatcactgagctctgaaccatgaatgaactgcctacctctgtacttcctgttgtataggacaaagaaatccctatctattta

SEQ ID NO: 302856 - DNA, 3034 bp, Homo sapiens
  misc_feature (558)..(558): n is a, c, g, or t
  misc_feature (2788)..(2789): n is a, c, g, or t
  misc_feature (2791)..(2791): n is a, c, g, or t
ctcaaatatttaaagggctgtctcataaaagagaaataaaacatactcaatgagctccaggtgacagaactgagctcagagaccagaaatcacaaggagacagatctccgctgaatataaagacgagttctataataattggaaccttccagagaaggcatggactttgtgctttaaaagaatcgacagaataattagagaatagactttaccctgtccttgaaggtgggggataagggggctgggtaaatatgtattcctgaatgtctgttattttgctacttgtttttttgtctaggaattagaattaaaagagcaaaaagaggacgttttaaataataaattaagtgacgcactggccatggttgaagagactcagaaaacaaaggcaactgaaagtctaaaagcagagagcctcgccttgaaattaaatgaaacattagccgaactggaaactaccaagacaaaaatgatcatggtggaagagcggctaatcctgcagcagaagatggtaaaggccctccaggatgagcaggaatcacagagacacgggtttgnagaagagatcatggaatataaggagcaaatcaaacagcacgcccagacaattgtgagcctcgaagagaaactccagaaagtcactcagcaccataaaaaaatagaaggcgagattgcaacattgaaggacaatgacccagccccaaaggaggaaaggccgcaagaccctctggtggctcccatgacagagagcagtgccaaagacatggcgtacgaacatctgatagatgacttattggctgctcagaaggaaattctgtctcagcaggaagtcatcatgaagttaaggaaagaccttaccgaagcccacagcagaatgtcggatttgagaggggagctaaacgagaagcagaagatggaactggagcagaacgtggtgctggtccagcagcagagcaaggagctgagtgtgctcaaggagaagatggcccagatgagcagcctggtagaaaagaaagatcgggagctgaaggcccttgaggaggcactcagggcttcccaagagaaacacagactccagctgaacacagagaaggaacagaagccccggaagaagacccagacgtgtgacacctctgtgcagatagaacccgtccacactgaggccttctccagcagccaagagcagcaatccttcagcgatctaggggtcaggtgcaaagggtcccggcacgaggaggtcattcagcgtcagaaaaaggccttatctgaacttcgagcgcgaattaaagaactcgagaaggcgcgctcaccagatcataaagaccaccagaatgaatcatttctagatttaaagaacctcagaatggaaaacaatgtccagaaaatactactggatgcaaaaccggatttgccaactctctcaagaatagagatcctagcgcctcagaatggcctttgcaacgcaaggttcggctcagccatggagaagtcagggaagatggatgtggctgaggctttagagctcagtgaaaagctgtacctggatatgagcaaaaccctcggaagtctcatgaacatcaagaatatgtcaggccacgtgtccatgaaatacctctcccgccaggagagggagaaggtcaaccagcttcgacaaagggacctcgacctggtgtttgataagatcacccaactcaagaaccagctggggaggaaagaggagctgttgagaggatatgaaaaggacgttgaacagctcaggcggagcaaagtgtccattgagatgtaccagtcgcaggtggcaaagctggaggatgatatctacaaagaggccgaagagaaggccctgctgaaggaggccctggagcgcatggagcaccagctgtgccaggagaagaggatcaacagggccatccggcagcagaagtagatgggagcttccagcccctgcctcgcagacagatggtgaggatgaaagaatgcaggcatccctcgctatctgctgtccactctcgctgtcgtcatacctcaggagccaagtgcttttggatggtgagggtgcttgtcccgtctctgaagcacctgcccagggcctggcaccagccggcggacactgccttccccatgctgcccatgacccatgctgcccgtgacccatgcaggtggtctcctggatgaggaaactgcgcctcagagagttaagaggcgcccaagtgcacacagcggctgagacgagtatttgtagagatggtgaagaacaggatgcagaactcaaattcccaggttggaaccagaaaagcctccctaaagatggaccaagaaagagagatgctgaggaaagagacctccagcaagtccagccagagccttttgcattctaagcccagtggaaagtactagagaaacctcgtcccaccaggcctcatgtgatcctctgtgagttcatgtgactcttctgtgtcatctgtgtcaaaatactgagttgcttttgtaagtctttaaagattgttaccctagtgtttcatttcctagaccagtattttgaacaatattatattttggagactgatgggagaagactggcatcttctcccatcagacctggcgcagcctgttagcagtccatgtggcagaggcgaggagtgccactccagctgcaccgtagctgcactctgtcttggtgtggggttctggcaggtctgggagcttaccgcactggttggcagcagagcagaattggaaacagggcacgtctttctgggatgtaagtcctgatgtttccccattaagnnanaaggccaggcatcccaacactttgggaggccgaggcaggcggattataagatcaggagtttgagaccagcctggcaaacatggtgaataccctgtctctactaaaaatacaaaaattagccaggtgtggtggcacatgcactgtagaatcccagctacacaggaggctgaggtgggagaatcacttgaacctgggaggcagaggttgcagtgagccaagaccacgccattgcacgccagccta

SEQ ID NO: 302857 - DNA, 2385 bp, Homo sapiens
  misc_feature (558)..(558): n is a, c, g, or t
ctcaaatatttaaagggctgtctcataaaagagaaataaaacatactcaatgagctccaggtgacagaactgagctcagagaccagaaatcacaaggagacagatctccgctgaatataaagacgagttctataataattggaaccttccagagaaggcatggactttgtgctttaaaagaatcgacagaataattagagaatagactttaccctgtccttgaaggtgggggataagggggctgggtaaatatgtattcctgaatgtctgttattttgctacttgtttttttgtctaggaattagaattaaaagagcaaaaagaggacgttttaaataataaattaagtgacgcactggccatggttgaagagactcagaaaacaaaggcaactgaaagtctaaaagcagagagcctcgccttgaaattaaatgaaacattagccgaactggaaactaccaagacaaaaatgatcatggtggaagagcggctaatcctgcagcagaagatggtaaaggccctccaggatgagcaggaatcacagagacacgggtttgnagaagagatcatggaatataaggagcaaatcaaacagcacgcccagacaattgtgagcctcgaagagaaactccagaaagtcactcagcaccataaaaaaatagaaggcgagattgcaacattgaaggacaatgacccagccccaaaggaggaaaggccgcaagaccctctggtggctcccatgacagagagcagtgccaaagacatggcgtacgaacatctgatagatgacttattggctgctcagaaggaaattctgtctcagcaggaagtcatcatgaagttaaggaaagaccttaccgaagcccacagcagaatgtcggatttgagaggggagctaaacgagaagcagaagatggaactggagcagaacgtggtgctggtccagcagcagagcaaggagctgagtgtgctcaaggagaagatggcccagatgagcagcctggtagaaaagaaagatcgggagctgaaggcccttgaggaggcactcagggcttcccaagagaaacacagactccagctgaacacagagaaggaacagaagccccggaagaagacccagacgtgtgacacctctgtgcagatagaacccgtccacactgaggccttctccagcagccaagagcagcaatccttcagcgatctaggggtcaggtgcaaagggtcccggcacgaggaggtcattcagcgtcagaaaaaggccttatctgaacttcgagcgcgaattaaagaactcgagaaggcgcgctcaccagatcataaagaccaccagaatgaatcatttctagatttaaagaacctcagaatggaaaacaatgtccagaaaatactactggatgcaaaaccggatttgccaactctctcaagaatagagatcctagcgcctcagaatggcctttgcaacgcaaggttcggctcagccatggagaagtcagggaagatggatgtggctgaggctttagagctcagtgaaaagctgtacctggatatgagcaaaaccctcggaagtctcatgaacatcaagaatatgtcaggccacgtgtccatgaaatacctctcccgccaggagagggagaaggtcaaccagcttcgacaaagggacctcgacctggtgtttgataagatcacccaactcaagaaccagctggggaggaaagaggagctgttgagaggatatgaaaaggacgttgaacagctcaggcggagcaaagtgtccattgagatgtaccagtcgcaggtggcaaagctggaggatgatatctacaaagaggccgaagagaaggccctgctgaaggaggccctggagcgcatggagcaccagctgtgccaggagaagaggatcaacagggccatccggcagcagaaggaaagtgtagaggagcacgaactgagaaacgcaaaagaatcgacaccttgcaactgtgccttcaaagagaaagacaggcaggccctgccccacctgcctgcagtttgaacggatgacctaagagacaagcacgcgtccagccccgtctgtccattaagagtctgctctatgccaggtagagtgcagtggtgcaattcggtcactgaagctcaactccaggtcaggattctctgtcacagctccgagaactggactacggtggaccgaaaagctccctaaagatggccagaaggaagaatttaggaagagacccagaagccagcaaccttgtgtttcagcgggaaagtagagagcggcacgaggcagtggcctatggggcttggacctggttagatatgaacggggggccccgctggaaagcggagtgtacacacggaaagagggtgtcacaccgcatgggg

SEQ ID NO: 302858 - DNA, 1258 bp, Homo sapiens
  misc_feature (1012)..(1013): n is a, c, g, or t
  misc_feature (1015)..(1015): n is a, c, g, or t
aggcccctaaagggagttcaaccatcatgggccccaccatccctgagccattgggataccgaggtgtgaaccaccgggcatctgcagccccttccacttgctctgggaggcgctgcctcgagctaaaacagacgtgtcctccgagaagagcattgttcctcacaggccctgggttgagcagcctccacctctgctggaatctagaacagagacccccaagagactcagcaagatggggcactgtggctcccaaaagctgtgcccccttctcgttgagaaaatggatttttctcaattttcagatgctacctgtttggaatgctgtccctgggaaggcccagcgttccaaatggttagcatctaaaagtggagaaaaatccatttttctttgatgcaaaaggcaaagaggaatctaagctagattttgttcttattctttctgtattgaagagacgagtatttgtagagatggtgaagaacaggatgcagaactcaaattcccaggttggaaccagaaaagcctccctaaagatggaccaagaaagagagatgctgaggaaagagacctccagcaagtccagccagagccttttgcattctaagcccagtggaaagtactagagaaacctcgtcccaccaggcctcatgtgatcctctgtgagttcatgtgactcttctgtgtcatctgtgtcaaaatactgagttgcttttgtaagtctttaaagattgttaccctagtgtttcatttcctagaccagtattttgaacaatattatattttggagactgatgggagaagactggcatcttctcccatcagacctggcgcagcctgttagcagtccatgtggcagaggcgaggagtgccactccagctgcaccgtagctgcactctgtcttggtgtggggttctggcaggtctgggagcttaccgcactggttggcagcagagcagaattggaaacagggcacgtctttctgggatgtaagtcctgatgtttccccattaagnnanaaggccaggcatcccaacactttgggaggccgaggcaggcggattataagatcaggagtttgagaccagcctggcaaacatggtgaataccctgtctctactaaaaatacaaaaattagccaggtgtggtggcacatgcactgtagaatcccagctacacaggaggctgaggtgggagaatcacttgaacctgggaggcagaggttgcagtgagccaagaccacgccattgcacgccagccta

SEQ ID NO: 302859 - DNA, 418 bp, Homo sapiens
  misc_feature (52)..(52): n is a, c, g, or t
gttctcggtggtctcctcctgcttggagttgctcagctgggtctctttctgnaggaaaagctgcgggagcatctggcagagaaggagaagctgaacgaggagaggctagagcaagaggagaagctcaaagccaaaatcaggcaactgacggaagagaaggcggctttggaggagtacattactcaagagagaaacagagcgaaagagactttagaggaagaacggaagagaatgcaagaactggagagcctcctggcccagcagaagaaggctttggcgaaaagcattacccaggagaagaacagagtgaaggaagcattagaggaagagcagacaagagtccaagagctggaggaacgcttggcccgccagaaggaggttttggagagcagcatagcccatgaaaaaagaaaagcaa

SEQ ID NO: 302860 - DNA, 540 bp, Homo sapiens
ggttcttctttaaaaatacctatgaatgtacacgaactcaggtatatgaagaatagaagtgtgtaacccagatgtccaggcctggtagatataattatgtggtccacgttgggtcatgatgttcccaaatatcaaacctcctaagacttccaacagactcacacttgagaaaacctaagacttgtactggagcctcagggcagaattgtaaccttggagctctcagggccttgggatagtgaattcaagtctccgttatggcctggcaggatggctcatgcctgtaatctcagcactttgggaggccgaggcaggcggattataagatcaggagtttgagaccagcctggcaaacatggtgaataccctgtctctactaaaaatacaaaaattagccaggtgtggtggcacatgcactgtagaatcccagctacacaggaggctgaggtgggagaatcacttgaacctgggaggcagaggttgcagtgagccaagaccacgccattgcacgccagcctaacagagtgagactctgtcttt

SEQ ID NO: 302861 - DNA, 487 bp, Homo sapiens
cccagggtcagcaactgtaaaccaaaccccagggaaatagcaagcttcagattctgggtgacgatgacattcaaacaggcccctaaagggagttcaaccatcatgggccccaccatccctgagccattgggataccgaggtgtgaaccaccgggcatctgcagccccttccacttgctctgggaggcgctgcctcgagctaaaacagacgtgtcctccgagaagagcattgttcctcacaggccctgggttgagcagcctccacctctgctggaatctagaacagagacccccaagagactcagcaagatggggcactgtggctcccaaaagctgtgcccccttctcgttgagaaaatggatttttctcaattttcagatgctacctgtttggaatgctgtccctgggaaggcccagcgttccaaatggttagcatctaaaagtggagaaaaatccatttttctttgatgcaaaaggcaaagaggaa

SEQ ID NO: 302862 - DNA, 424 bp, Homo sapiens
cggccgcgggtaatgcctcttatgcgcgaacgttttccttgtagtacctggatatgagcaaaaccctcggaagtctcatgaacatcaagaatatgtcaggccacgtgtccatgaaatacctctcccgccaggagagggagaaggtcaaccagcttcgacaaagggacctcgacctggtgtttgataagatcacccaactcaagaaccagctggggaggaaagaggagctgttgagaggatatgaaaaggacgttgaacagctcaggtacctcggcacccccatgtccccacagaaaggcccgggcctcccttctcctggctaaactcaggctagcagcagacctctaggcctgggacaggaggacagagacccacgtgtggaatacctgcaatgtcagaaggggaccagggagggcactgacta

SEQ ID NO: 302863 - DNA, 425 bp, Homo sapiens
tacatgaaacaacttcttcctgagcctttcttttgagtctactttatttcttttacagatcataaagaccaccagaatgaatcatttctagatttaaagaacctcagaatggaaaacaatgtccagaaaatactactggatgcaaaaccggatttgccaactctctcaagaatagagatcctagcggtaaccaaagaaaattctctctgctgtgactggcatgtggagaggaggggcctgagggcagacactagcttcgttccctggcacagccatacatgtcagtggtttggggctggctgctgtctatactcactagctggggccccgaccatacccgttgtccagggtttgcacagaaaggtagccttccacttgcccacagtatggttccgcatggtgttgacattgggccacgttaatcg

SEQ ID NO: 302864 - DNA, 3048 bp, Homo sapiens
tagcgggggtcagctccgcccaccctccccggctccgcccgcctcccgggtcagcggcgcgggtgctgcgcctagctgcgcaccatggccgggttgctggcgttgctgggtccggcaggcagggtgggcgcccgggtccggcctcgcgccacctggctcctgggcgccaccgccccctgcgccccgccgcccctggccctggccctgctcccgcccaggctagacgcccggctgctccgcacggcgcgcggggactgccgcggccaccaggaccccagccaggccacggggacaacaggcagcagcgtcagctgcacagaggagaaaaagcaaagcaagtcacagcaactgaaaaagatttttcaagagtatggcactgttggcgtgtcattgcacattggaatctcattaatttccttgggcatattttacatggttgtgtcaagtggtgtggacatgcctgcaatcctgctgaaactcggatttaaagagtccctggtacagtcaaaaatggcagcaggcacaagtaccttcgtggtggcctatgcaatccacaagctgtttgcgccagtgagaatcagcattacgctagtctctgtgcccttgattgtcagatattttcgaaaagtgggattttttaaacctccagctgcaaaaccttaatgaactcttcagtcgtacacactgaaaacctatttcttctaaattacatgatttggattggttttagggttttagggttgtagggtttcttttggagaggtagggggctaattgctatgttctcatggataaactttgccagcaaaaatcaggcttttgaacaattttaattttttgcctcataaattttgtgaatgctattcattatagggcttgtatatataatctaaaatgtcagcaaggcatcggagatgggttaacatctcaaaacaaaatagcctacaaatgttccttgtgggagactttggcgagggtctgtgggtaaaagcaccagggggttaatcttggctcagtttcctaaaaagcattgattaatttaactggcttttaaatatccccttccgctgatatttgttgtcagctgcctacagtttaatatgcagcgttcacaaaacagctgccagtgctacaattaatgaagcaaaacttaatatgtaatcacaatctaaattagcatcaatactttgacattcattacattggtttgggggaagaaaagtagttctggtatgtttcattgatccccagataccttccaatctggacatgatggggctgattccagatggtttttctgaaatttcattaaggtaggtcagcgtcatttgtctctgtttaggtaaaatataaaaaccctgcccagtagcagtggcatcgcttggttcctgatgcccatgttccagaggaattcggataccacaaacagctaagacaatctcagcttttcttagacaatcttctatctcaaacttcagacattccagaattgtcatgatgtttacactgtctgagttaaaaatcctgttcaagaaaaaaaaagattttgtatcacttcttaaaaaggaatattcatagcacttgtcacaaatagaaggcaaccatgagataatacaagccagggagaggcttgtattacatgacaggtgtaattagtctgctgagccagctttacccaatgaagggcatatgtgttagagagattagctaagagtagaaattcgagcatagaggccaggtgcggtggctcacgcctgtaatcccagcactttgggaggttgaggcaggcgtgtcacttgaggccaggagttcgagaccagcctggccaacatgatgaaaccccgtctctactacaaatacaaaaattagccgggtgtggtggcacacgcctgtagtcccagctactggggaggctgaggcagcattgcttgaacccaggaggtggaggttgcagtgagccaagatcacaccactgcactccagcctgggcgacagagggagacactgtctccaaaagaaagaaatcccagcgtagatccaaactgagacactgaggcttcgtccttatagtagtcaggagcaggcgattgaagtaattctgtcctgcggggttcagcatcatgcacgttccccctgggccattctctgatgcagggcacttgctccacactctgggaacccagattcaccagtctgccctgtcacgtagttgaaggagttgcatttatctttctggctcctaattcctttaaaattacatttgttgcagaacctccacaaggctaaataaaattacatttgtgaccatcagagaactgaataaaccattaactggccatcctggttttgcagagatcaggttgttgacagttcctggttgacccacagctacccatgtcagttatctccactaacatatccaagaatctttgtaggacaatttctccacctgcaaggtctttcaggtagaactcttcttttaaggcaattagcccattgccaaaaggttttactgtcttaaagctgtctttctgagatctaattccaaggacttctccacagctaagtgagatgcctcacaccattaggtgatgctttggacagaacagagtattttcatcttgtgtttaaagcaattccttggcttcggctcctcaccactttctatgccagtctcccatttatgtccctagtaatgcctatgcaaaaaaaaaaaaagaaaaaaaagaaaaactgatggtgaaacctacaggtttaagggcttaaatctcaaactttgttaggagtaacaggagcgtgctgagcgggcaagcaataaaacaaatcataccaaaaagccacattgctctctcctaagccccaaccccactccactcctgtggccaggggtccaaacagaaaataaccggagaagacaaggaggtcaaaggatcagggaactaagcattatgtgaattcaccagcaagatgtacagaacgcctgtgtttacattgtttttatggaactagcagaataaaacatctattttaaaaatgaaaaaaaaagtt

SEQ ID NO: 302865 - DNA, 812 bp, Homo sapiens
tagcgggggtcagctccgcccaccctccccggctccgcccgcctcccgggtcagcggcgcgggtgctgcgcctagctgcgcaccatggccgggttgctggcgttgctgggtccggcaggcagggtgggcgcccgggtccggcctcgcgccacctggctcctgggcgccaccgccccctgcgccccgccgcccctggccctggccctgctcccgcccaggctagacgcccggctgctccgcacggcgcgcggggactgccgcggccaccagtccgacaggtggcacacaggtcttggggatcctctccagagtggcaccttctgcacacaccgtgccgcctcctgatgattcttcagggcccagcccagctgttccttcctccgggaagccctctctaacgacctgtgaggtctcggatgcctccactgggcctgcttccaccccatggctgtgggtcttctctgcactcatctggaatggcctcttgtcctgcctgtcagccacattgaccttgtccccagctcaggccctggcactggagcggtgtgtgtgtatacagtggcaaagagttggcctcagactccctggattcctctctctactcacttgttgttgactttgatcaaattcccttctctctatctcaggcccctcatctgtaaaatgggacgttaataattcagacttcatagaatatgaatgtaaaatgagatatgttcatacctggcatctggtgtgtcctaaattaaggttagaaatgactataattgcagtaaatatatacagtcacaaggccccagggccccgtgagc

SEQ ID NO: 302866 - DNA, 3082 bp, Homo sapiens
tagcgggggtcagctccgcccaccctccccggctccgcccgcctcccgggtcagcggcgcgggtgctgcgcctagctgcgcaccatggccgggttgctggcgttgctgggtccggcaggcagggtgggcgcccgggtccggcctcgcgccacctggctcctgggcgccaccgccccctgcgccccgccgcccctggccctggccctgctcccgcccaggctagacgcccggctgctccgcacggcgcgcggggactgccgcggccaccaggaccccagccaggccacggggacaacaggcagcagcgtcagctgcacagaggagaaaaagcaaagcaagtcacagcaactgaaaaagatttttcaagagtatggcactgttggcgtgtcattgcacattggaatctcattaatttccttgggcatattttacatggttgtgtcaagtggtgtggacatgcctgcaatcctgctgaaactcggatttaaagagtccctggtacagtcaaaaatggcagcaggcacaagtaccttcgtggtggcctatgcaatccacaagctgtttgcgccagtgagaatcagcattacgctagtctctgtgcccttgattgtcagatattttcgaaaagtgggattttttaaacctccagctgcaaaaccttaatgaactcttcagtcgtacacactgaaaacctatttcttctaaattacatgatttggattggttttagggttttagggttgtagggtttcttttggagaggtagggggctaattgctatgttctcatggataaactttgccagcaaaaatcaggcttttgaacaattttaattttttgcctcataaattttgtgaatgctattcattatagggcttgtatatataatctaaaatgtcagcaaggcatcggagatgggttaacatctcaaaacaaaatagcctacaaatgttccttgtgggagactttggcgagggtctgtgggtaaaagcaccagggggttaatcttggctcagtttcctaaaaagcattgattaatttaactggcttttaaatatccccttccgctgatatttgttgtcagctgcctacagtttaatatgcagcgttcacaaaacagctgccagtgctacaattaatgaagcaaaacttaatatgtaatcacaatctaaattagcatcaatactttgacattcattacattggtttgggggaagaaaagtagttctggtatgtttcattgatccccagataccttccaatctggacatgatggggctgattccagatggtttttctgaaatttcattaaggtaggtcagcgtcatttgtctctgtttaggtaaaatataaaaaccctgcccagtagcagtggcatcgcttggttcctgatgcccatgttccagaggaattcggataccacaaacagctaagacaatctcagcttttcttagacaatcttctatctcaaacttcagacattccagaattgtcatgatgtttacactgtctgagttaaaaatcctgttcaagaaaaaaaaagattttgtatcacttcttaaaaaggaatattcatagcacttgtcacaaatagaaggcaaccatgagataatacaagccagggagaggcttgtattacatgacaggtgtaattagtctgctgagccagctttacccaatgaagggcatatgtgttagagagattagctaagagtagaaattcgagcatagaggccaggtgcggtggctcacgcctgtaatcccagcactttgggaggttgaggcaggcgtgtcacttgaggccaggagttcgagaccagcctggccaacatgatgaaaccccgtctctactacaaatacaaaaattagccgggtgtggtggcacacgcctgtagtcccagctactggggaggctgaggcagcattgcttgaacccaggaggtggaggttgcagtgagccaagatcacaccactgcactccagcctgggcgacagagggagacactgtctccaaaagaaagaaatcccagcgtagatccaaactgagacactgaggcttcgtccttatagtagtcaggagcaggcgattgaagtaattctgtcctgcggggttcagcatcatgcacgttccccctgggccattctctgatgcagggcacttgctccacactctgggaacccagattcaccagtctgccctgtcacgtagttgaaggagttgcatttatctttctggctcctaattcctttaaaattacatttgttgcagaacctccacaaggctaaataaaattacatttgtgaccatcagagaactgaataaaccattaactggccatcctggttttgcagagatcaggttgttgacagttcctggttgacccacagctacccatgtcagttatctccactaacatatccaagaatctttgtaggacaatttctccacctgcaaggtctttcaggtagaactcttcttttaaggcaattagcccattgccaaaaggttttactgtcttaaagctgtctttctgagatctaattccaaggacttctccacagctaagtgagatgcctcacaccattaggtgatgctttggacagaacagagtattttcatcttgtgtttaaagcaattccttggcttcggctcctcaccactttctatgccagtctcccatttatgtccctagtaatgcctatgcaaaaaaaaaaaaagaaaaaaaagaaaaactgatggtgaaacctacagatttaagcccttaaacctgtaggtttcaccatcagtttaagggcttaaatctcaaactttgttaggagtaacaggagcgtgctgagcgggcaagcaataaaacaaatcataccaaaaagccacattgctctctcctaagccccaaccccactccactcctgtggccaggggtccaaacagaaaataaccggagaagacaaggaggtcaaaggatcagggaactaagcattatgtgaattcaccagcaagatgtacagaacgcctgtgtttacattgtttttatggaactagcagaataaaacatctattttaaaaatgaaaaaaaaagtt

SEQ ID NO: 302867 - DNA, 3233 bp, Homo sapiens
tagcgggggtcagctccgcccaccctccccggctccgcccgcctcccgggtcagcggcgcgggtgctgcgcctagctgcgcaccatggccgggttgctggcgttgctgggtccggcaggcagggtgggcgcccgggtccggcctcgcgccacctggctcctgggcgccaccgccccctgcgccccgccgcccctggccctggccctgctcccgcccaggctagacgcccggctgctccgcacggcgcgcggggactgccgcggccaccaggaccccagccaggccacggggacaacaggcagcagcgtcagctgcacagaggagaaaaagcaaagcaagtcacagcaactgaaaaagatttttcaagagtatggcactgttggcgtgtcattgcacattggaatctcattaatttccttgggcatattttacatggttgtgtcaagtggtgtggacatgcctgcaatcctgctgaaactcggatttaaagagtccctggtacagtcaaaaatggcagcaggcacaagtaccttcgtggtggcctatgcaatccacaagctgtttgcgccagtgagaatcagcattacgctagtctctgtgcccttgattgtcagatattttcgaaaagtgggattttttaaacctccagctgcaaaaccttaatgaactcttcagtcgtacacactgaaaacctatttcttctaaattacatgatttggattggttttagggttttagggttgtagggtttcttttggagaggtagggggctaattgctatgttctcatggataaactttgccagcaaaaatcaggcttttgaacaattttaattttttgcctcataaattttgtgaatgctattcattatagggcttgtatatataatctaaaatgtcagcaaggcatcggagatgggttaacatctcaaaacaaaatagcctacaaatgttccttgtgggagactttggcgagggtctgtgggtaaaagcaccagggggttaatcttggctcagtttcctaaaaagcattgattaatttaactggcttttaaatatccccttccgctgatatttgttgtcagctgcctacagtttaatatgcagcgttcacaaaacagctgccagtgctacaattaatgaagcaaaacttaatatgtaatcacaatctaaattagcatcaatactttgacattcattacattggtttgggggaagaaaagtagttctggtatgtttcattgatccccagataccttccaatctggacatgatggggctgattccagatggtttttctgaaatttcattaaggtaggtcagcgtcatttgtctctgtttaggtaaaatataaaaaccctgcccagtagcagtggcatcgcttggttcctgatgcccatgttccagaggaattcggataccacaaacagctaagacaatctcagcttttcttagacaatcttctatctcaaacttcagacattccagaattgtcatgatgtttacactgtctgagttaaaaatcctgttcaagaaaaaaaaagattttgtatcacttcttaaaaaggaatattcatagcacttgtcacaaatagaaggcaaccatgagataatacaagccagggagaggcttgtattacatgacaggtgtaattagtctgctgagccagctttacccaatgaagggcatatgtgttagagagattagctaagagtagaaattcgagcatagaggccaggtgcggtggctcacgcctgtaatcccagcactttgggaggttgaggcaggcgtgtcacttgaggccaggagttcgagaccagcctggccaacatgatgaaaccccgtctctactacaaatacaaaaattagccgggtgtggtggcacacgcctgtagtcccagctactggggaggctgaggcagcattgcttgaacccaggaggtggaggttgcagtgagccaagatcacaccactgcactccagcctgggcgacagagggagacactgtctccaaaagaaagaaatcccagcgtagatccaaactgagacactgaggcttcgtccttatagtagtcaggagcaggcgattgaagtaattctgtcctgcggggttcagcatcatgcacgttccccctgggccattctctgatgcagggcacttgctccacactctgggaacccagattcaccagtctgccctgtcacgtagttgaaggagttgcatttatctttctggctcctaattcctttaaaattacatttgttgcagaacctccacaaggctaaataaaattacatttgtgaccatcagagaactgaataaaccattaactggccatcctggttttgcagagatcaggttgttgacagttcctggttgacccacagctacccatgtcagttatctccactaacatatccaagaatctttgtaggacaatttctccacctgcaaggtctttcaggtagaactcttcttttaaggcaattagcccattgccaaaaggttttactgtcttaaagctgtctttctgagatctaattccaaggacttctccacagctaagtgagatgcctcacaccattaggtgatgctttggacagaacagagtattttcatcttgtgtttaaagcaattccttggcttcggctcctcaccactttctatgccagtctcccatttatgtccctagtaatgcctatgcaaaaaaaaaaaaagaaaaaaaagaaaaacaaaaaaacaaaaaaaaaaaaacaaaaaacaaaaggagggggcggcgcgcccctaaaagattctcccccggaggggcgccccaatctctcccccctcccccgctttcttttgttccccaagggggcccctcccctatatatggggcggccccctatttataatacccccagcggcaccgccgggcgccgcgctttttataccgaccgccgtcgctctcgcttggcgcaacaaccctctttctacccttggggacaccccttcgggagacgggcccccttctcccgccgggggccgcgcgcgcccttcggtgggcccccacaccccctctcctcgggcgaacttttttataacccctccggaggagcccaccttctcagccctctttgcggcgctctatgagcgcgtcttaccaccgcgtcccgttagatttcccctctcgccgcttgacacatcgttcgccactcgcgccctttcttctcgtgcggcattttcctccgga

SEQ ID NO: 302868 - DNA, 951 bp, Homo sapiens
tagcgggggtcagctccgcccaccctccccggctccgcccgcctcccgggtcagcggcgcgggtgctgcgcctagctgcgcaccatggccgggttgctggcgttgctgggtccggcaggcagggtgggcgcccgggtccggcctcgcgccacctggctcctgggcgccaccgccccctgcgccccgccgcccctggccctggccctgctcccgcccaggctagacgcccggctgctccgcacggcgcgcggggactgccgcggccaccaggaccccagccaggccacggggacaacaggcagcagcgtcagctgcacagaggagaaaaagcaaagcaagtcacagcaactgaaaaagatttttcaagagtatggcactgttggcgtgtcattgcacattggaatctcattaatttccttgggcatattttacatggttgtgtcaagtggtgtggacatgcctgcaatcctgctgaaactcggatttaaagagtccctggtacagtcaaaaatggcagcaggcacaagtaccttcgtggtggcctatgcaatccacaagctgtttgcgccagtgagaatcagcattacgctagtctctgtgcccttgattgtcagatattttcgaaaagtgggattttttaaacctccagctgcaaaaccttaatgaactcttcagtcgtacacactgaaaacctatttcttctaaattacatgatttggattggttttagggttttagggttgtagggtttcttttggagaggtagggggctaattgctatgttctcatggataaactttgccagcaaaaatcaggcttttgaacaattttaattttttgcctcataaattttgtgaattcaccagcaagatgtacagaacgcctgtgtttacattgtttttatggaactagcagaataaaacatctattttaaaaatgaaaaaaaaagtt

SEQ ID NO: 302869 - DNA, 317 bp, Homo sapiens
ccaggggtccaaacagaaaataaccagagagagcaatgtggctatgtggtatgatttgttttattgcttgcccgctcagcacgctcctgttactcctaacaaaaagccacattgctctctcctaagccccaaccccactccactcctgtggccaggggtccaaacagaaaataaccggagaagacaaggaggtcaaaggatcagggaactaagcattatgtgaattcaccagcaagatgtacagaacgcctgtgtttacattgtttttatggaactagcagaataaaacatctattttaaaaatgaaaaaaaaagtt

SEQ ID NO: 302870 - DNA, 388 bp, Homo sapiens
aaatactgtaaatcttatagccaaatcaatttcttcatttaatcccttgctgtaataattgttttctttgcttcttcccccctagtggtgtggacatgcctgcaatcctgctgaaactcggatttaaagagtccctggtacagtcaaaaatggcagcaggcacaagtaccttcgtggtggcctatgcaatccacaagctgtttgcgccagtgagaatcagcattacgctagtctctgtgcccttgattgtcagatattttcgaaaagtgggattttttaaacctccagctgcaaaaccttaatgaactcttcagtcgtacacactgaaaacctatttcttctaaattacatgatttggattggttttagggttttagggttgtagggt

SEQ ID NO: 302871 - DNA, 326 bp, Homo sapiens
cattacattggtttgggggaagaaaagtagttctggtatgtttcattgatccccagataccttccaatctggacatgatggggctgattccagatggtttttctgaaatttcattaaggtaggtcagcgtcatttgtctctgtttaggtaaaatataaaaaccctgcccagtagcagtggcatcgcttggttcctgatgcccatgttccagaggaattcggataccacaaacagctaagacaatctcagcttttcttagacaatcttctatctcaaacttcagacattccagaattgtcatgatgtttacactgtctgagttaaaa

SEQ ID NO: 302872 - DNA, 1210 bp, Homo sapiens
agtagttgttgaaaaaaggtaggcggtgcctgaggcatccaatgacaagcggctccttgagaaagggggggggggtactccttgaaagcattgtccaatgaaaattaccaacggcagacacggagacagcgccggggcggagggtacgatggagaatttcacggcactgtttggggctcaggctgacccaccaccgcccccaaccgcactcggcttcggaccaggaaagcctccacccccgccaccgcctcctgcgggcgggggacccggcacggccccgcctcccaccgcggccacggctcctcctggcgcggacaagtcaggagctggctgtggccctttttacctcatgagggaactgccaggtagcacagagctgacaggcagcacgaatctgatcacacactacaacttggaacaagcctataataaattctgtgggaagaaggtgaaggagaagctaagtaacttcctgcctgacctgccagggatgattgatctgcctggttcccatgataacagcagcctccgctctctcattgagaagccccctattctcagtagctctttcaatcctatcacagggaccatgctggccggcttccgcctccacactggcccgttgccggagcagtgtcgtctgatgcatattcagcctcccaagaagaagaataagcacaagcacaaacagagccgtacccaggatcctgtccccccagaaacaccatctgattcagatcacaagaagaagaaaaagaaaaaagaagaggatcctgaacggaaaaggaagaagaaagagaagaagaaaaagaagaatcgacatagtccagaccacccaggtatgggcagctcccaggccagcagcagcagcagcctacgctaataggaccactggactctttgccaggatggcttttcctgctgtactgaacctgctgataaaagctgccttccaggctcttggacactgccttgggagcatcctgcagctgggacagaggccagctcctgttgggctcagttgagactaagtaaattaggagagagagggacatgcttttgtaggctcatcccagttggttttctcatggacatctcttcctctcccaggaagcttacaattttcttctctctcttttgtgcaatttgtctgatttaggacttgttctgtgttttctttaaaaaaaaaaattacatttatcaaactgga

SEQ ID NO: 302873 - DNA, 441 bp, Homo sapiens
aaggctagttcctagttgttcttaccctgcttctttctcccccagaatcgacatagtccagaccacccaggtatgggcagctcccaggccagcagcagcagcagcctacgctaataggaccactggactctttgccaggatggcttttcctgctgtactgaacctgctgataaaagctgccttccaggctcttggacactgccttgggagcatcctgcagctgggacagaggccagctcctgttgggctcagttgagactaagtaaattaggagagagagggacatgcttttgtaggctcatcccagttggttttctcatggacatctcttcctctcccaggaagcttacaattttcttctctctcttttgtgcaatttgtctgatttaggacttgttctgtgttttctttaaaaaaaaaaattacatttatcaaactgga

SEQ ID NO: 302874 - DNA, 1036 bp, Homo sapiens
agtagttgttgaaaaaaggtaggcggtgcctgaggcatccaatgacaagcggctccttgagaaagggggggggggtactccttgaaagcattgtccaatgaaaattaccaacggcagacacggagacagcgccggggcggagggtacgatggagaatttcacggcactgtttggggctcaggctgacccaccaccgcccccaaccgcactcggcttcggaccaggaaagcctccacccccgccaccgcctcctgcgggcgggggacccggcacggccccgcctcccaccgcggccacggctcctcctggcgcggacaagtcaggagctggctgtggccctttttacctcatgagggaactgccaggtagcacagagctgacaggcagcacgaatctgatcacacactacaacttggaacaagcctataataaattctgtgggaagaagttgccggagcagtgtcgtctgatgcatattcagcctcccaagaagaagaataagcacaagcacaaacagagccgtacccaggatcctgtccccccagaaacaccatctgattcagatcacaagaagaagaaaaagaaaaaagaagaggatcctgaacggaaaaggaagaagaaagagaagaagaaaaagaagaatcgacatagtccagaccacccaggtatgggcagctcccaggccagcagcagcagcagcctacgctaataggaccactggactctttgccaggatggcttttcctgctgtactgaacctgctgataaaagctgccttccaggctcttggacactgccttgggagcatcctgcagctgggacagaggccagctcctgttgggctcagttgagactaagtaaattaggagagagagggacatgcttttgtaggctcatcccagttggttttctcatggacatctcttcctctcccaggaagcttacaattttcttctctctcttttgtgcaatttgtctgatttaggacttgttctgtgttttctttaaaaaaaaaaattacatttatcaaactgga

SEQ ID NO: 302875 - DNA, 746 bp, Homo sapiens
agtagttgttgaaaaaaggtaggcggtgcctgaggcatccaatgacaagcggctccttgagaaagggggggggggtactccttgaaagcattgtccaatgaaaattaccaacggcagacacggagacagcgccggggcggagggtacgatggagaatttcacggcactgtttggggctcaggctgacccaccaccgcccccaaccgcactcggcttcggaccaggaaagcctccacccccgccaccgcctcctgcgggcgggggacccggcacggccccgcctcccaccgcggccacggctcctcctggcgcggacaagtcaggagctggctgtggccctttttacctcatgagggaactgccaggtagcacagagctgacaggcagcacgaatctgatcacacactacaacttggaacaagcctataataaattctgtgggaagaaggtgaaggagaagctaagtaacttcctgcctgacctgccagggatgattgatctgcctggttcccatgataacagcagcctccgctctctcattgagaagccccctattctcagtagctctttcaatcctatcacagggaccatgctggccggcttccgcctccacactggcccgttgccggagcagtgtcgtctgatgcatattcagcctcccaagaagaagaataagcacaagcacaaacagagccgtacccaggatcctgtccccccaggtaagaagcagttctattcaaagcaaa

SEQ ID NO: 302876 - DNA, 1449 bp, Homo sapiens
agtagttgttgaaaaaaggtaggcggtgcctgaggcatccaatgacaagcggctccttgagaaagggggggggggtactccttgaaagcattgtccaatgaaaattaccaacggcagacacggagacagcgccggggcggagggtacgatggagaatttcacggcactgtttggggctcaggctgacccaccaccgcccccaaccgcactcggcttcggaccaggaaagcctccacccccgccaccgcctcctgcgggcgggggacccggcacggccccgcctcccaccgcggccacggctcctcctggcgcggacaagtcaggagctggctgtggccctttttacctcatgagggaactgccaggtagcacagagctgacaggcagcacgaatctgatcacacactacaacttggaacaagcctataataaattctgtgggaagaaggtgaaggagaagctaagtaacttcctgcctgacctgccagggatgattgatctgcctggttcccatgataacagcagcctccgctctctcattgagaagccccctattctcagtagctctttcaatcctatcacagggaccatgctggccggcttccgcctccacactggcccgttgccggagcagtgtcgtctgatgcatattcagcctcccaagaagaagaataagcacaagcacaaacagagccgtacccaggatcctgtccccccaggtaaacccagttaagttccgtatggagctctggactcctaaattcccctgaagaagaaaccaatgtactgtggtctcttgggacttgggacagggactctagcagcacctctgtatcctttctggccatttggacaaaagcagttgccccgacttgggattttcctgtagtcttcagtggttcataacagtagaggattttgagctttacaggtgataggtacctaatgtctcctacagaaacaccatctgattcagatcacaagaagaagaaaaagaaaaaagaagaggatcctgaacggaaaaggaagaagaaagagaagaagaaaaagaagaatcgacatagtccagaccacccaggtatgggcagctcccaggccagcagcagcagcagcctacgctaataggaccactggactctttgccaggatggcttttcctgctgtactgaacctgctgataaaagctgccttccaggctcttggacactgccttgggagcatcctgcagctgggacagaggccagctcctgttgggctcagttgagactaagtaaattaggagagagagggacatgcttttgtaggctcatcccagttggttttctcatggacatctcttcctctcccaggaagcttacaattttcttctctctcttttgtgcaatttgtctgatttaggacttgttctgtgttttctttaaaaaaaaaaattacatttatcaaactgga

SEQ ID NO: 302877 - DNA, 380 bp, Homo sapiens
aatcaaaggaaaaatcttgagccttcaattgatgaaaaaacctccttagttgaaaaatgcaaaactctggcagactccttctgaggatgatgaagaaaagacaaaactctctgaaataattaaaactccgcaggagggatattattatatatggggttactagaaggggagtcaggattagggttgggattaggggagttattagacagggagtcagggcctcctgccatgggaacttcttgtcagtgatttcttcccttggccctgagataggcagcttggtggagaaggcttatacttcttagctgggtgaccttggataattcacttaatctcgctgggtctagatttcataatctgtaaatgaggataataggaag

SEQ ID NO: 302878 - DNA, 462 bp, Homo sapiens
cacaatggtttaacatttaccaagtacatttttgtttaccacacactgggctgtgtacgttacctgcagttacttcttttaaagctcccaaaccctgtaatgtaggttttattatcccgattttacagaggaagaaacaggtttaaggagattaggtaacttgcccagggtcatacaactagttagctctgaagcaggatctgaacctacctctcttacctttggagcccatcttgaactccaggtctgcttcttatccatctggttttccagggtttgcatttgagagcgtatcccccttcactggctgatgtagccctggttaagaaacatttctccatcccctgctgtggccctcaaaaggcagttgcagaccagtgatggatgaggtgaatccctggttggttttccagcaggctcaagaattgccagccagtgtgtgaaatcactcagtgaactgga

SEQ ID NO: 302879 - DNA, 747 bp, Homo sapiens
attcactcactggtgataacattcatgaatacgacatttttaatttgtatctcacctcatagaaagaattgtgcagcttttacatctgccagactagagttgaatattccagtctttacatgatttttttctccatctgtctgtctctttcctgtctctaattttgttggtgcatcaggactactgaacaagtgaaatttctctgttttctgttgtaagtactcctgctgtttctttagtccctgggaccgttggcagtttcctctctcccctcccccagccatctctccatagcatgtttgcttctaattctgagtttgatcttctgatgatttttttgcatttcatcagtcacttcatgagtcagcttagccttgcagttgtccatacctaagggagtggggcttggcctttacaccttaggtgctagagcttgcactccctggcttggcaggtgtcacgtggcgctttgacaataccaaaagctggcttggccccaagatcatcacagcagtggtttgagggactgttctgctatttaatattggaaatcattggcttttttggtagcataaagctactggcttggaacagttaataaattttactgagtcagctcaacttgagtttggtggcagagggtagcactcagtaagaagattagggaaagaagatcatgaactagtgattatgcacattccggtaacttatgtgcttgtctttgtattttttctcacaaaagaaaaa

SEQ ID NO: 302880 - DNA, 8128 bp, Homo sapiens
  misc_feature (227)..(227): n is a, c, g, or t
atcaccatcgccgtgaagtcacagtggcaagatgaaaatgtttaaaaaaattttaaaaaggaataaggaaagaggaagaggacagcgtgccccggctcagaaaacggtcctcctctgccccggacgccggcggacctgtggggtatgaccgaatctccccgcgcagccggcaagccccggccctcagtcgggccgcgaccagcgtgacgccgcggtagggggatccnggcgggcgcgcggccgtcttcaaagccccggcgccgccgccgcccccgcgcgcgcgcgcgagtagtacggtccgagggggcggcttctggggcgcggctccggcggcagctgatgcgcgccccgccggccgggaggcgggagtccgcgagccgggagcgggagcagcagaggtctagcagccgggcgccgcgggccgggggcctgaggaggccacaggacgggcgtcttcccggctagtggagcccggcgcggggcccgctgcggccgcaccgtgaggggaggaggccgaggaggacgcagcgccggctgccggcgggaggaagcgctccaccagggcccccgacggcactcgtttaaccacatccgcgcctctgctggaaacgcttgctggcgcctgtcaccggttccctccattttgaaagggaaaaaggctctccccacccattcccctgcccctaggagctggagccggaggagccgcgctcatggcgttcagcccgtggcagatcctgtcccccgtgcagtgggcgaaatggacgtggtctgcggtacgcggcggggccgccggcgaggacgaggctggcgggcccgagggcgaccccgaggaggaggattcgcaagccgagaccaaatccttgagtttcagctcggattctgaaggtaattttgagactcctgaagctgaaaccccgatccgatcacctttcaaggagtcctgtgatccatcactcggattggcaggacctggggccaaaagccaagaatcacaagaagctgatgaacagcttgtagcagaagtggttgaaaaatgttcatctaagacttgttctaaaccttcagaaaatgaagtgccacagcaggccattgactctcactcagtcaagaatttcagagaagaacctgaacatgattttagcaaaatttccatcgtgaggccattttcaatagaaacgaaggattccacggatatctcggcagtcctcggaacaaaagcagctcatggctgtgtaactgcagtctcaggcaaggctctgccttccagcccgccagacgccctccaggacgaggcgatgacagaaggcagcatgggggtcaccctcgaggcctccgcagaagctgatctaaaagctggcaactcctgtccagagcttgtgcccagcagaagaagcaagctgagaaagcccaagcctgtccccctgaggaagaaagcaattggaggagagttctcagacaccaacgctgctgtggagggcacacctctccccaaggcatcctatcacttcagtcctgaagagttggatgagaacacaagtcctttgctaggagatgccaggttccagaagtctccccctgacattaaagaaactcccggcactctcagtagtgacaccaacgactcaggggttgagctgggggaggagtcgaggagctcacctctcaagcttgagtttgatttcacagaagatacaggaaacatagaggccaggaaagcccttccaaggaagcttggcaggaaactgggtagcacactgactcccaagatacaaaaagatggcatcagtaagtcagcaggtttagaacagcctacagacccagtggcacgagacgggcctctctcccaaacatcttccaagccagatcctagtcagtgggagagccccagcttcaacccctttgggagccactctgttctgcagaactccccacccctctcttctgagggctcctaccactttgacccagataactttgacgaatccatggatccctttaaaccaactacgaccttaacaagcagtgacttttgttctcccactggtaatcacgttaatgaaatcttagaatcacccaagaaggcaaagtcgcgtttaataacgagtggctgtaaggtgaagaagcatgaaactcagtctctcgccctggatgcatgttctcgggatgaaggggcagtgatctcccagatttcagacatttctaatagggatggccatgctactgatgaggagaaactggcatccacgtcatgtggtcagaaatcagctggtgccgaggtgaaaggtgagccagaggaagacctggagtactttgaatgttccaatgttcctgtgtctaccataaatcatgcgttttcatcctcagaagcaggcatagagaaggagacgtgccagaagatggaagaagacgggtccactgtgcttgggctgctggagtcctctgcagagaaggcccctgtgtcggtgtcctgtggaggtgagagccccctggatgggatctgcctcagcgaatcagacaagacagccgtgctcaccttaataagagaagagataattactaaagagattgaagcaaatgaatggaagaagaaatacgaagagacccggcaagaagttttggagatgaggaaaattgtagctgaatatgaaaagactattgctcaaatgattgaagatgaacaaaggacaagtatgacctctcagaagagcttccagcaactgaccatggagaaggaacaggccctggctgaccttaactctgtggaaaggtccctttctgatctcttcaggagatatgagaacctgaaaggtgttctggaagggttcaagaagaatgaagaagccttgaagaaatgtgctcaggattacttagccagagttaaacaagaggagcagcgataccaggccctgaaaatccacgcagaagagaaactggacaaagccaatgaagagattgctcaggttcgaacaaaagcaaaggctgagagtgcagctctccatgctggactccgcaaagagcagatgaaggtggagtccctggaaagggccctgcagcagaagaaccaagaaattgaagaactgacaaaaatctgtgatgagctgattgcaaagctgggaaagactgactgagacactccccctgttagctcaacagatctgcatttggctgcttctcttgtgaccacaattatcttgccttatccaggaataattgcccctttgcagagaaaaaaaaaaacttaaaaaaagcacatgcctactgctgcctgtcccgctttgctgccaatgcaacagccctggaagaaaccctagagggttgcatagtctagaaaggagtgtgacctgacagtgctggagcctcctagtttccccctatgaaggttcccttaggctgctgagtttgggtttgtgatttatctttagtttgttttaaagtcatctttactttcccaaatgtgttaaatttgtaactcctctttggggtcttctccaccacctgtctgatttttttgtgatctgtttaatcttttaattttttagtatcagtggttttatttaaggagacagtttggcctattgttacttccaatttataatcaagaaggggctctggatccccttttaaattacacacactctcacacacatacatgtatgtttatagatgctgctgctcttttccctgaagcatagtcaagtaagaactgctctacagaaggacatatttccttggatgtgagaccctattttgaaatagagtcctgactcagaacaccaacttaagaatttgggggattaaagatgtgaagaccacagtcttgggttttcatatctggagaagactatttgccatgacgttttgttgccctggtatttggacactcctcagctttaatgggtgtggcccctttagggttagtcctcagactaatgatagtgtctgctttctgcatgaacggcaatatgggactccctccaagctagggtttggcaagtctgccctagagtcatttactctcctctgcctccatttgttaatacagaatcaacatttagtcttcattatctttttttttttttttgagacagagtttcgatctattttaagtatgtgaagaaaatctacttgtaaaaggctcagatcttaattaaaaggtaattgtagcacattaccaattataaggtgaagaaatgtttttttcccaagtgtgatgcattgttcttcagatgttgaaaagaaagcaaaaaataccttctaacttaagacagaatttttaacaaaatgagcagtaaaagtcacatgaaccactccaaaaatcagtgcattttgcatatttttaaacaaagacagcttgttgaatactgagaagaggagtgcaaggagaaggtctgtactaacaaagccaaattcctcaagctcttactggactcagttcagagtggtgggccattaaccccaacatggaatttttccatataaatctcaatgaattccctttcatttgaataggcaaacccaaatccatgcaagtgttttaaagcactgtcctgtcttaatcttacatgctgaaagtcttcatggtgatatgcactatattcagtatacgtatgttttcctacttctcttgtaaaactgttgcatgatccaacttcagcaatgaattgtgcctagtggagaacctctatagatcttaaaaaatgaattattctttagcagtgtattactcacatgggtgcaatctttagccccagggaggtcaataatgtcttttaaagccagaagtcacattttaccaatatgcatttatcataattggtgcttaggctgtatattcaagcctgttgtcttaacattttgtataaaaaagaacaacagaaattatctgtcatttgagaagtggcttgacaatcatttgagctttgaaagcagtcactgtggtgtaatatgaatgctgtcctagtggtcatagtaccaagggcacgtgtctccccttggtataactgatttcctttttagtcctctactgctaaataagttaattttgcattttgcagaaagaaacattgattgctaaatctttttgctgctgtgttttggtgttttcatgtttacttgttttatattgatctgttttaagtatgagaggcttatagtgccctccattgtaaatccatagtcatctttttaagcttattgtgtttaagaaagtagctatgtgttaaacagaggtgatggcagcccttccctagcacactggtggaagagaccccttaagaacctgaccccagtgaatgaagctgatgcacagggagcaccaaaggaccttcgttaagtgataattgtcctggcctctcagccatgaccgttatgaggaaatatcccccattcgaacttaacagatgcctcctctccaaagagaattaaaatcgtagcttgtacagatcaagagaatatactgggcagaatgaagtatgtttgtttatttttctttaaaaataaaggattttggaactctggagagtaagaatatagtatagagtttgcctcaacacatgtgagggccaaataacctgctagctaggcagtaataaactctgttacagaagagaaaaagggccgggcacagtggcttattcctgtaatcccaacactgtggaaggccgaggcaggaggatcacttgagtccaggagtttgaaacctacctaggcaacatggtgaaaccttgtctctaccaaaataaaaattagctgggcatggtggcacgtgcctgtggtcccagctacttgggaggctgaggtgggagcctgggaggtcaaggctgcagtgagccatgatcatgccactgcactccatcctgggtgacagcaagatcttgtctcaaaaaaaaaaaaaaaaaccaggagtgaaaaaggaaagtagaaggcagctgctggcctagatgttggtttgggaatattaggtgatcctgttgagattctggatccagagcaatttctttagcttttgactttgccaaagtgtagatagcctttatccagcagtattttaagtggggaatgcaacgtgaggccaactgaacaattccccccgtggctgcccagatagtcacagtcaaggttggagagtctccttccagccagtgacctacccaaaccttttgttctgtaaaactgctctggaaataccgggaagcccagttttctcacgtggtttctagcttcttcagactcagcccaaattaggaagtgcagaagcacatgatggtgaaaaacctaggatttggcagccttccagaatggtatggaatctgagggaagatttatgtttcgttttggaggatagctcaagttgaattttctttccagccagttaccctttcaacctacccatactttgtacaactcttacacaaatacttagatatttattagatagccctgaattcactctaattataaacagggagtgtaaactgcccccagatgttcctgggctgggtaaaagcagctggagtgaagcactcattttccataaaggtaacaaagggcagctcagtggttactcaagctcaaaagggtttttttaagagcaagcattggttaagtctgtgtatactgagttggaagtgatttcagcacattcttttttagtggagtgaaagttctgaagcccccttttaacttcctcttggtttttcattataattggtagccatctcatgaactgtctctgactgttgtctctttgtggtcatgtgattgtgagcttgctttctgacttgcatttctgactttatcctgttgttaggaagatagaaactaggttttgaaagattacatgattcaagcgagggattttaaagtaaagatgtatttattctgaagaatctaaaagataacagattatttgcttatgaaagaacaatatagtctgggaatcccagaatgtcaagccaaaggtctaagaagtcatctccttcaaatactttaataaagaagtatttcgaggagatatctgtccaaaaaggtttgactggcctccagattccagttatttttaaaaagcaacttaccactaaatccttgagtctccatagagtaacagtaaagaaactgatgtaacagactctcctctcaaaggatctcctctggaagagactatcagcggcagcattctccagggaagacccatcccctagtgccagagcttgcatcctggagactaaagattgcacttttttgtagttttttgtccaaatgcaatcccatttctgtgcctcttagcatgcagttagatttggacaaacaagattcctaaggaatgactttattaactataatatggttacagctattatataaatatatattctggttatagttctaatatggagatgttgtgtgcaatgctggcctgtggtggtctgtgtaatgctttaacttgtatggaggaggccaggctcagagctgagatgtggcctgaaccttccctgtatcgatcctttaatttagaactgtcaagatgtcactttctccccctctgccttttagtggtatctgacatatactcaaaacagtaatttcctggtcacatcattaactgctaattctgtatttataaagaattttcagatggacatgtacaaatttgaactcaaaccatccccagtccagatacagggcagcgtgtaggtgaccacaccagagcctcagcctcggtccttctcagccgtcgggataggatccaggcatttcttttaaatctcagaggtagcagtaaacttttcagtattgctgttagcaagtgtgtgtttgccaatagatacccattatactaatgtgccaagtaaatgttcattgcacatctgcttccactgtgttcccacgggtgccatgaagtgtgtgaggagcccctcatctggagggatgagtgctgcgttgactactgctatcaggattgtgttgtgtggaatattcatctacataaattttatatgcacagtaatttccctttttatatgtcaagtaactatttgtaaaagttatactcacaaattattataatgattactaatatattttttccatgtttcattgcctgaataaaaactgtttaccactgtta

SEQ ID NO: 302881 - DNA, 1143 bp, Homo sapiens
  misc_feature (227)..(227): n is a, c, g, or t
atcaccatcgccgtgaagtcacagtggcaagatgaaaatgtttaaaaaaattttaaaaaggaataaggaaagaggaagaggacagcgtgccccggctcagaaaacggtcctcctctgccccggacgccggcggacctgtggggtatgaccgaatctccccgcgcagccggcaagccccggccctcagtcgggccgcgaccagcgtgacgccgcggtagggggatccnggcgggcgcgcggccgtcttcaaagccccggcgccgccgccgcccccgcgcgcgcgcgcgagtagtacggtccgagggggcggcttctggggcgcggctccggcggcagctgatgcgcgccccgccggccgggaggcgggagtccgcgagccgggagcgggagcagcagaggtctagcagccgggcgccgcgggccgggggcctgaggaggccacaggacgggcgtcttcccggctagtggagcccggcgcggggcccgctgcggccgcaccgtgaggggaggaggccgaggaggacgcagcgccggctgccggcgggaggaagcgctccaccagggcccccgacggcactcgtttaaccacatccgcgcctctgctggaaacgcttgctggcgcctgtcaccggttccctccattttgaaagggaaaaaggctctccccacccattcccctgcccctaggagctggagccggaggagccgcgctcatggcgttcagcccgtggcagatcctgtcccccgtgcagtgggcgaaatggacgtggtctgcggtacgcggcggggccgccggcgaggacgaggctggcgggcccgagggcgaccccgaggaggaggattcgcaagccgagaccaaatccttgagtttcaggcaagtacacggcgtccccgctgagatgcagacgcgcttgcctccatccatctgcgactccctctgtgtgcgtgtgtgtggtcgccacccgcgaaaccgtcctcacggccgtgccgcgtccctgcccggagccgggtccccgtgtgcgtccgaaagttcaggatcttctgtcctcccgtggggtttctggcccccgtttcgctaggagagttccgcacccaacccagaatctgcagtctctccgcatccccgctggcctcggtcacttt

SEQ ID NO: 302882 - DNA, 435 bp, Homo sapiens
cctggttgtgtgctatttcagttcccagtcttaaatgcaaattgtaatagattgggtaaaactaagctttattgtactctagataattactaaagagattgaagcaaatgaatggaagaagaaatacgaagagacccggcaagaagttttggagatgaggttagactggaggttttggggaggggctggatacttttatgcactgttagatttgatacagatgaagtgatgacagtgtttgcttgccacagaaccaagtgttgagagcttgagggctttgctgtttgcaccttgctttgtgattgagaatgttatttcaggagttattgctaaccagttattatattcaaatactgtagtttatcttgggttgttcagaacatataacatgtaaacagaacccacataattcttatcttcttagaactgacagaa

SEQ ID NO: 302883 - DNA, 503 bp, Homo sapiens
  misc_feature (178)..(178): n is a, c, g, or t
cggggggcaatggcactccagctctgggccctgacctgcttgggcttgctgggcgcaggtgccagcctgaggccccgcaagctggacttcttccgcagcgagaaagagctgaaccacctggctgtgaatgaggcctcaggcgtggtgtacctgggggcggtgaatgccctctaccagntggatgcgaagctgcagctggagcagcaggtggccacgggcccggccctggacaacaagaagtgcacgccgcccatcgaggccagccagtgccatgaagtgtgtgaggagcccctcatctggagggatgagtgctgcgttgactactgctatcaggattgtgttgtgtggaatattcatctacataaattttatatgcacagtaatttccctttttatatgtcaagtaactatttgtaaaagttatactcacaaattattataatgattactaatatattttttccatgtttcattgcctgaataaaaactgtttaccactgtta

SEQ ID NO: 302884 - DNA, 184 bp, Homo sapiens
ccggctcacaacatgcacagccgcgctcacaacatgcacagccggctcacaacatgcacagtaatttccctttttatatgtcaagtaactatttgtaaaagttatactcacaaattattataatgattactaatatattttttccatgtttcattgcctgaataaaaactgtttaccactgtta

SEQ ID NO: 302885 - DNA, 8164 bp, Homo sapiens
  misc_feature (227)..(227): n is a, c, g, or t
atcaccatcgccgtgaagtcacagtggcaagatgaaaatgtttaaaaaaattttaaaaaggaataaggaaagaggaagaggacagcgtgccccggctcagaaaacggtcctcctctgccccggacgccggcggacctgtggggtatgaccgaatctccccgcgcagccggcaagccccggccctcagtcgggccgcgaccagcgtgacgccgcggtagggggatccnggcgggcgcgcggccgtcttcaaagccccggcgccgccgccgcccccgcgcgcgcgcgcgagtagtacggtccgagggggcggcttctggggcgcggctccggcggcagctgatgcgcgccccgccggccgggaggcgggagtccgcgagccgggagcgggagcagcagaggtctagcagccgggcgccgcgggccgggggcctgaggaggccacaggacgggcgtcttcccggctagtggagcccggcgcggggcccgctgcggccgcaccgtgaggggaggaggccgaggaggacgcagcgccggctgccggcgggaggaagcgctccaccagggcccccgacggcactcgtttaaccacatccgcgcctctgctggaaacgcttgctggcgcctgtcaccggttccctccattttgaaagggaaaaaggctctccccacccattcccctgcccctaggagctggagccggaggagccgcgctcatggcgttcagcccgtggcagatcctgtcccccgtgcagtgggcgaaatggacgtggtctgcggtacgcggcggggccgccggcgaggacgaggctggcgggcccgagggcgaccccgaggaggaggattcgcaagccgagaccaaatccttgagtttcagctcggattctgaaggtaattttgagactcctgaagctgaaaccccgatccgatcacctttcaaggagtcctgtgatccatcactcggattggcaggacctggggccaaaagccaagaatcacaagaagctgatgaacagcttgtagcagaagtggttgaaaaatgttcatctaagacttgttctaaaccttcagaaaatgaagtgccacagcaggccattgactctcactcagtcaagaatttcagagaagaacctgaacatgattttagcaaaatttccatcgtgaggccattttcaatagaaacgaaggattccacggatatctcggcagtcctcggaacaaaagcagctcatggctgtgtaactgcagtctcaggcaaggctctgccttccagcccgccagacgccctccaggacgaggcgatgacagaaggcagcatgggggtcaccctcgaggcctccgcagaagctgatctaaaagctggcaactcctgtccagagcttgtgcccagcagaagaagcaagctgagaaagcccaagcctgtccccctgaggaagaaagcaattggaggagagttctcagacaccaacgctgctgtggagggcacacctctccccaaggcatcctatcacttcagtcctgaagagttggatgagaacacaagtcctttgctaggagatgccaggttccagaagtctccccctgacattaaagaaactcccggcactctcagtagtgacaccaacgactcaggggttgagctgggggaggagtcgaggagctcacctctcaagcttgagtttgatttcacagaagatacaggaaacatagaggccaggaaagcccttccaaggaagcttggcaggaaactgggtagcacactgactcccaagatacaaaaagatggcatcagtaagtcagcaggtttagaacagcctacagacccagtggcacgagacgggcctctctcccaaacatcttccaagccagatcctagtcagtgggagagccccagcttcaacccctttgggagccactctgttctgcagaactccccacccctctcttctgagggctcctaccactttgacccagataactttgacgaatccatggatccctttaaaccaactacgaccttaacaagcagtgacttttgttctcccactggtaatcacgttaatgaaatcttagaatcacccaagaaggcaaagtcgcgtttaataacgactactgaacaagtgaaatttctctgttttctgttgagtggctgtaaggtgaagaagcatgaaactcagtctctcgccctggatgcatgttctcgggatgaaggggcagtgatctcccagatttcagacatttctaatagggatggccatgctactgatgaggagaaactggcatccacgtcatgtggtcagaaatcagctggtgccgaggtgaaaggtgagccagaggaagacctggagtactttgaatgttccaatgttcctgtgtctaccataaatcatgcgttttcatcctcagaagcaggcatagagaaggagacgtgccagaagatggaagaagacgggtccactgtgcttgggctgctggagtcctctgcagagaaggcccctgtgtcggtgtcctgtggaggtgagagccccctggatgggatctgcctcagcgaatcagacaagacagccgtgctcaccttaataagagaagagataattactaaagagattgaagcaaatgaatggaagaagaaatacgaagagacccggcaagaagttttggagatgaggaaaattgtagctgaatatgaaaagactattgctcaaatgattgaagatgaacaaaggacaagtatgacctctcagaagagcttccagcaactgaccatggagaaggaacaggccctggctgaccttaactctgtggaaaggtccctttctgatctcttcaggagatatgagaacctgaaaggtgttctggaagggttcaagaagaatgaagaagccttgaagaaatgtgctcaggattacttagccagagttaaacaagaggagcagcgataccaggccctgaaaatccacgcagaagagaaactggacaaagccaatgaagagattgctcaggttcgaacaaaagcaaaggctgagagtgcagctctccatgctggactccgcaaagagcagatgaaggtggagtccctggaaagggccctgcagcagaagaaccaagaaattgaagaactgacaaaaatctgtgatgagctgattgcaaagctgggaaagactgactgagacactccccctgttagctcaacagatctgcatttggctgcttctcttgtgaccacaattatcttgccttatccaggaataattgcccctttgcagagaaaaaaaaaaacttaaaaaaagcacatgcctactgctgcctgtcccgctttgctgccaatgcaacagccctggaagaaaccctagagggttgcatagtctagaaaggagtgtgacctgacagtgctggagcctcctagtttccccctatgaaggttcccttaggctgctgagtttgggtttgtgatttatctttagtttgttttaaagtcatctttactttcccaaatgtgttaaatttgtaactcctctttggggtcttctccaccacctgtctgatttttttgtgatctgtttaatcttttaattttttagtatcagtggttttatttaaggagacagtttggcctattgttacttccaatttataatcaagaaggggctctggatccccttttaaattacacacactctcacacacatacatgtatgtttatagatgctgctgctcttttccctgaagcatagtcaagtaagaactgctctacagaaggacatatttccttggatgtgagaccctattttgaaatagagtcctgactcagaacaccaacttaagaatttgggggattaaagatgtgaagaccacagtcttgggttttcatatctggagaagactatttgccatgacgttttgttgccctggtatttggacactcctcagctttaatgggtgtggcccctttagggttagtcctcagactaatgatagtgtctgctttctgcatgaacggcaatatgggactccctccaagctagggtttggcaagtctgccctagagtcatttactctcctctgcctccatttgttaatacagaatcaacatttagtcttcattatctttttttttttttttgagacagagtttcgatctattttaagtatgtgaagaaaatctacttgtaaaaggctcagatcttaattaaaaggtaattgtagcacattaccaattataaggtgaagaaatgtttttttcccaagtgtgatgcattgttcttcagatgttgaaaagaaagcaaaaaataccttctaacttaagacagaatttttaacaaaatgagcagtaaaagtcacatgaaccactccaaaaatcagtgcattttgcatatttttaaacaaagacagcttgttgaatactgagaagaggagtgcaaggagaaggtctgtactaacaaagccaaattcctcaagctcttactggactcagttcagagtggtgggccattaaccccaacatggaatttttccatataaatctcaatgaattccctttcatttgaataggcaaacccaaatccatgcaagtgttttaaagcactgtcctgtcttaatcttacatgctgaaagtcttcatggtgatatgcactatattcagtatacgtatgttttcctacttctcttgtaaaactgttgcatgatccaacttcagcaatgaattgtgcctagtggagaacctctatagatcttaaaaaatgaattattctttagcagtgtattactcacatgggtgcaatctttagccccagggaggtcaataatgtcttttaaagccagaagtcacattttaccaatatgcatttatcataattggtgcttaggctgtatattcaagcctgttgtcttaacattttgtataaaaaagaacaacagaaattatctgtcatttgagaagtggcttgacaatcatttgagctttgaaagcagtcactgtggtgtaatatgaatgctgtcctagtggtcatagtaccaagggcacgtgtctccccttggtataactgatttcctttttagtcctctactgctaaataagttaattttgcattttgcagaaagaaacattgattgctaaatctttttgctgctgtgttttggtgttttcatgtttacttgttttatattgatctgttttaagtatgagaggcttatagtgccctccattgtaaatccatagtcatctttttaagcttattgtgtttaagaaagtagctatgtgttaaacagaggtgatggcagcccttccctagcacactggtggaagagaccccttaagaacctgaccccagtgaatgaagctgatgcacagggagcaccaaaggaccttcgttaagtgataattgtcctggcctctcagccatgaccgttatgaggaaatatcccccattcgaacttaacagatgcctcctctccaaagagaattaaaatcgtagcttgtacagatcaagagaatatactgggcagaatgaagtatgtttgtttatttttctttaaaaataaaggattttggaactctggagagtaagaatatagtatagagtttgcctcaacacatgtgagggccaaataacctgctagctaggcagtaataaactctgttacagaagagaaaaagggccgggcacagtggcttattcctgtaatcccaacactgtggaaggccgaggcaggaggatcacttgagtccaggagtttgaaacctacctaggcaacatggtgaaaccttgtctctaccaaaataaaaattagctgggcatggtggcacgtgcctgtggtcccagctacttgggaggctgaggtgggagcctgggaggtcaaggctgcagtgagccatgatcatgccactgcactccatcctgggtgacagcaagatcttgtctcaaaaaaaaaaaaaaaaaccaggagtgaaaaaggaaagtagaaggcagctgctggcctagatgttggtttgggaatattaggtgatcctgttgagattctggatccagagcaatttctttagcttttgactttgccaaagtgtagatagcctttatccagcagtattttaagtggggaatgcaacgtgaggccaactgaacaattccccccgtggctgcccagatagtcacagtcaaggttggagagtctccttccagccagtgacctacccaaaccttttgttctgtaaaactgctctggaaataccgggaagcccagttttctcacgtggtttctagcttcttcagactcagcccaaattaggaagtgcagaagcacatgatggtgaaaaacctaggatttggcagccttccagaatggtatggaatctgagggaagatttatgtttcgttttggaggatagctcaagttgaattttctttccagccagttaccctttcaacctacccatactttgtacaactcttacacaaatacttagatatttattagatagccctgaattcactctaattataaacagggagtgtaaactgcccccagatgttcctgggctgggtaaaagcagctggagtgaagcactcattttccataaaggtaacaaagggcagctcagtggttactcaagctcaaaagggtttttttaagagcaagcattggttaagtctgtgtatactgagttggaagtgatttcagcacattcttttttagtggagtgaaagttctgaagcccccttttaacttcctcttggtttttcattataattggtagccatctcatgaactgtctctgactgttgtctctttgtggtcatgtgattgtgagcttgctttctgacttgcatttctgactttatcctgttgttaggaagatagaaactaggttttgaaagattacatgattcaagcgagggattttaaagtaaagatgtatttattctgaagaatctaaaagataacagattatttgcttatgaaagaacaatatagtctgggaatcccagaatgtcaagccaaaggtctaagaagtcatctccttcaaatactttaataaagaagtatttcgaggagatatctgtccaaaaaggtttgactggcctccagattccagttatttttaaaaagcaacttaccactaaatccttgagtctccatagagtaacagtaaagaaactgatgtaacagactctcctctcaaaggatctcctctggaagagactatcagcggcagcattctccagggaagacccatcccctagtgccagagcttgcatcctggagactaaagattgcacttttttgtagttttttgtccaaatgcaatcccatttctgtgcctcttagcatgcagttagatttggacaaacaagattcctaaggaatgactttattaactataatatggttacagctattatataaatatatattctggttatagttctaatatggagatgttgtgtgcaatgctggcctgtggtggtctgtgtaatgctttaacttgtatggaggaggccaggctcagagctgagatgtggcctgaaccttccctgtatcgatcctttaatttagaactgtcaagatgtcactttctccccctctgccttttagtggtatctgacatatactcaaaacagtaatttcctggtcacatcattaactgctaattctgtatttataaagaattttcagatggacatgtacaaatttgaactcaaaccatccccagtccagatacagggcagcgtgtaggtgaccacaccagagcctcagcctcggtccttctcagccgtcgggataggatccaggcatttcttttaaatctcagaggtagcagtaaacttttcagtattgctgttagcaagtgtgtgtttgccaatagatacccattatactaatgtgccaagtaaatgttcattgcacatctgcttccactgtgttcccacgggtgccatgaagtgtgtgaggagcccctcatctggagggatgagtgctgcgttgactactgctatcaggattgtgttgtgtggaatattcatctacataaattttatatgcacagtaatttccctttttatatgtcaagtaactatttgtaaaagttatactcacaaattattataatgattactaatatattttttccatgtttcattgcctgaataaaaactgtttaccactgtta

SEQ ID NO: 302886 - DNA, 8111 bp, Homo sapiens
  misc_feature (227)..(227): n is a, c, g, or t
atcaccatcgccgtgaagtcacagtggcaagatgaaaatgtttaaaaaaattttaaaaaggaataaggaaagaggaagaggacagcgtgccccggctcagaaaacggtcctcctctgccccggacgccggcggacctgtggggtatgaccgaatctccccgcgcagccggcaagccccggccctcagtcgggccgcgaccagcgtgacgccgcggtagggggatccnggcgggcgcgcggccgtcttcaaagccccggcgccgccgccgcccccgcgcgcgcgcgcgagtagtacggtccgagggggcggcttctggggcgcggctccggcggcagctgatgcgcgccccgccggccgggaggcgggagtccgcgagccgggagcgggagcagcagaggtctagcagccgggcgccgcgggccgggggcctgaggaggccacaggacgggcgtcttcccggctagtggagcccggcgcggggcccgctgcggccgcaccgtgaggggaggaggccgaggaggacgcagcgccggctgccggcgggaggaagcgctccaccagggcccccgacggcactcgtttaaccacatccgcgcctctgctggaaacgcttgctggcgcctgtcaccggttccctccattttgaaagggaaaaaggctctccccacccattcccctgcccctaggagctggagccggaggagccgcgctcatggcgttcagcccgtggcagatcctgtcccccgtgcagtgggcgaaatggacgtggtctgcggtacgcggcggggccgccggcgaggacgaggctggcgggcccgagggcgaccccgaggaggaggattcgcaagccgagaccaaatccttgagtttcagctcggattctgaaggtaattttgagactcctgaagctgaaaccccgatccgatcacctttcaaggagtcctgtgatccatcactcggattggcaggacctggggccaaaagccaagaatcacaagaagctgatgaacagcttgtagcagaagtggttgaaaaatgttcatctaagacttgttctaaaccttcagaaaatgaagtgccacagcaggccattgactctcactcagtcaagaatttcagagaagaacctgaacatgattttagcaaaatttccatcgtgaggccattttcaatagaaacgaaggattccacggatatctcggcagtcctcggaacaaaagcagctcatggctgtgtaactgcagtctcaggcaaggctctgccttccagcccgccagacgccctccaggacgaggcgatgacagaaggcagcatgggggtcaccctcgaggcctccgcagaagctgatctaaaagctggcaactcctgtccagagcttgtgcccagcagaagaagcaagctgagaaagcccaagcctgtccccctgaggaagaaagcaattggaggagagttctcagacaccaacgctgctgtggagggcacacctctccccaaggcatcctatcacttcagtcctgaagagttggatgagaacacaagtcctttgctaggagatgccaggttccagaagtctccccctgacattaaagaaactcccggcactctcagtagtgacaccaacgactcaggggttgagctgggggaggagtcgaggagctcacctctcaagcttgagtttgatttcacagaagatacaggaaacatagaggccaggaaagcccttccaaggaagcttggcaggaaactgggtagcacactgactcccaagatacaaaaagatggcatcagtaagtcagcaggtttagaacagcctacagacccagtggcacgagacgggcctctctcccaaacatcttccaagccagatcctagtcagtgggagagccccagcttcaacccctttgggagccactctgttctgcagaactccccacccctctcttctgagggctcctaccactttgacccagataactttgacgaatccatggatccctttaaaccaactacgaccttaacaagcagtgacttttgttctcccactggtaatcacgttaatgaaatcttagaatcacccaagaaggcaaagtcgcgtttaataacgactactgaacaagtgaaatttctctgttttctgttgagtggctgtaaggtgaagaagcatgaaactcagtctctcgccctggatgcatgttctcgggatgaaggggcagtgatctcccagatttcagacatttctaatagggatggccatgctactgatgaggagaaactggcatccacgtcatgtggtcagaaatcagctggtgccgaggtgaaaggtgagccagaggaagacctggagtactttgaatgttccaatgttcctgtgtctaccataaatcatgcgttttcatcctcagaagcaggcatagagaaggagacgtgccagaagatggaagaagacgggtccactgtgcttgggctgctggagtcctctgcagagaaggcccctgtgtcggtgtcctgtggaggtgagagccccctggatgggatctgcctcagcgaatcagacaagacagccgtgctcaccttaataagagaagagataattactaaagagattgaagcaaatgaatggaagaagaaatacgaagagacccggcaagaagttttggagatgaggaaaattgtagctgaatatgaaaagactattgctcaaatgattgaagatgaacaaaggacaagtatgacctctcagaagagcttccagcaactgaccatggagaaggaacaggccctggctgaccttaactctgtggaaaggtccctttctgatctcttcaggagatatgagaacctgaaaggtgttctggaagggttcaagaagaatgaagaagccttgaagaaatgtgctcaggattacttagccagagttaaacaagaggagcagcgataccaggccctgaaaatccacgcagaagagaaactggacaaagccaatgaagagattgctcaggttcgaacaaaagcaaaggctgagagtgcagctctccatgctggactccgcaaagagcagatgaaggtggagtccctggaaagggccctgcagcagaagaaccaagaaattgaagaactgacaaaaatctgtgatgagctgattgcaaagctgggaaagactgactgagacactccccctgttagctcaacagatctgcatttggctgcttctcttgtgaccacaattatcttgccttatccaggaataattgcccctttgcagagaaaaaaaaaaacttaaaaaaagcacatgcctactgctgcctgtcccgctttgctgccaatgcaacagccctggaagaaaccctagagggttgcatagtctagaaaggagtgtgacctgacagtgctggagcctcctagtttccccctatgaaggttcccttaggctgctgagtttgggtttgtgatttatctttagtttgttttaaagtcatctttactttcccaaatgtgttaaatttgtaactcctctttggggtcttctccaccacctgtctgatttttttgtgatctgtttaatcttttaattttttagtatcagtggttttatttaaggagacagtttggcctattgttacttccaatttataatcaagaaggggctctggatccccttttaaattacacacactctcacacacatacatgtatgtttatagatgctgctgctcttttccctgaagcatagtcaagtaagaactgctctacagaaggacatatttccttggatgtgagaccctattttgaaatagagtcctgactcagaacaccaacttaagaatttgggggattaaagatgtgaagaccacagtcttgggttttcatatctggagaagactatttgccatgacgttttgttgccctggtatttggacactcctcagctttaatgggtgtggcccctttagggttagtcctcagactaatgatagtgtctgctttctgcatgaacggcaatatgggactccctccaagctagggtttggcaagtctgccctagagtcatttactctcctctgcctccatttgttaatacagaatcaacatttagtcttcattatctttttttttttttttgagacagagtttcgatctattttaagtatgtgaagaaaatctacttgtaaaaggctcagatcttaattaaaaggtaattgtagcacattaccaattataaggtgaagaaatgtttttttcccaagtgtgatgcattgttcttcagatgttgaaaagaaagcaaaaaataccttctaacttaagacagaatttttaacaaaatgagcagtaaaagtcacatgaaccactccaaaaatcagtgcattttgcatatttttaaacaaagacagcttgttgaatactgagaagaggagtgcaaggagaaggtctgtactaacaaagccaaattcctcaagctcttactggactcagttcagagtggtgggccattaaccccaacatggaatttttccatataaatctcaatgaattccctttcatttgaataggcaaacccaaatccatgcaagtgttttaaagcactgtcctgtcttaatcttacatgctgaaagtcttcatggtgatatgcactatattcagtatacgtatgttttcctacttctcttgtaaaactgttgcatgatccaacttcagcaatgaattgtgcctagtggagaacctctatagatcttaaaaaatgaattattctttagcagtgtattactcacatgggtgcaatctttagccccagggaggtcaataatgtcttttaaagccagaagtcacattttaccaatatgcatttatcataattggtgcttaggctgtatattcaagcctgttgtcttaacattttgtataaaaaagaacaacagaaattatctgtcatttgagaagtggcttgacaatcatttgagctttgaaagcagtcactgtggtgtaatatgaatgctgtcctagtggtcatagtaccaagggcacgtgtctccccttggtataactgatttcctttttagtcctctactgctaaataagttaattttgcattttgcagaaagaaacattgattgctaaatctttttgctgctgtgttttggtgttttcatgtttacttgttttatattgatctgttttaagtatgagaggcttatagtgccctccattgtaaatccatagtcatctttttaagcttattgtgtttaagaaagtagctatgtgttaaacagaggtgatggcagcccttccctagcacactggtggaagagaccccttaagaacctgaccccagtgaatgaagctgatgcacagggagcaccaaaggaccttcgttaagtgataattgtcctggcctctcagccatgaccgttatgaggaaatatcccccattcgaacttaacagatgcctcctctccaaagagaattaaaatcgtagcttgtacagatcaagagaatatactgggcagaatgaagtatgtttgtttatttttctttaaaaataaaggattttggaactctggagagtaagaatatagtatagagtttgcctcaacacatgtgagggccaaataacctgctagctaggcagtaataaactctgttacagaagagaaaaagggccgggcacagtggcttattcctgtaatcccaacactgtggaaggccgaggcaggaggatcacttgagtccaggagtttgaaacctacctaggcaacatggtgaaaccttgtctctaccaaaataaaaattagctgggcatggtggcacgtgcctgtggtcccagctacttgggaggctgaggtgggagcctgggaggtcaaggctgcagtgagccatgatcatgccactgcactccatcctgggtgacagcaagatcttgtctcaaaaaaaaaaaaaaaaaccaggagtgaaaaaggaaagtagaaggcagctgctggcctagatgttggtttgggaatattaggtgatcctgttgagattctggatccagagcaatttctttagcttttgactttgccaaagtgtagatagcctttatccagcagtattttaagtggggaatgcaacgtgaggccaactgaacaattccccccgtggctgcccagatagtcacagtcaaggttggagagtctccttccagccagtgacctacccaaaccttttgttctgtaaaactgctctggaaataccgggaagcccagttttctcacgtggtttctagcttcttcagactcagcccaaattaggaagtgcagaagcacatgatggtgaaaaacctaggatttggcagccttccagaatggtatggaatctgagggaagatttatttcaacctacccatactttgtacaactcttacacaaatacttagatatttattagatagccctgaattcactctaattataaacagggagtgtaaactgcccccagatgttcctgggctgggtaaaagcagctggagtgaagcactcattttccataaaggtaacaaagggcagctcagtggttactcaagctcaaaagggtttttttaagagcaagcattggttaagtctgtgtatactgagttggaagtgatttcagcacattcttttttagtggagtgaaagttctgaagcccccttttaacttcctcttggtttttcattataattggtagccatctcatgaactgtctctgactgttgtctctttgtggtcatgtgattgtgagcttgctttctgacttgcatttctgactttatcctgttgttaggaagatagaaactaggttttgaaagattacatgattcaagcgagggattttaaagtaaagatgtatttattctgaagaatctaaaagataacagattatttgcttatgaaagaacaatatagtctgggaatcccagaatgtcaagccaaaggtctaagaagtcatctccttcaaatactttaataaagaagtatttcgaggagatatctgtccaaaaaggtttgactggcctccagattccagttatttttaaaaagcaacttaccactaaatccttgagtctccatagagtaacagtaaagaaactgatgtaacagactctcctctcaaaggatctcctctggaagagactatcagcggcagcattctccagggaagacccatcccctagtgccagagcttgcatcctggagactaaagattgcacttttttgtagttttttgtccaaatgcaatcccatttctgtgcctcttagcatgcagttagatttggacaaacaagattcctaaggaatgactttattaactataatatggttacagctattatataaatatatattctggttatagttctaatatggagatgttgtgtgcaatgctggcctgtggtggtctgtgtaatgctttaacttgtatggaggaggccaggctcagagctgagatgtggcctgaaccttccctgtatcgatcctttaatttagaactgtcaagatgtcactttctccccctctgccttttagtggtatctgacatatactcaaaacagtaatttcctggtcacatcattaactgctaattctgtatttataaagaattttcagatggacatgtacaaatttgaactcaaaccatccccagtccagatacagggcagcgtgtaggtgaccacaccagagcctcagcctcggtccttctcagccgtcgggataggatccaggcatttcttttaaatctcagaggtagcagtaaacttttcagtattgctgttagcaagtgtgtgtttgccaatagatacccattatactaatgtgccaagtaaatgttcattgcacatctgcttccactgtgttcccacgggtgccatgaagtgtgtgaggagcccctcatctggagggatgagtgctgcgttgactactgctatcaggattgtgttgtgtggaatattcatctacataaattttatatgcacagtaatttccctttttatatgtcaagtaactatttgtaaaagttatactcacaaattattataatgattactaatatattttttccatgtttcattgcctgaataaaaactgtttaccactgtta

SEQ ID NO: 302887 - DNA, 7378 bp, Homo sapiens
gagagatgcgaaatcagcggtagcaggtggcgcagaagggagaggggagcgaccctggggaccgactctggggaccctcgccgaagagctcggattctgaaggtaattttgagactcctgaagctgaaaccccgatccgatcacctttcaaggagtcctgtgatccatcactcggattggcaggacctggggccaaaagccaagaatcacaagaagctgatgaacagcttgtagcagaagtggttgaaaaatgttcatctaagacttgttctaaaccttcagaaaatgaagtgccacagcaggccattgactctcactcagtcaagaatttcagagaagaacctgaacatgattttagcaaaatttccatcgtgaggccattttcaatagaaacgaaggattccacggatatctcggcagtcctcggaacaaaagcagctcatggctgtgtaactgcagtctcaggcaaggctctgccttccagcccgccagacgccctccaggacgaggcgatgacagaaggcagcatgggggtcaccctcgaggcctccgcagaagctgatctaaaagctggcaactcctgtccagagcttgtgcccagcagaagaagcaagctgagaaagcccaagcctgtccccctgaggaagaaagcaattggaggagagttctcagacaccaacgctgctgtggagggcacacctctccccaaggcatcctatcacttcagtcctgaagagttggatgagaacacaagtcctttgctaggagatgccaggttccagaagtctccccctgacattaaagaaactcccggcactctcagtagtgacaccaacgactcaggggttgagctgggggaggagtcgaggagctcacctctcaagcttgagtttgatttcacagaagatacaggaaacatagaggccaggaaagcccttccaaggaagcttggcaggaaactgggtagcacactgactcccaagatacaaaaagatggcatcagtaagtcagcaggtttagaacagcctacagacccagtggcacgagacgggcctctctcccaaacatcttccaagccagatcctagtcagtgggagagccccagcttcaacccctttgggagccactctgttctgcagaactccccacccctctcttctgagggctcctaccactttgacccagataactttgacgaatccatggatccctttaaaccaactacgaccttaacaagcagtgacttttgttctcccactggtaatcacgttaatgaaatcttagaatcacccaagaaggcaaagtcgcgtttaataacgactactgaacaagtgaaatttctctgttttctgttgagtggctgtaaggtgaagaagcatgaaactcagtctctcgccctggatgcatgttctcgggatgaaggggcagtgatctcccagatttcagacatttctaatagggatggccatgctactgatgaggagaaactggcatccacgtcatgtggtcagaaatcagctggtgccgaggtgaaaggtgagccagaggaagacctggagtactttgaatgttccaatgttcctgtgtctaccataaatcatgcgttttcatcctcagaagcaggcatagagaaggagacgtgccagaagatggaagaagacgggtccactgtgcttgggctgctggagtcctctgcagagaaggcccctgtgtcggtgtcctgtggaggtgagagccccctggatgggatctgcctcagcgaatcagacaagacagccgtgctcaccttaataagagaagagataattactaaagagattgaagcaaatgaatggaagaagaaatacgaagagacccggcaagaagttttggagatgaggaaaattgtagctgaatatgaaaagactattgctcaaatgattgaagatgaacaaaggacaagtatgacctctcagaagagcttccagcaactgaccatggagaaggaacaggccctggctgaccttaactctgtggaaaggtccctttctgatctcttcaggagatatgagaacctgaaaggtgttctggaagggttcaagaagaatgaagaagccttgaagaaatgtgctcaggattacttagccagagttaaacaagaggagcagcgataccaggccctgaaaatccacgcagaagagaaactggacaaagccaatgaagagattgctcaggttcgaacaaaagcaaaggctgagagtgcagctctccatgctggactccgcaaagagcagatgaaggtggagtccctggaaagggccctgcagcagaagaaccaagaaattgaagaactgacaaaaatctgtgatgagctgattgcaaagctgggaaagactgactgagacactccccctgttagctcaacagatctgcatttggctgcttctcttgtgaccacaattatcttgccttatccaggaataattgcccctttgcagagaaaaaaaaaaacttaaaaaaagcacatgcctactgctgcctgtcccgctttgctgccaatgcaacagccctggaagaaaccctagagggttgcatagtctagaaaggagtgtgacctgacagtgctggagcctcctagtttccccctatgaaggttcccttaggctgctgagtttgggtttgtgatttatctttagtttgttttaaagtcatctttactttcccaaatgtgttaaatttgtaactcctctttggggtcttctccaccacctgtctgatttttttgtgatctgtttaatcttttaattttttagtatcagtggttttatttaaggagacagtttggcctattgttacttccaatttataatcaagaaggggctctggatccccttttaaattacacacactctcacacacatacatgtatgtttatagatgctgctgctcttttccctgaagcatagtcaagtaagaactgctctacagaaggacatatttccttggatgtgagaccctattttgaaatagagtcctgactcagaacaccaacttaagaatttgggggattaaagatgtgaagaccacagtcttgggttttcatatctggagaagactatttgccatgacgttttgttgccctggtatttggacactcctcagctttaatgggtgtggcccctttagggttagtcctcagactaatgatagtgtctgctttctgcatgaacggcaatatgggactccctccaagctagggtttggcaagtctgccctagagtcatttactctcctctgcctccatttgttaatacagaatcaacatttagtcttcattatctttttttttttttttgagacagagtttcgatctattttaagtatgtgaagaaaatctacttgtaaaaggctcagatcttaattaaaaggtaattgtagcacattaccaattataaggtgaagaaatgtttttttcccaagtgtgatgcattgttcttcagatgttgaaaagaaagcaaaaaataccttctaacttaagacagaatttttaacaaaatgagcagtaaaagtcacatgaaccactccaaaaatcagtgcattttgcatatttttaaacaaagacagcttgttgaatactgagaagaggagtgcaaggagaaggtctgtactaacaaagccaaattcctcaagctcttactggactcagttcagagtggtgggccattaaccccaacatggaatttttccatataaatctcaatgaattccctttcatttgaataggcaaacccaaatccatgcaagtgttttaaagcactgtcctgtcttaatcttacatgctgaaagtcttcatggtgatatgcactatattcagtatacgtatgttttcctacttctcttgtaaaactgttgcatgatccaacttcagcaatgaattgtgcctagtggagaacctctatagatcttaaaaaatgaattattctttagcagtgtattactcacatgggtgcaatctttagccccagggaggtcaataatgtcttttaaagccagaagtcacattttaccaatatgcatttatcataattggtgcttaggctgtatattcaagcctgttgtcttaacattttgtataaaaaagaacaacagaaattatctgtcatttgagaagtggcttgacaatcatttgagctttgaaagcagtcactgtggtgtaatatgaatgctgtcctagtggtcatagtaccaagggcacgtgtctccccttggtataactgatttcctttttagtcctctactgctaaataagttaattttgcattttgcagaaagaaacattgattgctaaatctttttgctgctgtgttttggtgttttcatgtttacttgttttatattgatctgttttaagtatgagaggcttatagtgccctccattgtaaatccatagtcatctttttaagcttattgtgtttaagaaagtagctatgtgttaaacagaggtgatggcagcccttccctagcacactggtggaagagaccccttaagaacctgaccccagtgaatgaagctgatgcacagggagcaccaaaggaccttcgttaagtgataattgtcctggcctctcagccatgaccgttatgaggaaatatcccccattcgaacttaacagatgcctcctctccaaagagaattaaaatcgtagcttgtacagatcaagagaatatactgggcagaatgaagtatgtttgtttatttttctttaaaaataaaggattttggaactctggagagtaagaatatagtatagagtttgcctcaacacatgtgagggccaaataacctgctagctaggcagtaataaactctgttacagaagagaaaaagggccgggcacagtggcttattcctgtaatcccaacactgtggaaggccgaggcaggaggatcacttgagtccaggagtttgaaacctacctaggcaacatggtgaaaccttgtctctaccaaaataaaaattagctgggcatggtggcacgtgcctgtggtcccagctacttgggaggctgaggtgggagcctgggaggtcaaggctgcagtgagccatgatcatgccactgcactccatcctgggtgacagcaagatcttgtctcaaaaaaaaaaaaaaaaaccaggagtgaaaaaggaaagtagaaggcagctgctggcctagatgttggtttgggaatattaggtgatcctgttgagattctggatccagagcaatttctttagcttttgactttgccaaagtgtagatagcctttatccagcagtattttaagtggggaatgcaacgtgaggccaactgaacaattccccccgtggctgcccagatagtcacagtcaaggttggagagtctccttccagccagtgacctacccaaaccttttgttctgtaaaactgctctggaaataccgggaagcccagttttctcacgtggtttctagcttcttcagactcagcccaaattaggaagtgcagaagcacatgatggtgaaaaacctaggatttggcagccttccagaatggtatggaatctgagggaagatttatgtttcgttttggaggatagctcaagttgaattttctttccagccagttaccctttcaacctacccatactttgtacaactcttacacaaatacttagatatttattagatagccctgaattcactctaattataaacagggagtgtaaactgcccccagatgttcctgggctgggtaaaagcagctggagtgaagcactcattttccataaaggtaacaaagggcagctcagtggttactcaagctcaaaagggtttttttaagagcaagcattggttaagtctgtgtatactgagttggaagtgatttcagcacattcttttttagtggagtgaaagttctgaagcccccttttaacttcctcttggtttttcattataattggtagccatctcatgaactgtctctgactgttgtctctttgtggtcatgtgattgtgagcttgctttctgacttgcatttctgactttatcctgttgttaggaagatagaaactaggttttgaaagattacatgattcaagcgagggattttaaagtaaagatgtatttattctgaagaatctaaaagataacagattatttgcttatgaaagaacaatatagtctgggaatcccagaatgtcaagccaaaggtctaagaagtcatctccttcaaatactttaataaagaagtatttcgaggagatatctgtccaaaaaggtttgactggcctccagattccagttatttttaaaaagcaacttaccactaaatccttgagtctccatagagtaacagtaaagaaactgatgtaacagactctcctctcaaaggatctcctctggaagagactatcagcggcagcattctccagggaagacccatcccctagtgccagagcttgcatcctggagactaaagattgcacttttttgtagttttttgtccaaatgcaatcccatttctgtgcctcttagcatgcagttagatttggacaaacaagattcctaaggaatgactttattaactataatatggttacagctattatataaatatatattctggttatagttctaatatggagatgttgtgtgcaatgctggcctgtggtggtctgtgtaatgctttaacttgtatggaggaggccaggctcagagctgagatgtggcctgaaccttccctgtatcgatcctttaatttagaactgtcaagatgtcactttctccccctctgccttttagtggtatctgacatatactcaaaacagtaatttcctggtcacatcattaactgctaattctgtatttataaagaattttcagatggacatgtacaaatttgaactcaaaccatccccagtccagatacagggcagcgtgtaggtgaccacaccagagcctcagcctcggtccttctcagccgtcgggataggatccaggcatttcttttaaatctcagaggtagcagtaaacttttcagtattgctgttagcaagtgtgtgtttgccaatagatacccattatactaatgtgccaagtaaatgttcattgcacatctgcttccactgtgttcccacgggtgccatgaagtgtgtgaggagcccctcatctggagggatgagtgctgcgttgactactgctatcaggattgtgttgtgtggaatattcatctacataaattttatatgcacagtaatttccctttttatatgtcaagtaactatttgtaaaagttatactcacaaattattataatgattactaatatattttttccatgtttcattgcctgaataaaaactgtttaccactgtta

SEQ ID NO: 302888 - DNA, 8295 bp, Homo sapiens
  misc_feature (227)..(227): n is a, c, g, or t
atcaccatcgccgtgaagtcacagtggcaagatgaaaatgtttaaaaaaattttaaaaaggaataaggaaagaggaagaggacagcgtgccccggctcagaaaacggtcctcctctgccccggacgccggcggacctgtggggtatgaccgaatctccccgcgcagccggcaagccccggccctcagtcgggccgcgaccagcgtgacgccgcggtagggggatccnggcgggcgcgcggccgtcttcaaagccccggcgccgccgccgcccccgcgcgcgcgcgcgagtagtacggtccgagggggcggcttctggggcgcggctccggcggcagctgatgcgcgccccgccggccgggaggcgggagtccgcgagccgggagcgggagcagcagaggtctagcagccgggcgccgcgggccgggggcctgaggaggccacaggacgggcgtcttcccggctagtggagcccggcgcggggcccgctgcggccgcaccgtgaggggaggaggccgaggaggacgcagcgccggctgccggcgggaggaagcgctccaccagggcccccgacggcactcgtttaaccacatccgcgcctctgctggaaacgcttgctggcgcctgtcaccggttccctccattttgaaagggaaaaaggctctccccacccattcccctgcccctaggagctggagccggaggagccgcgctcatggcgttcagcccgtggcagatcctgtcccccgtgcagtgggcgaaatggacgtggtctgcggtacgcggcggggccgccggcgaggacgaggctggcgggcccgagggcgaccccgaggaggaggattcgcaagccgagaccaaatccttgagtttcagctcggattctgaaggtaattttgagactcctgaagctgaaaccccgatccgatcacctttcaaggagtcctgtgatccatcactcggattggcaggacctggggccaaaagccaagaatcacaagaagctgatgaacagcttgtagcagaagtggttgaaaaatgttcatctaagacttgttctaaaccttcagaaaatgaagtgccacagcaggccattgactctcactcagtcaagaatttcagagaagaacctgaacatgattttagcaaaatttccatcgtgaggccattttcaatagaaacgaaggattccacggatatctcggcagtcctcggaacaaaagcagctcatggctgtgtaactgcagtctcaggcaaggctctgccttccagcccgccagacgccctccaggacgaggcgatgacagaaggcagcatgggggtcaccctcgaggcctccgcagaagctgatctaaaagctggcaactcctgtccagagcttgtgcccagcagaagaagcaagctgagaaagcccaagcctgtccccctgaggaagaaagcaattggaggagagttctcagacaccaacgctgctgtggagggcacacctctccccaaggcatcctatcacttcagtcctgaagagttggatgagaacacaagtcctttgctaggagatgccaggttccagaagtctccccctgacattaaagaaactcccggcactctcagtagtgacaccaacgactcaggggttgagctgggggaggagtcgaggagctcacctctcaagcttgagtttgatttcacagaagatacaggaaacatagaggccaggaaagcccttccaaggaagcttggcaggaaactgggtagcacactgactcccaagatacaaaaagatggcatcagtaagtcagcaggtttagaacagcctacagacccagtggcacgagacgggcctctctcccaaacatcttccaagccagatcctagtcagtgggagagccccagcttcaacccctttgggagccactctgttctgcagaactccccacccctctcttctgagggctcctaccactttgacccagataactttgacgaatccatggatccctttaaaccaactacgaccttaacaagcagtgacttttgttctcccactggtaatcacgttaatgaaatcttagaatcacccaagaaggcaaagtcgcgtttaataacgactactgaacaagtgaaatttctctgttttctgttgagtggctgtaaggtgaagaagcatgaaactcagtctctcgccctggatgcatgttctcgggatgaaggggcagtgatctcccagatttcagacatttctaatagggatggccatgctactgatgaggagaaactggcatccacgtcatgtggtcagaaatcagctggtgccgaggtgaaaggtgagccagaggaagacctggagtactttgaatgttccaatgttcctgtgtctaccataaatcatgcgttttcatcctcagaagcaggcatagagaaggagacgtgccagaagatggaagaagacgggtccactgtgcttgggctgctggagtcctctgcagagaaggcccctgtgtcggtgtcctgtggaggtgagagccccctggatgggatctgcctcagcgaatcagacaagacagccgtgctcaccttaataagagaagagataattactaaagagattgaagcaaatgaatggaagaagaaatacgaagagacccggcaagaagttttggagatgaggaaaattgtagctgaatatgaaaagactattgctcaaatgattgaagatgaacaaaggacaagtatgacctctcagaagagcttccagcaactgaccatggagaaggaacaggccctggctgaccttaactctgtggaaaggtccctttctgatctcttcaggagatatgagaacctgaaaggtgttctggaagggttcaagaagaatgaagaagccttgaagaaatgtgctcaggattacttagccagagttaaacaagaggagcagcgataccaggccctgaaaatccacgcagaagagaaactggacaaagccaatgaagagattgctcaggttcgaacaaaagcaaaggctgagagtgcagctctccatgctggactccgcaaagagcagatgaaggtggagtccctggaaagggccctgcagcagaagaaccaagaaattgaagaactgacaaaaatctgtgatgagctgattgcaaagctgggaaagactgactgagacactccccctgttagctcaacagatctgcatttggctgcttctcttgtgaccacaattatcttgccttatccaggaataattgcccctttgcagagaaaaaaaaaaacttaaaaaaagcacatgcctactgctgcctgtcccgctttgctgccaatgcaacagccctggaagaaaccctagagggttgcatagtctagaaaggagtgtgacctgacagtgctggagcctcctagtttccccctatgaaggttcccttaggctgctgagtttgggtttgtgatttatctttagtttgttttaaagtcatctttactttcccaaatgtgttaaatttgtaactcctctttggggtcttctccaccacctgtctgatttttttgtgatctgtttaatcttttaattttttagtatcagtggttttatttaaggagacagtttggcctattgttacttccaatttataatcaagaaggggctctggatccccttttaaattacacacactctcacacacatacatgtatgtttatagatgctgctgctcttttccctgaagcatagtcaagtaagaactgctctacagaaggacatatttccttggatgtgagaccctattttgaaatagagtcctgactcagaacaccaacttaagaatttgggggattaaagatgtgaagaccacagtcttgggttttcatatctggagaagactatttgccatgacgttttgttgccctggtatttggacactcctcagctttaatgggtgtggcccctttagggttagtcctcagactaatgatagtgtctgctttctgcatgaacggcaatatgggactccctccaagctagggtttggcaagtctgccctagagtcatttactctcctctgcctccatttgttaatacagaatcaacatttagtcttcattatctttttttttttttttgagacagagtttcgatctattttaagtatgtgaagaaaatctacttgtaaaaggctcagatcttaattaaaaggtaattgtagcacattaccaattataaggtgaagaaatgtttttttcccaagtgtgatgcattgttcttcagatgttgaaaagaaagcaaaaaataccttctaacttaagacagaatttttaacaaaatgagcagtaaaagtcacatgaaccactccaaaaatcagtgcattttgcatatttttaaacaaagacagcttgttgaatactgagaagaggagtgcaaggagaaggtctgtactaacaaagccaaattcctcaagctcttactggactcagttcagagtggtgggccattaaccccaacatggaatttttccatataaatctcaatgaattccctttcatttgaataggcaaacccaaatccatgcaagtgttttaaagcactgtcctgtcttaatcttacatgctgaaagtcttcatggtgatatgcactatattcagtatacgtatgttttcctacttctcttgtaaaactgttgcatgatccaacttcagcaatgaattgtgcctagtggagaacctctatagatcttaaaaaatgaattattctttagcagtgtattactcacatgggtgcaatctttagccccagggaggtcaataatgtcttttaaagccagaagtcacattttaccaatatgcatttatcataattggtgcttaggctgtatattcaagcctgttgtcttaacattttgtataaaaaagaacaacagaaattatctgtcatttgagaagtggcttgacaatcatttgagctttgaaagcagtcactgtggtgtaatatgaatgctgtcctagtggtcatagtaccaagggcacgtgtctccccttggtataactgatttcctttttagtcctctactgctaaataagttaattttgcattttgcagaaagaaacattgattgctaaatctttttgctgctgtgttttggtgttttcatgtttacttgttttatattgatctgttttaagtatgagaggcttatagtgccctccattgtaaatccatagtcatctttttaagcttattgtgtttaagaaagtagctatgtgttaaacagaggtgatggcagcccttccctagcacactggtggaagagaccccttaagaacctgaccccagtgaatgaagctgatgcacagggagcaccaaaggaccttcgttaagtgataattgtcctggcctctcagccatgaccgttatgaggaaatatcccccattcgaacttaacagatgcctcctctccaaagagaattaaaatcgtagcttgtacagatcaagagaatatactgggcagaatgaagtatgtttgtttatttttctttaaaaataaaggattttggaactctggagagtaagaatatagtatagagtttgcctcaacacatgtgagggccaaataacctgctagctaggcagtaataaactctgttacagaagagaaaaagggccgggcacagtggcttattcctgtaatcccaacactgtggaaggccgaggcaggaggatcacttgagtccaggagtttgaaacctacctaggcaacatggtgaaaccttgtctctaccaaaataaaaattagctgggcatggtggcacgtgcctgtggtcccagctacttgggaggctgaggtgggagcctgggaggtcaaggctgcagtgagccatgatcatgccactgcactccatcctgggtgacagcaagatcttgtctcaaaaaaaaaaaaaaaaaccaggagtgaaaaaggaaagtagaaggcagctgctggcctagatgttggtttgggaatattaggtgatcctgttgagattctggatccagagcaatttctttagcttttgactttgccaaagtgtagatagcctttatccagcagtattttaagtggggaatgcaacgtgaggccaactgaacaattccccccgtggctgcccagatagtcacagtcaaggttggagagtctccttccagccagtgacctacccaaaccttttgttctgtaaaactgctctggaaataccgggaagcccagttttctcacgtggtttctagcttcttcagactcagcccaaattaggaagtgcagaagcacatgatggtgaaaaacctaggatttggcagccttccagaatggtatggaatctgagggaagatttatgtttcgttttggaggatagctcaagttgaattttctttccagccagttaccctttcaacctacccatactttgtacaactcttacacaaatacttagatatttattagatagccctgaattcactctaattataaacagggagtgtaaactgcccccagatgttcctgggctgggtaaaagcagctggagtgaagcactcattttccataaaggtaacaaagggcagctcagtggttactcaagctcaaaagggtttttttaagagcaagcattggttaagtctgtgtatactgagttggaagtgatttcagcacattcttttttagtggagtgaaagttctgaagcccccttttaacttcctcttggtttttcattataattggtagccatctcatgaactgtctctgactgttgtctctttgtggtcatgtgattgtgagcttgctttctgacttgcatttctgactttatcctgttgttaggaagatagaaactaggttttgaaagattacatgattcaagcgagggattttaaagtaaagatgtatttattctgaagaatctaaaagataacagattatttgcttatgaaagaacaatatagtctgggaatcccagaatgtcaagccaaaggtctaagaagtcatctccttcaaatactttaataaagaagtatttcgaggagatatctgtccaaaaaggtttgactggcctccagattccagttatttttaaaaagcaacttaccactaaatccttgagtctccatagagtaacagtaaagaaactgatgtaacagactctcctctcaaaggatctcctctggaagagactatcagcggcagcattctccagggaagacccatcccctagtgccagagcttgcatcctggagactaaagattgcacttttttgtagttttttgtccaaatgcaatcccatttctgtgcctcttagcatgcagttagatttggacaaacaagattcctaaggaatgactttattaactataatatggttacagctattatataaatatatattctggttatagttctaatatggagatgttgtgtgcaatgctggcctgtggtggtctgtgtaatgctttaacttgtatggaggaggccaggctcagagctgagatgtggcctgaaccttccctgtatcgatcctttaatttagaactgtcaagatgtcactttctccccctctgccttttagtggtatctgacatatactcaaaacagtaatttcctggtcacatcattaactgctaattctgtatttataaagaattttcagatggacatgtacaaatttgaactcaaaccatccccagtccagatacagggcagcgtgtaggtgaccacaccagagcctcagcctcggtccttctcagccgtcgggataggatccaggcatttcttttaaatctcagaggtagcagtaaacttttcagtattgctgttagcaagtgtgtgtttgccaatagatacccattatactaatgtgccaagtaaatgttcattgcacatctgcttccactgtgttcccacgggtgccatgaagtgtgtgaggagcccctcatctggagggatgagtgctgcgttgactactgctatcaggattgtgttgtgtggaatattcatctacataaattttatatgcacagtaatttccctttttatatgtcaagtaactatttgtaaaagttatactcacaaattattataatgattactaatatattttttccatgtttcattgcctgaataaaaactgtttaccactgttaaaaaaaaacaaacaccaaacgatagcaagagaacagcaaaggcggaaaagaaagcaacaaaggagggggggggcaaaaacacagggggaggaaaagggggcaattggagaggggccacaaggggtaaaagg

SEQ ID NO: 302889 - DNA, 8041 bp, Homo sapiens
  misc_feature (227)..(227): n is a, c, g, or t
atcaccatcgccgtgaagtcacagtggcaagatgaaaatgtttaaaaaaattttaaaaaggaataaggaaagaggaagaggacagcgtgccccggctcagaaaacggtcctcctctgccccggacgccggcggacctgtggggtatgaccgaatctccccgcgcagccggcaagccccggccctcagtcgggccgcgaccagcgtgacgccgcggtagggggatccnggcgggcgcgcggccgtcttcaaagccccggcgccgccgccgcccccgcgcgcgcgcgcgagtagtacggtccgagggggcggcttctggggcgcggctccggcggcagctgatgcgcgccccgccggccgggaggcgggagtccgcgagccgggagcgggagcagcagaggtctagcagccgggcgccgcgggccgggggcctgaggaggccacaggacgggcgtcttcccggctagtggagcccggcgcggggcccgctgcggccgcaccgtgaggggaggaggccgaggaggacgcagcgccggctgccggcgggaggaagcgctccaccagggcccccgacggcactcgtttaaccacatccgcgcctctgctggaaacgcttgctggcgcctgtcaccggttccctccattttgaaagggaaaaaggctctccccacccattcccctgcccctaggagctggagccggaggagccgcgctcatggcgttcagcccgtggcagatcctgtcccccgtgcagtgggcgaaatggacgtggtctgcggtacgcggcggggccgccggcgaggacgaggctggcgggcccgagggcgaccccgaggaggaggattcgcaagccgagaccaaatccttgagtttcagctcggattctgaaggtaattttgagactcctgaagctgaaaccccgatccgatcacctttcaaggagtcctgtgatccatcactcggattggcaggacctggggccaaaagccaagaatcacaagaagctgatgaacagcttgtagcagaagtggttgaaaaatgttcatctaagacttgttctaaaccttcagaaaatgaagtgccacagcaggccattgactctcactcagtcaagaatttcagagaagaacctgaacatgattttagcaaaatttccatcgtgaggccattttcaatagaaacgaaggattccacggatatctcggcagtcctcggaacaaaagcagctcatggctgtgtaactgcagtctcaggcaaggctctgccttccagcccgccagacgccctccaggacgaggcgatgacagaaggcagcatgggggtcaccctcgaggcctccgcagaagctgatctaaaagctggcaactcctgtccagagcttgtgcccagcagaagaagcaagctgagaaagcccaagcctgtccccctgaggaagaaagcaattggaggagagttctcagacaccaacgctgctgtggagggcacacctctccccaaggcatcctatcacttcagtcctgaagagttggatgagaacacaagtcctttgctaggagatgccaggttccagaagtctccccctgacattaaagaaactcccggcactctcagtagtgacaccaacgactcaggggttgagctgggggaggagtcgaggagctcacctctcaagcttgagtttgatttcacagaagatacaggaaacatagaggccaggaaagcccttccaaggaagcttggcaggaaactgggtagcacactgactcccaagatacaaaaagatggcatcagtaagtcagcaggtttagaacagcctacagacccagtggcacgagacgggcctctctcccaaacatcttccaagccagatcctagtcagtgggagagccccagcttcaacccctttgggagccactctgttctgcagaactccccacccctctcttctgagggctcctaccactttgacccagataactttgacgaatccatggatccctttaaaccaactacgaccttaacaagcagtgacttttgttctcccactggtaatcacgttaatgaaatcttagaatcacccaagaaggcaaagtcgcgtttaataacgagtggctgtaaggtgaagaagcatgaaactcagtctctcgccctggatgcatgttctcgggatgaaggggcagtgatctcccagatttcagacatttctaatagggatggccatgctactgatgaggagaaactggcatccacgtcatgtggtcagaaatcagctggtgccgaggtgaaaggcatagagaaggagacgtgccagaagatggaagaagacgggtccactgtgcttgggctgctggagtcctctgcagagaaggcccctgtgtcggtgtcctgtggaggtgagagccccctggatgggatctgcctcagcgaatcagacaagacagccgtgctcaccttaataagagaagagataattactaaagagattgaagcaaatgaatggaagaagaaatacgaagagacccggcaagaagttttggagatgaggaaaattgtagctgaatatgaaaagactattgctcaaatgattgaagatgaacaaaggacaagtatgacctctcagaagagcttccagcaactgaccatggagaaggaacaggccctggctgaccttaactctgtggaaaggtccctttctgatctcttcaggagatatgagaacctgaaaggtgttctggaagggttcaagaagaatgaagaagccttgaagaaatgtgctcaggattacttagccagagttaaacaagaggagcagcgataccaggccctgaaaatccacgcagaagagaaactggacaaagccaatgaagagattgctcaggttcgaacaaaagcaaaggctgagagtgcagctctccatgctggactccgcaaagagcagatgaaggtggagtccctggaaagggccctgcagcagaagaaccaagaaattgaagaactgacaaaaatctgtgatgagctgattgcaaagctgggaaagactgactgagacactccccctgttagctcaacagatctgcatttggctgcttctcttgtgaccacaattatcttgccttatccaggaataattgcccctttgcagagaaaaaaaaaaacttaaaaaaagcacatgcctactgctgcctgtcccgctttgctgccaatgcaacagccctggaagaaaccctagagggttgcatagtctagaaaggagtgtgacctgacagtgctggagcctcctagtttccccctatgaaggttcccttaggctgctgagtttgggtttgtgatttatctttagtttgttttaaagtcatctttactttcccaaatgtgttaaatttgtaactcctctttggggtcttctccaccacctgtctgatttttttgtgatctgtttaatcttttaattttttagtatcagtggttttatttaaggagacagtttggcctattgttacttccaatttataatcaagaaggggctctggatccccttttaaattacacacactctcacacacatacatgtatgtttatagatgctgctgctcttttccctgaagcatagtcaagtaagaactgctctacagaaggacatatttccttggatgtgagaccctattttgaaatagagtcctgactcagaacaccaacttaagaatttgggggattaaagatgtgaagaccacagtcttgggttttcatatctggagaagactatttgccatgacgttttgttgccctggtatttggacactcctcagctttaatgggtgtggcccctttagggttagtcctcagactaatgatagtgtctgctttctgcatgaacggcaatatgggactccctccaagctagggtttggcaagtctgccctagagtcatttactctcctctgcctccatttgttaatacagaatcaacatttagtcttcattatctttttttttttttttgagacagagtttcgatctattttaagtatgtgaagaaaatctacttgtaaaaggctcagatcttaattaaaaggtaattgtagcacattaccaattataaggtgaagaaatgtttttttcccaagtgtgatgcattgttcttcagatgttgaaaagaaagcaaaaaataccttctaacttaagacagaatttttaacaaaatgagcagtaaaagtcacatgaaccactccaaaaatcagtgcattttgcatatttttaaacaaagacagcttgttgaatactgagaagaggagtgcaaggagaaggtctgtactaacaaagccaaattcctcaagctcttactggactcagttcagagtggtgggccattaaccccaacatggaatttttccatataaatctcaatgaattccctttcatttgaataggcaaacccaaatccatgcaagtgttttaaagcactgtcctgtcttaatcttacatgctgaaagtcttcatggtgatatgcactatattcagtatacgtatgttttcctacttctcttgtaaaactgttgcatgatccaacttcagcaatgaattgtgcctagtggagaacctctatagatcttaaaaaatgaattattctttagcagtgtattactcacatgggtgcaatctttagccccagggaggtcaataatgtcttttaaagccagaagtcacattttaccaatatgcatttatcataattggtgcttaggctgtatattcaagcctgttgtcttaacattttgtataaaaaagaacaacagaaattatctgtcatttgagaagtggcttgacaatcatttgagctttgaaagcagtcactgtggtgtaatatgaatgctgtcctagtggtcatagtaccaagggcacgtgtctccccttggtataactgatttcctttttagtcctctactgctaaataagttaattttgcattttgcagaaagaaacattgattgctaaatctttttgctgctgtgttttggtgttttcatgtttacttgttttatattgatctgttttaagtatgagaggcttatagtgccctccattgtaaatccatagtcatctttttaagcttattgtgtttaagaaagtagctatgtgttaaacagaggtgatggcagcccttccctagcacactggtggaagagaccccttaagaacctgaccccagtgaatgaagctgatgcacagggagcaccaaaggaccttcgttaagtgataattgtcctggcctctcagccatgaccgttatgaggaaatatcccccattcgaacttaacagatgcctcctctccaaagagaattaaaatcgtagcttgtacagatcaagagaatatactgggcagaatgaagtatgtttgtttatttttctttaaaaataaaggattttggaactctggagagtaagaatatagtatagagtttgcctcaacacatgtgagggccaaataacctgctagctaggcagtaataaactctgttacagaagagaaaaagggccgggcacagtggcttattcctgtaatcccaacactgtggaaggccgaggcaggaggatcacttgagtccaggagtttgaaacctacctaggcaacatggtgaaaccttgtctctaccaaaataaaaattagctgggcatggtggcacgtgcctgtggtcccagctacttgggaggctgaggtgggagcctgggaggtcaaggctgcagtgagccatgatcatgccactgcactccatcctgggtgacagcaagatcttgtctcaaaaaaaaaaaaaaaaaccaggagtgaaaaaggaaagtagaaggcagctgctggcctagatgttggtttgggaatattaggtgatcctgttgagattctggatccagagcaatttctttagcttttgactttgccaaagtgtagatagcctttatccagcagtattttaagtggggaatgcaacgtgaggccaactgaacaattccccccgtggctgcccagatagtcacagtcaaggttggagagtctccttccagccagtgacctacccaaaccttttgttctgtaaaactgctctggaaataccgggaagcccagttttctcacgtggtttctagcttcttcagactcagcccaaattaggaagtgcagaagcacatgatggtgaaaaacctaggatttggcagccttccagaatggtatggaatctgagggaagatttatgtttcgttttggaggatagctcaagttgaattttctttccagccagttaccctttcaacctacccatactttgtacaactcttacacaaatacttagatatttattagatagccctgaattcactctaattataaacagggagtgtaaactgcccccagatgttcctgggctgggtaaaagcagctggagtgaagcactcattttccataaaggtaacaaagggcagctcagtggttactcaagctcaaaagggtttttttaagagcaagcattggttaagtctgtgtatactgagttggaagtgatttcagcacattcttttttagtggagtgaaagttctgaagcccccttttaacttcctcttggtttttcattataattggtagccatctcatgaactgtctctgactgttgtctctttgtggtcatgtgattgtgagcttgctttctgacttgcatttctgactttatcctgttgttaggaagatagaaactaggttttgaaagattacatgattcaagcgagggattttaaagtaaagatgtatttattctgaagaatctaaaagataacagattatttgcttatgaaagaacaatatagtctgggaatcccagaatgtcaagccaaaggtctaagaagtcatctccttcaaatactttaataaagaagtatttcgaggagatatctgtccaaaaaggtttgactggcctccagattccagttatttttaaaaagcaacttaccactaaatccttgagtctccatagagtaacagtaaagaaactgatgtaacagactctcctctcaaaggatctcctctggaagagactatcagcggcagcattctccagggaagacccatcccctagtgccagagcttgcatcctggagactaaagattgcacttttttgtagttttttgtccaaatgcaatcccatttctgtgcctcttagcatgcagttagatttggacaaacaagattcctaaggaatgactttattaactataatatggttacagctattatataaatatatattctggttatagttctaatatggagatgttgtgtgcaatgctggcctgtggtggtctgtgtaatgctttaacttgtatggaggaggccaggctcagagctgagatgtggcctgaaccttccctgtatcgatcctttaatttagaactgtcaagatgtcactttctccccctctgccttttagtggtatctgacatatactcaaaacagtaatttcctggtcacatcattaactgctaattctgtatttataaagaattttcagatggacatgtacaaatttgaactcaaaccatccccagtccagatacagggcagcgtgtaggtgaccacaccagagcctcagcctcggtccttctcagccgtcgggataggatccaggcatttcttttaaatctcagaggtagcagtaaacttttcagtattgctgttagcaagtgtgtgtttgccaatagatacccattatactaatgtgccaagtaaatgttcattgcacatctgcttccactgtgttcccacgggtgccatgaagtgtgtgaggagcccctcatctggagggatgagtgctgcgttgactactgctatcaggattgtgttgtgtggaatattcatctacataaattttatatgcacagtaatttccctttttatatgtcaagtaactatttgtaaaagttatactcacaaattattataatgattactaatatattttttccatgtttcattgcctgaataaaaactgtttaccactgtta

SEQ ID NO: 302890 - DNA, 6898 bp, Homo sapiens
  misc_feature (227)..(227): n is a, c, g, or t
atcaccatcgccgtgaagtcacagtggcaagatgaaaatgtttaaaaaaattttaaaaaggaataaggaaagaggaagaggacagcgtgccccggctcagaaaacggtcctcctctgccccggacgccggcggacctgtggggtatgaccgaatctccccgcgcagccggcaagccccggccctcagtcgggccgcgaccagcgtgacgccgcggtagggggatccnggcgggcgcgcggccgtcttcaaagccccggcgccgccgccgcccccgcgcgcgcgcgcgagtagtacggtccgagggggcggcttctggggcgcggctccggcggcagctgatgcgcgccccgccggccgggaggcgggagtccgcgagccgggagcgggagcagcagaggtctagcagccgggcgccgcgggccgggggcctgaggaggccacaggacgggcgtcttcccggctagtggagcccggcgcggggcccgctgcggccgcaccgtgaggggaggaggccgaggaggacgcagcgccggctgccggcgggaggaagcgctccaccagggcccccgacggcactcgtttaaccacatccgcgcctctgctggaaacgcttgctggcgcctgtcaccggttccctccattttgaaagggaaaaaggctctccccacccattcccctgcccctaggagctggagccggaggagccgcgctcatggcgttcagcccgtggcagatcctgtcccccgtgcagtgggcgaaatggacgtggtctgcggtacgcggcggggccgccggcgaggacgaggctggcgggcccgagggcgaccccgaggaggaggattcgcaagccgagaccaaatccttgagtttcaggagtggctgtaaggtgaagaagcatgaaactcagtctctcgccctggatgcatgttctcgggatgaaggggcagtgatctcccagatttcagacatttctaatagggatggccatgctactgatgaggagaaactggcatccacgtcatgtggtcagaaatcagctggtgccgaggtgaaaggtgagccagaggaagacctggagtactttgaatgttccaatgttcctgtgtctaccataaatcatgcgttttcatcctcagaagcaggcatagagaaggagacgtgccagaagatggaagaagacgggtccactgtgcttgggctgctggagtcctctgcagagaaggcccctgtgtcggtgtcctgtggaggtgagagccccctggatgggatctgcctcagcgaatcagacaagacagccgtgctcaccttaataagagaagagataattactaaagagattgaagcaaatgaatggaagaagaaatacgaagagacccggcaagaagttttggagatgaggaaaattgtagctgaatatgaaaagactattgctcaaatgattgaagatgaacaaaggacaagtatgacctctcagaagagcttccagcaactgaccatggagaaggaacaggccctggctgaccttaactctgtggaaaggtccctttctgatctcttcaggagatatgagaacctgaaaggtgttctggaagggttcaagaagaatgaagaagccttgaagaaatgtgctcaggattacttagccagagttaaacaagaggagcagcgataccaggccctgaaaatccacgcagaagagaaactggacaaagccaatgaagagattgctcaggttcgaacaaaagcaaaggctgagagtgcagctctccatgctggactccgcaaagagcagatgaaggtggagtccctggaaagggccctgcagcagaagaaccaagaaattgaagaactgacaaaaatctgtgatgagctgattgcaaagctgggaaagactgactgagacactccccctgttagctcaacagatctgcatttggctgcttctcttgtgaccacaattatcttgccttatccaggaataattgcccctttgcagagaaaaaaaaaaacttaaaaaaagcacatgcctactgctgcctgtcccgctttgctgccaatgcaacagccctggaagaaaccctagagggttgcatagtctagaaaggagtgtgacctgacagtgctggagcctcctagtttccccctatgaaggttcccttaggctgctgagtttgggtttgtgatttatctttagtttgttttaaagtcatctttactttcccaaatgtgttaaatttgtaactcctctttggggtcttctccaccacctgtctgatttttttgtgatctgtttaatcttttaattttttagtatcagtggttttatttaaggagacagtttggcctattgttacttccaatttataatcaagaaggggctctggatccccttttaaattacacacactctcacacacatacatgtatgtttatagatgctgctgctcttttccctgaagcatagtcaagtaagaactgctctacagaaggacatatttccttggatgtgagaccctattttgaaatagagtcctgactcagaacaccaacttaagaatttgggggattaaagatgtgaagaccacagtcttgggttttcatatctggagaagactatttgccatgacgttttgttgccctggtatttggacactcctcagctttaatgggtgtggcccctttagggttagtcctcagactaatgatagtgtctgctttctgcatgaacggcaatatgggactccctccaagctagggtttggcaagtctgccctagagtcatttactctcctctgcctccatttgttaatacagaatcaacatttagtcttcattatctttttttttttttttgagacagagtttcgatctattttaagtatgtgaagaaaatctacttgtaaaaggctcagatcttaattaaaaggtaattgtagcacattaccaattataaggtgaagaaatgtttttttcccaagtgtgatgcattgttcttcagatgttgaaaagaaagcaaaaaataccttctaacttaagacagaatttttaacaaaatgagcagtaaaagtcacatgaaccactccaaaaatcagtgcattttgcatatttttaaacaaagacagcttgttgaatactgagaagaggagtgcaaggagaaggtctgtactaacaaagccaaattcctcaagctcttactggactcagttcagagtggtgggccattaaccccaacatggaatttttccatataaatctcaatgaattccctttcatttgaataggcaaacccaaatccatgcaagtgttttaaagcactgtcctgtcttaatcttacatgctgaaagtcttcatggtgatatgcactatattcagtatacgtatgttttcctacttctcttgtaaaactgttgcatgatccaacttcagcaatgaattgtgcctagtggagaacctctatagatcttaaaaaatgaattattctttagcagtgtattactcacatgggtgcaatctttagccccagggaggtcaataatgtcttttaaagccagaagtcacattttaccaatatgcatttatcataattggtgcttaggctgtatattcaagcctgttgtcttaacattttgtataaaaaagaacaacagaaattatctgtcatttgagaagtggcttgacaatcatttgagctttgaaagcagtcactgtggtgtaatatgaatgctgtcctagtggtcatagtaccaagggcacgtgtctccccttggtataactgatttcctttttagtcctctactgctaaataagttaattttgcattttgcagaaagaaacattgattgctaaatctttttgctgctgtgttttggtgttttcatgtttacttgttttatattgatctgttttaagtatgagaggcttatagtgccctccattgtaaatccatagtcatctttttaagcttattgtgtttaagaaagtagctatgtgttaaacagaggtgatggcagcccttccctagcacactggtggaagagaccccttaagaacctgaccccagtgaatgaagctgatgcacagggagcaccaaaggaccttcgttaagtgataattgtcctggcctctcagccatgaccgttatgaggaaatatcccccattcgaacttaacagatgcctcctctccaaagagaattaaaatcgtagcttgtacagatcaagagaatatactgggcagaatgaagtatgtttgtttatttttctttaaaaataaaggattttggaactctggagagtaagaatatagtatagagtttgcctcaacacatgtgagggccaaataacctgctagctaggcagtaataaactctgttacagaagagaaaaagggccgggcacagtggcttattcctgtaatcccaacactgtggaaggccgaggcaggaggatcacttgagtccaggagtttgaaacctacctaggcaacatggtgaaaccttgtctctaccaaaataaaaattagctgggcatggtggcacgtgcctgtggtcccagctacttgggaggctgaggtgggagcctgggaggtcaaggctgcagtgagccatgatcatgccactgcactccatcctgggtgacagcaagatcttgtctcaaaaaaaaaaaaaaaaaccaggagtgaaaaaggaaagtagaaggcagctgctggcctagatgttggtttgggaatattaggtgatcctgttgagattctggatccagagcaatttctttagcttttgactttgccaaagtgtagatagcctttatccagcagtattttaagtggggaatgcaacgtgaggccaactgaacaattccccccgtggctgcccagatagtcacagtcaaggttggagagtctccttccagccagtgacctacccaaaccttttgttctgtaaaactgctctggaaataccgggaagcccagttttctcacgtggtttctagcttcttcagactcagcccaaattaggaagtgcagaagcacatgatggtgaaaaacctaggatttggcagccttccagaatggtatggaatctgagggaagatttatgtttcgttttggaggatagctcaagttgaattttctttccagccagttaccctttcaacctacccatactttgtacaactcttacacaaatacttagatatttattagatagccctgaattcactctaattataaacagggagtgtaaactgcccccagatgttcctgggctgggtaaaagcagctggagtgaagcactcattttccataaaggtaacaaagggcagctcagtggttactcaagctcaaaagggtttttttaagagcaagcattggttaagtctgtgtatactgagttggaagtgatttcagcacattcttttttagtggagtgaaagttctgaagcccccttttaacttcctcttggtttttcattataattggtagccatctcatgaactgtctctgactgttgtctctttgtggtcatgtgattgtgagcttgctttctgacttgcatttctgactttatcctgttgttaggaagatagaaactaggttttgaaagattacatgattcaagcgagggattttaaagtaaagatgtatttattctgaagaatctaaaagataacagattatttgcttatgaaagaacaatatagtctgggaatcccagaatgtcaagccaaaggtctaagaagtcatctccttcaaatactttaataaagaagtatttcgaggagatatctgtccaaaaaggtttgactggcctccagattccagttatttttaaaaagcaacttaccactaaatccttgagtctccatagagtaacagtaaagaaactgatgtaacagactctcctctcaaaggatctcctctggaagagactatcagcggcagcattctccagggaagacccatcccctagtgccagagcttgcatcctggagactaaagattgcacttttttgtagttttttgtccaaatgcaatcccatttctgtgcctcttagcatgcagttagatttggacaaacaagattcctaaggaatgactttattaactataatatggttacagctattatataaatatatattctggttatagttctaatatggagatgttgtgtgcaatgctggcctgtggtggtctgtgtaatgctttaacttgtatggaggaggccaggctcagagctgagatgtggcctgaaccttccctgtatcgatcctttaatttagaactgtcaagatgtcactttctccccctctgccttttagtggtatctgacatatactcaaaacagtaatttcctggtcacatcattaactgctaattctgtatttataaagaattttcagatggacatgtacaaatttgaactcaaaccatccccagtccagatacagggcagcgtgtaggtgaccacaccagagcctcagcctcggtccttctcagccgtcgggataggatccaggcatttcttttaaatctcagaggtagcagtaaacttttcagtattgctgttagcaagtgtgtgtttgccaatagatacccattatactaatgtgccaagtaaatgttcattgcacatctgcttccactgtgttcccacgggtgccatgaagtgtgtgaggagcccctcatctggagggatgagtgctgcgttgactactgctatcaggattgtgttgtgtggaatattcatctacataaattttatatgcacagtaatttccctttttatatgtcaagtaactatttgtaaaagttatactcacaaattattataatgattactaatatattttttccatgtttcattgcctgaataaaaactgtttaccactgtta

SEQ ID NO: 302891 - DNA, 6135 bp, Homo sapiens
gatcacaagttgtgtgctaatctacaaataacagatggttcaagcttccccagtttcaggctttgtgcagcgtgtgacattcatcttccatcttactacttaataggaatggagtggctgtaaggtgaagaagcatgaaactcagtctctcgccctggatgcatgttctcgggatgaaggggcagtgatctcccagatttcagacatttctaatagggatggccatgctactgatgaggagaaactggcatccacgtcatgtggtcagaaatcagctggtgccgaggtgaaaggtgagccagaggaagacctggagtactttgaatgttccaatgttcctgtgtctaccataaatcatgcgttttcatcctcagaagcaggcatagagaaggagacgtgccagaagatggaagaagacgggtccactgtgcttgggctgctggagtcctctgcagagaaggcccctgtgtcggtgtcctgtggaggtgagagccccctggatgggatctgcctcagcgaatcagacaagacagccgtgctcaccttaataagagaagagataattactaaagagattgaagcaaatgaatggaagaagaaatacgaagagacccggcaagaagttttggagatgaggaaaattgtagctgaatatgaaaagactattgctcaaatgattgaagatgaacaaaggacaagtatgacctctcagaagagcttccagcaactgaccatggagaaggaacaggccctggctgaccttaactctgtggaaaggtccctttctgatctcttcaggagatatgagaacctgaaaggtgttctggaagggttcaagaagaatgaagaagccttgaagaaatgtgctcaggattacttagccagagttaaacaagaggagcagcgataccaggccctgaaaatccacgcagaagagaaactggacaaagccaatgaagagattgctcaggttcgaacaaaagcaaaggctgagagtgcagctctccatgctggactccgcaaagagcagatgaaggtggagtccctggaaagggccctgcagcagaagaaccaagaaattgaagaactgacaaaaatctgtgatgagctgattgcaaagctgggaaagactgactgagacactccccctgttagctcaacagatctgcatttggctgcttctcttgtgaccacaattatcttgccttatccaggaataattgcccctttgcagagaaaaaaaaaaacttaaaaaaagcacatgcctactgctgcctgtcccgctttgctgccaatgcaacagccctggaagaaaccctagagggttgcatagtctagaaaggagtgtgacctgacagtgctggagcctcctagtttccccctatgaaggttcccttaggctgctgagtttgggtttgtgatttatctttagtttgttttaaagtcatctttactttcccaaatgtgttaaatttgtaactcctctttggggtcttctccaccacctgtctgatttttttgtgatctgtttaatcttttaattttttagtatcagtggttttatttaaggagacagtttggcctattgttacttccaatttataatcaagaaggggctctggatccccttttaaattacacacactctcacacacatacatgtatgtttatagatgctgctgctcttttccctgaagcatagtcaagtaagaactgctctacagaaggacatatttccttggatgtgagaccctattttgaaatagagtcctgactcagaacaccaacttaagaatttgggggattaaagatgtgaagaccacagtcttgggttttcatatctggagaagactatttgccatgacgttttgttgccctggtatttggacactcctcagctttaatgggtgtggcccctttagggttagtcctcagactaatgatagtgtctgctttctgcatgaacggcaatatgggactccctccaagctagggtttggcaagtctgccctagagtcatttactctcctctgcctccatttgttaatacagaatcaacatttagtcttcattatctttttttttttttttgagacagagtttcgatctattttaagtatgtgaagaaaatctacttgtaaaaggctcagatcttaattaaaaggtaattgtagcacattaccaattataaggtgaagaaatgtttttttcccaagtgtgatgcattgttcttcagatgttgaaaagaaagcaaaaaataccttctaacttaagacagaatttttaacaaaatgagcagtaaaagtcacatgaaccactccaaaaatcagtgcattttgcatatttttaaacaaagacagcttgttgaatactgagaagaggagtgcaaggagaaggtctgtactaacaaagccaaattcctcaagctcttactggactcagttcagagtggtgggccattaaccccaacatggaatttttccatataaatctcaatgaattccctttcatttgaataggcaaacccaaatccatgcaagtgttttaaagcactgtcctgtcttaatcttacatgctgaaagtcttcatggtgatatgcactatattcagtatacgtatgttttcctacttctcttgtaaaactgttgcatgatccaacttcagcaatgaattgtgcctagtggagaacctctatagatcttaaaaaatgaattattctttagcagtgtattactcacatgggtgcaatctttagccccagggaggtcaataatgtcttttaaagccagaagtcacattttaccaatatgcatttatcataattggtgcttaggctgtatattcaagcctgttgtcttaacattttgtataaaaaagaacaacagaaattatctgtcatttgagaagtggcttgacaatcatttgagctttgaaagcagtcactgtggtgtaatatgaatgctgtcctagtggtcatagtaccaagggcacgtgtctccccttggtataactgatttcctttttagtcctctactgctaaataagttaattttgcattttgcagaaagaaacattgattgctaaatctttttgctgctgtgttttggtgttttcatgtttacttgttttatattgatctgttttaagtatgagaggcttatagtgccctccattgtaaatccatagtcatctttttaagcttattgtgtttaagaaagtagctatgtgttaaacagaggtgatggcagcccttccctagcacactggtggaagagaccccttaagaacctgaccccagtgaatgaagctgatgcacagggagcaccaaaggaccttcgttaagtgataattgtcctggcctctcagccatgaccgttatgaggaaatatcccccattcgaacttaacagatgcctcctctccaaagagaattaaaatcgtagcttgtacagatcaagagaatatactgggcagaatgaagtatgtttgtttatttttctttaaaaataaaggattttggaactctggagagtaagaatatagtatagagtttgcctcaacacatgtgagggccaaataacctgctagctaggcagtaataaactctgttacagaagagaaaaagggccgggcacagtggcttattcctgtaatcccaacactgtggaaggccgaggcaggaggatcacttgagtccaggagtttgaaacctacctaggcaacatggtgaaaccttgtctctaccaaaataaaaattagctgggcatggtggcacgtgcctgtggtcccagctacttgggaggctgaggtgggagcctgggaggtcaaggctgcagtgagccatgatcatgccactgcactccatcctgggtgacagcaagatcttgtctcaaaaaaaaaaaaaaaaaccaggagtgaaaaaggaaagtagaaggcagctgctggcctagatgttggtttgggaatattaggtgatcctgttgagattctggatccagagcaatttctttagcttttgactttgccaaagtgtagatagcctttatccagcagtattttaagtggggaatgcaacgtgaggccaactgaacaattccccccgtggctgcccagatagtcacagtcaaggttggagagtctccttccagccagtgacctacccaaaccttttgttctgtaaaactgctctggaaataccgggaagcccagttttctcacgtggtttctagcttcttcagactcagcccaaattaggaagtgcagaagcacatgatggtgaaaaacctaggatttggcagccttccagaatggtatggaatctgagggaagatttatgtttcgttttggaggatagctcaagttgaattttctttccagccagttaccctttcaacctacccatactttgtacaactcttacacaaatacttagatatttattagatagccctgaattcactctaattataaacagggagtgtaaactgcccccagatgttcctgggctgggtaaaagcagctggagtgaagcactcattttccataaaggtaacaaagggcagctcagtggttactcaagctcaaaagggtttttttaagagcaagcattggttaagtctgtgtatactgagttggaagtgatttcagcacattcttttttagtggagtgaaagttctgaagcccccttttaacttcctcttggtttttcattataattggtagccatctcatgaactgtctctgactgttgtctctttgtggtcatgtgattgtgagcttgctttctgacttgcatttctgactttatcctgttgttaggaagatagaaactaggttttgaaagattacatgattcaagcgagggattttaaagtaaagatgtatttattctgaagaatctaaaagataacagattatttgcttatgaaagaacaatatagtctgggaatcccagaatgtcaagccaaaggtctaagaagtcatctccttcaaatactttaataaagaagtatttcgaggagatatctgtccaaaaaggtttgactggcctccagattccagttatttttaaaaagcaacttaccactaaatccttgagtctccatagagtaacagtaaagaaactgatgtaacagactctcctctcaaaggatctcctctggaagagactatcagcggcagcattctccagggaagacccatcccctagtgccagagcttgcatcctggagactaaagattgcacttttttgtagttttttgtccaaatgcaatcccatttctgtgcctcttagcatgcagttagatttggacaaacaagattcctaaggaatgactttattaactataatatggttacagctattatataaatatatattctggttatagttctaatatggagatgttgtgtgcaatgctggcctgtggtggtctgtgtaatgctttaacttgtatggaggaggccaggctcagagctgagatgtggcctgaaccttccctgtatcgatcctttaatttagaactgtcaagatgtcactttctccccctctgccttttagtggtatctgacatatactcaaaacagtaatttcctggtcacatcattaactgctaattctgtatttataaagaattttcagatggacatgtacaaatttgaactcaaaccatccccagtccagatacagggcagcgtgtaggtgaccacaccagagcctcagcctcggtccttctcagccgtcgggataggatccaggcatttcttttaaatctcagaggtagcagtaaacttttcagtattgctgttagcaagtgtgtgtttgccaatagatacccattatactaatgtgccaagtaaatgttcattgcacatctgcttccactgtgttcccacgggtgccatgaagtgtgtgaggagcccctcatctggagggatgagtgctgcgttgactactgctatcaggattgtgttgtgtggaatattcatctacataaattttatatgcacagtaatttccctttttatatgtcaagtaactatttgtaaaagttatactcacaaattattataatgattactaatatattttttccatgtttcattgcctgaataaaaactgtttaccactgtta

SEQ ID NO: 302892 - DNA, 6717 bp, Homo sapiens
tcccctctgcctcccaagtagctgggaccacaggcatgtgccaccatgcctgcataattttttttagagatgaggtctcgctctgttgcccaggctggtttgtaactcctgagctcaagcaatgcacctgcctcagcctcccaaagtgctgggattgcaggcatgagccacagcgcctggtccataatactttttaaaaattaattatgcatgagagtttcaaattacataaccaccaaatagatgatagaaagcttgttaacaagaaacaaaattgattgacttgaaatcgaaatctttttatttttcctcacttttagaaaggagagttatgagccatgaagtgactaaagatgaaatcaaagtagagaagaaaaaaaggcataaataattcacacacagtgtggtcaacacttgaatgattaaaaaacattttaagtatatccctctaatttgttgctcttttattatttgtcttttaagcatttcctaggtgtaaggccctttgctgggcttgatggaaaggaagggacattcctgctcttagagagcggtagccatccataataaccaacttggatatgacgtcaaaagtgatgggggcaccaccattgagggcaggggaggacgtgatgcgactcacagagcacccagcaccggactgggtcagaaggacattgtcattcttcactagaagaaaggttaacccaagaggttgatctttaaagtctttgaataagtgaaatacttttggaattaggacacaaaataaaacttgtcactgaatcagaggtagagtgtctgaaagggtggattgactcaggaaagtctaaagtcagatcgcatctgttaggaagagcccagaagaatatctttaacttagtttgtaaaagattgactcatctaagcagaatgaatctatttccttgcagtattcaaataggtgcaaagagaaagggaaggcagttggttctataagtaaaatataagtttgactaaagataaaatcttaacaaaaacctttttagaaccttaagaaaccttatataatgtaaaaaaaaaaaaaaaaaaaaagataacgagagccccaaagcagataaatggattacatacattgtcagtgtatgttaatgtgtttaattgtttgggacagcatttctccaactttcattgtctgaaaatcctcctctggtaataagttctttttttctcatttaggaaaattgtagctgaatatgaaaagactattgctcaaatgattgaagatgaacaaaggacaagtatgacctctcagaagagcttccagcaactgaccatggagaaggaacaggccctggctgaccttaactctgtggaaaggtccctttctgatctcttcaggagatatgagaacctgaaaggtgttctggaagggttcaagaagaatgaagaagccttgaagaaatgtgctcaggattacttagccagagttaaacaagaggagcagcgataccaggccctgaaaatccacgcagaagagaaactggacaaagccaatgaagagattgctcaggttcgaacaaaagcaaaggctgagagtgcagctctccatgctggactccgcaaagagcagatgaaggtggagtccctggaaagggccctgcagcagaagaaccaagaaattgaagaactgacaaaaatctgtgatgagctgattgcaaagctgggaaagactgactgagacactccccctgttagctcaacagatctgcatttggctgcttctcttgtgaccacaattatcttgccttatccaggaataattgcccctttgcagagaaaaaaaaaaacttaaaaaaagcacatgcctactgctgcctgtcccgctttgctgccaatgcaacagccctggaagaaaccctagagggttgcatagtctagaaaggagtgtgacctgacagtgctggagcctcctagtttccccctatgaaggttcccttaggctgctgagtttgggtttgtgatttatctttagtttgttttaaagtcatctttactttcccaaatgtgttaaatttgtaactcctctttggggtcttctccaccacctgtctgatttttttgtgatctgtttaatcttttaattttttagtatcagtggttttatttaaggagacagtttggcctattgttacttccaatttataatcaagaaggggctctggatccccttttaaattacacacactctcacacacatacatgtatgtttatagatgctgctgctcttttccctgaagcatagtcaagtaagaactgctctacagaaggacatatttccttggatgtgagaccctattttgaaatagagtcctgactcagaacaccaacttaagaatttgggggattaaagatgtgaagaccacagtcttgggttttcatatctggagaagactatttgccatgacgttttgttgccctggtatttggacactcctcagctttaatgggtgtggcccctttagggttagtcctcagactaatgatagtgtctgctttctgcatgaacggcaatatgggactccctccaagctagggtttggcaagtctgccctagagtcatttactctcctctgcctccatttgttaatacagaatcaacatttagtcttcattatctttttttttttttttgagacagagtttcgatctattttaagtatgtgaagaaaatctacttgtaaaaggctcagatcttaattaaaaggtaattgtagcacattaccaattataaggtgaagaaatgtttttttcccaagtgtgatgcattgttcttcagatgttgaaaagaaagcaaaaaataccttctaacttaagacagaatttttaacaaaatgagcagtaaaagtcacatgaaccactccaaaaatcagtgcattttgcatatttttaaacaaagacagcttgttgaatactgagaagaggagtgcaaggagaaggtctgtactaacaaagccaaattcctcaagctcttactggactcagttcagagtggtgggccattaaccccaacatggaatttttccatataaatctcaatgaattccctttcatttgaataggcaaacccaaatccatgcaagtgttttaaagcactgtcctgtcttaatcttacatgctgaaagtcttcatggtgatatgcactatattcagtatacgtatgttttcctacttctcttgtaaaactgttgcatgatccaacttcagcaatgaattgtgcctagtggagaacctctatagatcttaaaaaatgaattattctttagcagtgtattactcacatgggtgcaatctttagccccagggaggtcaataatgtcttttaaagccagaagtcacattttaccaatatgcatttatcataattggtgcttaggctgtatattcaagcctgttgtcttaacattttgtataaaaaagaacaacagaaattatctgtcatttgagaagtggcttgacaatcatttgagctttgaaagcagtcactgtggtgtaatatgaatgctgtcctagtggtcatagtaccaagggcacgtgtctccccttggtataactgatttcctttttagtcctctactgctaaataagttaattttgcattttgcagaaagaaacattgattgctaaatctttttgctgctgtgttttggtgttttcatgtttacttgttttatattgatctgttttaagtatgagaggcttatagtgccctccattgtaaatccatagtcatctttttaagcttattgtgtttaagaaagtagctatgtgttaaacagaggtgatggcagcccttccctagcacactggtggaagagaccccttaagaacctgaccccagtgaatgaagctgatgcacagggagcaccaaaggaccttcgttaagtgataattgtcctggcctctcagccatgaccgttatgaggaaatatcccccattcgaacttaacagatgcctcctctccaaagagaattaaaatcgtagcttgtacagatcaagagaatatactgggcagaatgaagtatgtttgtttatttttctttaaaaataaaggattttggaactctggagagtaagaatatagtatagagtttgcctcaacacatgtgagggccaaataacctgctagctaggcagtaataaactctgttacagaagagaaaaagggccgggcacagtggcttattcctgtaatcccaacactgtggaaggccgaggcaggaggatcacttgagtccaggagtttgaaacctacctaggcaacatggtgaaaccttgtctctaccaaaataaaaattagctgggcatggtggcacgtgcctgtggtcccagctacttgggaggctgaggtgggagcctgggaggtcaaggctgcagtgagccatgatcatgccactgcactccatcctgggtgacagcaagatcttgtctcaaaaaaaaaaaaaaaaaccaggagtgaaaaaggaaagtagaaggcagctgctggcctagatgttggtttgggaatattaggtgatcctgttgagattctggatccagagcaatttctttagcttttgactttgccaaagtgtagatagcctttatccagcagtattttaagtggggaatgcaacgtgaggccaactgaacaattccccccgtggctgcccagatagtcacagtcaaggttggagagtctccttccagccagtgacctacccaaaccttttgttctgtaaaactgctctggaaataccgggaagcccagttttctcacgtggtttctagcttcttcagactcagcccaaattaggaagtgcagaagcacatgatggtgaaaaacctaggatttggcagccttccagaatggtatggaatctgagggaagatttatgtttcgttttggaggatagctcaagttgaattttctttccagccagttaccctttcaacctacccatactttgtacaactcttacacaaatacttagatatttattagatagccctgaattcactctaattataaacagggagtgtaaactgcccccagatgttcctgggctgggtaaaagcagctggagtgaagcactcattttccataaaggtaacaaagggcagctcagtggttactcaagctcaaaagggtttttttaagagcaagcattggttaagtctgtgtatactgagttggaagtgatttcagcacattcttttttagtggagtgaaagttctgaagcccccttttaacttcctcttggtttttcattataattggtagccatctcatgaactgtctctgactgttgtctctttgtggtcatgtgattgtgagcttgctttctgacttgcatttctgactttatcctgttgttaggaagatagaaactaggttttgaaagattacatgattcaagcgagggattttaaagtaaagatgtatttattctgaagaatctaaaagataacagattatttgcttatgaaagaacaatatagtctgggaatcccagaatgtcaagccaaaggtctaagaagtcatctccttcaaatactttaataaagaagtatttcgaggagatatctgtccaaaaaggtttgactggcctccagattccagttatttttaaaaagcaacttaccactaaatccttgagtctccatagagtaacagtaaagaaactgatgtaacagactctcctctcaaaggatctcctctggaagagactatcagcggcagcattctccagggaagacccatcccctagtgccagagcttgcatcctggagactaaagattgcacttttttgtagttttttgtccaaatgcaatcccatttctgtgcctcttagcatgcagttagatttggacaaacaagattcctaaggaatgactttattaactataatatggttacagctattatataaatatatattctggttatagttctaatatggagatgttgtgtgcaatgctggcctgtggtggtctgtgtaatgctttaacttgtatggaggaggccaggctcagagctgagatgtggcctgaaccttccctgtatcgatcctttaatttagaactgtcaagatgtcactttctccccctctgccttttagtggtatctgacatatactcaaaacagtaatttcctggtcacatcattaactgctaattctgtatttataaagaattttcagatggacatgtacaaatttgaactcaaaccatccccagtccagatacagggcagcgtgtaggtgaccacaccagagcctcagcctcggtccttctcagccgtcgggataggatccaggcatttcttttaaatctcagaggtagcagtaaacttttcagtattgctgttagcaagtgtgtgtttgccaatagatacccattatactaatgtgccaagtaaatgttcattgcacatctgcttccactgtgttcccacgggtgccatgaagtgtgtgaggagcccctcatctggagggatgagtgctgcgttgactactgctatcaggattgtgttgtgtggaatattcatctacataaattttatatgcacagtaatttccctttttatatgtcaagtaactatttgtaaaagttatactcacaaattattataatgattactaatatattttttccatgtttcattgcctgaataaaaactgtttaccactgtta

SEQ ID NO: 302893 - DNA, 5417 bp, Homo sapiens
tagaaaccatttgctagtgagatacaaattttgaagttgtctgtaaattgaatttttataaattaaaatggaattatttaggtcaccgatttttgttttttttctctcatgcagtcaattctttgaggcctgtgcctcacagatgtcagtggttagtatcctgactggctttgactagtggctaatcatgtgctttttgtctctttattacacccaaacaccataaacagagccaatgaagagattgctcaggttcgaacaaaagcaaaggctgagagtgcagctctccatgctggactccgcaaagagcagatgaaggtggagtccctggaaagggccctgcagcagaagaaccaagaaattgaagaactgacaaaaatctgtgatgagctgattgcaaagctgggaaagactgactgagacactccccctgttagctcaacagatctgcatttggctgcttctcttgtgaccacaattatcttgccttatccaggaataattgcccctttgcagagaaaaaaaaaaacttaaaaaaagcacatgcctactgctgcctgtcccgctttgctgccaatgcaacagccctggaagaaaccctagagggttgcatagtctagaaaggagtgtgacctgacagtgctggagcctcctagtttccccctatgaaggttcccttaggctgctgagtttgggtttgtgatttatctttagtttgttttaaagtcatctttactttcccaaatgtgttaaatttgtaactcctctttggggtcttctccaccacctgtctgatttttttgtgatctgtttaatcttttaattttttagtatcagtggttttatttaaggagacagtttggcctattgttacttccaatttataatcaagaaggggctctggatccccttttaaattacacacactctcacacacatacatgtatgtttatagatgctgctgctcttttccctgaagcatagtcaagtaagaactgctctacagaaggacatatttccttggatgtgagaccctattttgaaatagagtcctgactcagaacaccaacttaagaatttgggggattaaagatgtgaagaccacagtcttgggttttcatatctggagaagactatttgccatgacgttttgttgccctggtatttggacactcctcagctttaatgggtgtggcccctttagggttagtcctcagactaatgatagtgtctgctttctgcatgaacggcaatatgggactccctccaagctagggtttggcaagtctgccctagagtcatttactctcctctgcctccatttgttaatacagaatcaacatttagtcttcattatctttttttttttttttgagacagagtttcgatctattttaagtatgtgaagaaaatctacttgtaaaaggctcagatcttaattaaaaggtaattgtagcacattaccaattataaggtgaagaaatgtttttttcccaagtgtgatgcattgttcttcagatgttgaaaagaaagcaaaaaataccttctaacttaagacagaatttttaacaaaatgagcagtaaaagtcacatgaaccactccaaaaatcagtgcattttgcatatttttaaacaaagacagcttgttgaatactgagaagaggagtgcaaggagaaggtctgtactaacaaagccaaattcctcaagctcttactggactcagttcagagtggtgggccattaaccccaacatggaatttttccatataaatctcaatgaattccctttcatttgaataggcaaacccaaatccatgcaagtgttttaaagcactgtcctgtcttaatcttacatgctgaaagtcttcatggtgatatgcactatattcagtatacgtatgttttcctacttctcttgtaaaactgttgcatgatccaacttcagcaatgaattgtgcctagtggagaacctctatagatcttaaaaaatgaattattctttagcagtgtattactcacatgggtgcaatctttagccccagggaggtcaataatgtcttttaaagccagaagtcacattttaccaatatgcatttatcataattggtgcttaggctgtatattcaagcctgttgtcttaacattttgtataaaaaagaacaacagaaattatctgtcatttgagaagtggcttgacaatcatttgagctttgaaagcagtcactgtggtgtaatatgaatgctgtcctagtggtcatagtaccaagggcacgtgtctccccttggtataactgatttcctttttagtcctctactgctaaataagttaattttgcattttgcagaaagaaacattgattgctaaatctttttgctgctgtgttttggtgttttcatgtttacttgttttatattgatctgttttaagtatgagaggcttatagtgccctccattgtaaatccatagtcatctttttaagcttattgtgtttaagaaagtagctatgtgttaaacagaggtgatggcagcccttccctagcacactggtggaagagaccccttaagaacctgaccccagtgaatgaagctgatgcacagggagcaccaaaggaccttcgttaagtgataattgtcctggcctctcagccatgaccgttatgaggaaatatcccccattcgaacttaacagatgcctcctctccaaagagaattaaaatcgtagcttgtacagatcaagagaatatactgggcagaatgaagtatgtttgtttatttttctttaaaaataaaggattttggaactctggagagtaagaatatagtatagagtttgcctcaacacatgtgagggccaaataacctgctagctaggcagtaataaactctgttacagaagagaaaaagggccgggcacagtggcttattcctgtaatcccaacactgtggaaggccgaggcaggaggatcacttgagtccaggagtttgaaacctacctaggcaacatggtgaaaccttgtctctaccaaaataaaaattagctgggcatggtggcacgtgcctgtggtcccagctacttgggaggctgaggtgggagcctgggaggtcaaggctgcagtgagccatgatcatgccactgcactccatcctgggtgacagcaagatcttgtctcaaaaaaaaaaaaaaaaaccaggagtgaaaaaggaaagtagaaggcagctgctggcctagatgttggtttgggaatattaggtgatcctgttgagattctggatccagagcaatttctttagcttttgactttgccaaagtgtagatagcctttatccagcagtattttaagtggggaatgcaacgtgaggccaactgaacaattccccccgtggctgcccagatagtcacagtcaaggttggagagtctccttccagccagtgacctacccaaaccttttgttctgtaaaactgctctggaaataccgggaagcccagttttctcacgtggtttctagcttcttcagactcagcccaaattaggaagtgcagaagcacatgatggtgaaaaacctaggatttggcagccttccagaatggtatggaatctgagggaagatttatgtttcgttttggaggatagctcaagttgaattttctttccagccagttaccctttcaacctacccatactttgtacaactcttacacaaatacttagatatttattagatagccctgaattcactctaattataaacagggagtgtaaactgcccccagatgttcctgggctgggtaaaagcagctggagtgaagcactcattttccataaaggtaacaaagggcagctcagtggttactcaagctcaaaagggtttttttaagagcaagcattggttaagtctgtgtatactgagttggaagtgatttcagcacattcttttttagtggagtgaaagttctgaagcccccttttaacttcctcttggtttttcattataattggtagccatctcatgaactgtctctgactgttgtctctttgtggtcatgtgattgtgagcttgctttctgacttgcatttctgactttatcctgttgttaggaagatagaaactaggttttgaaagattacatgattcaagcgagggattttaaagtaaagatgtatttattctgaagaatctaaaagataacagattatttgcttatgaaagaacaatatagtctgggaatcccagaatgtcaagccaaaggtctaagaagtcatctccttcaaatactttaataaagaagtatttcgaggagatatctgtccaaaaaggtttgactggcctccagattccagttatttttaaaaagcaacttaccactaaatccttgagtctccatagagtaacagtaaagaaactgatgtaacagactctcctctcaaaggatctcctctggaagagactatcagcggcagcattctccagggaagacccatcccctagtgccagagcttgcatcctggagactaaagattgcacttttttgtagttttttgtccaaatgcaatcccatttctgtgcctcttagcatgcagttagatttggacaaacaagattcctaaggaatgactttattaactataatatggttacagctattatataaatatatattctggttatagttctaatatggagatgttgtgtgcaatgctggcctgtggtggtctgtgtaatgctttaacttgtatggaggaggccaggctcagagctgagatgtggcctgaaccttccctgtatcgatcctttaatttagaactgtcaagatgtcactttctccccctctgccttttagtggtatctgacatatactcaaaacagtaatttcctggtcacatcattaactgctaattctgtatttataaagaattttcagatggacatgtacaaatttgaactcaaaccatccccagtccagatacagggcagcgtgtaggtgaccacaccagagcctcagcctcggtccttctcagccgtcgggataggatccaggcatttcttttaaatctcagaggtagcagtaaacttttcagtattgctgttagcaagtgtgtgtttgccaatagatacccattatactaatgtgccaagtaaatgttcattgcacatctgcttccactgtgttcccacgggtgccatgaagtgtgtgaggagcccctcatctggagggatgagtgctgcgttgactactgctatcaggattgtgttgtgtggaatattcatctacataaattttatatgcacagtaatttccctttttatatgtcaagtaactatttgtaaaagttatactcacaaattattataatgattactaatatattttttccatgtttcattgcctgaataaaaactgtttaccactgtta

SEQ ID NO: 302894 - DNA, 5991 bp, Homo sapiens
gggtgcagagaggaagttgcattttaactgaagttcagaacagcttcctagttggggtcatgagactgcctttctttctttctttgttttttatgcaatatattaatatgaagccatcttcccccttcattgctttagatcagtggtttgcagttgggggcagttttgccctccaggggatgttaggtgttaggtaatgtctggagatatatttgtttggttgtcaccactgggagatgctgctggtatctagtgcaggaagccagggatgctgttaaacatcctacaatgcacaggacagcctctgacaacacatttacccatcctaaaacatcagcagggctgctttgagaaactgctatagataaatgaaaaccaggactagcaacaatccctgtttctcactaagcagtttttagctttccgtttttatatgtctccggtgtattttctttactgcatttccaattatgtactcatacctgtgccatccattcatcaagagcaggagtttttatcacagggtctgttagcccctagaacggtgctccctgggagattcagactccagcatccctagatatgctaatggattgagtgagacccagatacttatgtttttgacaagtaccccaaataattcctctgataacaagaaaattggggaactaagagattcatggacaagtttcagagggctggtgactgtcctcaccctttactcaatttaagcatgattttatgagtacattttttgaggtgtgtagcctttttttctttaaagcatctctgatgtagaaaagttaaaaatcactgaattaggatgtctagggtagggtagatccagacttgggactagttaactctatttgcctttatttcagaatacaaagtggcctgcataattatgtcatttgtctttcagaaccaagaaattgaagaactgacaaaaatctgtgatgagctgattgcaaagctgggaaagactgactgagacactccccctgttagctcaacagatctgcatttggctgcttctcttgtgaccacaattatcttgccttatccaggaataattgcccctttgcagagaaaaaaaaaaacttaaaaaaagcacatgcctactgctgcctgtcccgctttgctgccaatgcaacagccctggaagaaaccctagagggttgcatagtctagaaaggagtgtgacctgacagtgctggagcctcctagtttccccctatgaaggttcccttaggctgctgagtttgggtttgtgatttatctttagtttgttttaaagtcatctttactttcccaaatgtgttaaatttgtaactcctctttggggtcttctccaccacctgtctgatttttttgtgatctgtttaatcttttaattttttagtatcagtggttttatttaaggagacagtttggcctattgttacttccaatttataatcaagaaggggctctggatccccttttaaattacacacactctcacacacatacatgtatgtttatagatgctgctgctcttttccctgaagcatagtcaagtaagaactgctctacagaaggacatatttccttggatgtgagaccctattttgaaatagagtcctgactcagaacaccaacttaagaatttgggggattaaagatgtgaagaccacagtcttgggttttcatatctggagaagactatttgccatgacgttttgttgccctggtatttggacactcctcagctttaatgggtgtggcccctttagggttagtcctcagactaatgatagtgtctgctttctgcatgaacggcaatatgggactccctccaagctagggtttggcaagtctgccctagagtcatttactctcctctgcctccatttgttaatacagaatcaacatttagtcttcattatctttttttttttttttgagacagagtttcgatctattttaagtatgtgaagaaaatctacttgtaaaaggctcagatcttaattaaaaggtaattgtagcacattaccaattataaggtgaagaaatgtttttttcccaagtgtgatgcattgttcttcagatgttgaaaagaaagcaaaaaataccttctaacttaagacagaatttttaacaaaatgagcagtaaaagtcacatgaaccactccaaaaatcagtgcattttgcatatttttaaacaaagacagcttgttgaatactgagaagaggagtgcaaggagaaggtctgtactaacaaagccaaattcctcaagctcttactggactcagttcagagtggtgggccattaaccccaacatggaatttttccatataaatctcaatgaattccctttcatttgaataggcaaacccaaatccatgcaagtgttttaaagcactgtcctgtcttaatcttacatgctgaaagtcttcatggtgatatgcactatattcagtatacgtatgttttcctacttctcttgtaaaactgttgcatgatccaacttcagcaatgaattgtgcctagtggagaacctctatagatcttaaaaaatgaattattctttagcagtgtattactcacatgggtgcaatctttagccccagggaggtcaataatgtcttttaaagccagaagtcacattttaccaatatgcatttatcataattggtgcttaggctgtatattcaagcctgttgtcttaacattttgtataaaaaagaacaacagaaattatctgtcatttgagaagtggcttgacaatcatttgagctttgaaagcagtcactgtggtgtaatatgaatgctgtcctagtggtcatagtaccaagggcacgtgtctccccttggtataactgatttcctttttagtcctctactgctaaataagttaattttgcattttgcagaaagaaacattgattgctaaatctttttgctgctgtgttttggtgttttcatgtttacttgttttatattgatctgttttaagtatgagaggcttatagtgccctccattgtaaatccatagtcatctttttaagcttattgtgtttaagaaagtagctatgtgttaaacagaggtgatggcagcccttccctagcacactggtggaagagaccccttaagaacctgaccccagtgaatgaagctgatgcacagggagcaccaaaggaccttcgttaagtgataattgtcctggcctctcagccatgaccgttatgaggaaatatcccccattcgaacttaacagatgcctcctctccaaagagaattaaaatcgtagcttgtacagatcaagagaatatactgggcagaatgaagtatgtttgtttatttttctttaaaaataaaggattttggaactctggagagtaagaatatagtatagagtttgcctcaacacatgtgagggccaaataacctgctagctaggcagtaataaactctgttacagaagagaaaaagggccgggcacagtggcttattcctgtaatcccaacactgtggaaggccgaggcaggaggatcacttgagtccaggagtttgaaacctacctaggcaacatggtgaaaccttgtctctaccaaaataaaaattagctgggcatggtggcacgtgcctgtggtcccagctacttgggaggctgaggtgggagcctgggaggtcaaggctgcagtgagccatgatcatgccactgcactccatcctgggtgacagcaagatcttgtctcaaaaaaaaaaaaaaaaaccaggagtgaaaaaggaaagtagaaggcagctgctggcctagatgttggtttgggaatattaggtgatcctgttgagattctggatccagagcaatttctttagcttttgactttgccaaagtgtagatagcctttatccagcagtattttaagtggggaatgcaacgtgaggccaactgaacaattccccccgtggctgcccagatagtcacagtcaaggttggagagtctccttccagccagtgacctacccaaaccttttgttctgtaaaactgctctggaaataccgggaagcccagttttctcacgtggtttctagcttcttcagactcagcccaaattaggaagtgcagaagcacatgatggtgaaaaacctaggatttggcagccttccagaatggtatggaatctgagggaagatttatgtttcgttttggaggatagctcaagttgaattttctttccagccagttaccctttcaacctacccatactttgtacaactcttacacaaatacttagatatttattagatagccctgaattcactctaattataaacagggagtgtaaactgcccccagatgttcctgggctgggtaaaagcagctggagtgaagcactcattttccataaaggtaacaaagggcagctcagtggttactcaagctcaaaagggtttttttaagagcaagcattggttaagtctgtgtatactgagttggaagtgatttcagcacattcttttttagtggagtgaaagttctgaagcccccttttaacttcctcttggtttttcattataattggtagccatctcatgaactgtctctgactgttgtctctttgtggtcatgtgattgtgagcttgctttctgacttgcatttctgactttatcctgttgttaggaagatagaaactaggttttgaaagattacatgattcaagcgagggattttaaagtaaagatgtatttattctgaagaatctaaaagataacagattatttgcttatgaaagaacaatatagtctgggaatcccagaatgtcaagccaaaggtctaagaagtcatctccttcaaatactttaataaagaagtatttcgaggagatatctgtccaaaaaggtttgactggcctccagattccagttatttttaaaaagcaacttaccactaaatccttgagtctccatagagtaacagtaaagaaactgatgtaacagactctcctctcaaaggatctcctctggaagagactatcagcggcagcattctccagggaagacccatcccctagtgccagagcttgcatcctggagactaaagattgcacttttttgtagttttttgtccaaatgcaatcccatttctgtgcctcttagcatgcagttagatttggacaaacaagattcctaaggaatgactttattaactataatatggttacagctattatataaatatatattctggttatagttctaatatggagatgttgtgtgcaatgctggcctgtggtggtctgtgtaatgctttaacttgtatggaggaggccaggctcagagctgagatgtggcctgaaccttccctgtatcgatcctttaatttagaactgtcaagatgtcactttctccccctctgccttttagtggtatctgacatatactcaaaacagtaatttcctggtcacatcattaactgctaattctgtatttataaagaattttcagatggacatgtacaaatttgaactcaaaccatccccagtccagatacagggcagcgtgtaggtgaccacaccagagcctcagcctcggtccttctcagccgtcgggataggatccaggcatttcttttaaatctcagaggtagcagtaaacttttcagtattgctgttagcaagtgtgtgtttgccaatagatacccattatactaatgtgccaagtaaatgttcattgcacatctgcttccactgtgttcccacgggtgccatgaagtgtgtgaggagcccctcatctggagggatgagtgctgcgttgactactgctatcaggattgtgttgtgtggaatattcatctacataaattttatatgcacagtaatttccctttttatatgtcaagtaactatttgtaaaagttatactcacaaattattataatgattactaatatattttttccatgtttcattgcctgaataaaaactgtttaccactgtta

SEQ ID NO: 302895 - DNA, 4660 bp, Homo sapiens
  misc_feature (2)..(2): n is a, c, g, or t
  misc_feature (51)..(51): n is a, c, g, or t
gngttggccgatctagacctagtggatcctccgggctgcatgaattcggcncgtttaatcttttaattttttagtatcagtggttttatttaaggagacagtttggcctattgttacttccaatttataatcaagaaggggctctggatccccttttaaattacacacactctcacacacatacatgtatgtttatagatgctgctgctcttttccctgaagcatagtcaagtaagaactgctctacagaaggacatatttccttggatgtgagaccctattttgaaatagagtcctgactcagaacaccaacttaagaatttgggggattaaagatgtgaagaccacagtcttgggttttcatatctggagaagactatttgccatgacgttttgttgccctggtatttggacactcctcagctttaatgggtgtggcccctttagggttagtcctcagactaatgatagtgtctgctttctgcatgaacggcaatatgggactccctccaagctagggtttggcaagtctgccctagagtcatttactctcctctgcctccatttgttaatacagaatcaacatttagtcttcattatctttttttttttttttgagacagagtttcgatctattttaagtatgtgaagaaaatctacttgtaaaaggctcagatcttaattaaaaggtaattgtagcacattaccaattataaggtgaagaaatgtttttttcccaagtgtgatgcattgttcttcagatgttgaaaagaaagcaaaaaataccttctaacttaagacagaatttttaacaaaatgagcagtaaaagtcacatgaaccactccaaaaatcagtgcattttgcatatttttaaacaaagacagcttgttgaatactgagaagaggagtgcaaggagaaggtctgtactaacaaagccaaattcctcaagctcttactggactcagttcagagtggtgggccattaaccccaacatggaatttttccatataaatctcaatgaattccctttcatttgaataggcaaacccaaatccatgcaagtgttttaaagcactgtcctgtcttaatcttacatgctgaaagtcttcatggtgatatgcactatattcagtatacgtatgttttcctacttctcttgtaaaactgttgcatgatccaacttcagcaatgaattgtgcctagtggagaacctctatagatcttaaaaaatgaattattctttagcagtgtattactcacatgggtgcaatctttagccccagggaggtcaataatgtcttttaaagccagaagtcacattttaccaatatgcatttatcataattggtgcttaggctgtatattcaagcctgttgtcttaacattttgtataaaaaagaacaacagaaattatctgtcatttgagaagtggcttgacaatcatttgagctttgaaagcagtcactgtggtgtaatatgaatgctgtcctagtggtcatagtaccaagggcacgtgtctccccttggtataactgatttcctttttagtcctctactgctaaataagttaattttgcattttgcagaaagaaacattgattgctaaatctttttgctgctgtgttttggtgttttcatgtttacttgttttatattgatctgttttaagtatgagaggcttatagtgccctccattgtaaatccatagtcatctttttaagcttattgtgtttaagaaagtagctatgtgttaaacagaggtgatggcagcccttccctagcacactggtggaagagaccccttaagaacctgaccccagtgaatgaagctgatgcacagggagcaccaaaggaccttcgttaagtgataattgtcctggcctctcagccatgaccgttatgaggaaatatcccccattcgaacttaacagatgcctcctctccaaagagaattaaaatcgtagcttgtacagatcaagagaatatactgggcagaatgaagtatgtttgtttatttttctttaaaaataaaggattttggaactctggagagtaagaatatagtatagagtttgcctcaacacatgtgagggccaaataacctgctagctaggcagtaataaactctgttacagaagagaaaaagggccgggcacagtggcttattcctgtaatcccaacactgtggaaggccgaggcaggaggatcacttgagtccaggagtttgaaacctacctaggcaacatggtgaaaccttgtctctaccaaaataaaaattagctgggcatggtggcacgtgcctgtggtcccagctacttgggaggctgaggtgggagcctgggaggtcaaggctgcagtgagccatgatcatgccactgcactccatcctgggtgacagcaagatcttgtctcaaaaaaaaaaaaaaaaaccaggagtgaaaaaggaaagtagaaggcagctgctggcctagatgttggtttgggaatattaggtgatcctgttgagattctggatccagagcaatttctttagcttttgactttgccaaagtgtagatagcctttatccagcagtattttaagtggggaatgcaacgtgaggccaactgaacaattccccccgtggctgcccagatagtcacagtcaaggttggagagtctccttccagccagtgacctacccaaaccttttgttctgtaaaactgctctggaaataccgggaagcccagttttctcacgtggtttctagcttcttcagactcagcccaaattaggaagtgcagaagcacatgatggtgaaaaacctaggatttggcagccttccagaatggtatggaatctgagggaagatttatgtttcgttttggaggatagctcaagttgaattttctttccagccagttaccctttcaacctacccatactttgtacaactcttacacaaatacttagatatttattagatagccctgaattcactctaattataaacagggagtgtaaactgcccccagatgttcctgggctgggtaaaagcagctggagtgaagcactcattttccataaaggtaacaaagggcagctcagtggttactcaagctcaaaagggtttttttaagagcaagcattggttaagtctgtgtatactgagttggaagtgatttcagcacattcttttttagtggagtgaaagttctgaagcccccttttaacttcctcttggtttttcattataattggtagccatctcatgaactgtctctgactgttgtctctttgtggtcatgtgattgtgagcttgctttctgacttgcatttctgactttatcctgttgttaggaagatagaaactaggttttgaaagattacatgattcaagcgagggattttaaagtaaagatgtatttattctgaagaatctaaaagataacagattatttgcttatgaaagaacaatatagtctgggaatcccagaatgtcaagccaaaggtctaagaagtcatctccttcaaatactttaataaagaagtatttcgaggagatatctgtccaaaaaggtttgactggcctccagattccagttatttttaaaaagcaacttaccactaaatccttgagtctccatagagtaacagtaaagaaactgatgtaacagactctcctctcaaaggatctcctctggaagagactatcagcggcagcattctccagggaagacccatcccctagtgccagagcttgcatcctggagactaaagattgcacttttttgtagttttttgtccaaatgcaatcccatttctgtgcctcttagcatgcagttagatttggacaaacaagattcctaaggaatgactttattaactataatatggttacagctattatataaatatatattctggttatagttctaatatggagatgttgtgtgcaatgctggcctgtggtggtctgtgtaatgctttaacttgtatggaggaggccaggctcagagctgagatgtggcctgaaccttccctgtatcgatcctttaatttagaactgtcaagatgtcactttctccccctctgccttttagtggtatctgacatatactcaaaacagtaatttcctggtcacatcattaactgctaattctgtatttataaagaattttcagatggacatgtacaaatttgaactcaaaccatccccagtccagatacagggcagcgtgtaggtgaccacaccagagcctcagcctcggtccttctcagccgtcgggataggatccaggcatttcttttaaatctcagaggtagcagtaaacttttcagtattgctgttagcaagtgtgtgtttgccaatagatacccattatactaatgtgccaagtaaatgttcattgcacatctgcttccactgtgttcccacgggtgccatgaagtgtgtgaggagcccctcatctggagggatgagtgctgcgttgactactgctatcaggattgtgttgtgtggaatattcatctacataaattttatatgcacagtaatttccctttttatatgtcaagtaactatttgtaaaagttatactcacaaattattataatgattactaatatattttttccatgtttcattgcctgaataaaaactgtttaccactgtta

SEQ ID NO: 302896 - DNA, 7894 bp, Homo sapiens
  misc_feature (227)..(227): n is a, c, g, or t
atcaccatcgccgtgaagtcacagtggcaagatgaaaatgtttaaaaaaattttaaaaaggaataaggaaagaggaagaggacagcgtgccccggctcagaaaacggtcctcctctgccccggacgccggcggacctgtggggtatgaccgaatctccccgcgcagccggcaagccccggccctcagtcgggccgcgaccagcgtgacgccgcggtagggggatccnggcgggcgcgcggccgtcttcaaagccccggcgccgccgccgcccccgcgcgcgcgcgcgagtagtacggtccgagggggcggcttctggggcgcggctccggcggcagctgatgcgcgccccgccggccgggaggcgggagtccgcgagccgggagcgggagcagcagaggtctagcagccgggcgccgcgggccgggggcctgaggaggccacaggacgggcgtcttcccggctagtggagcccggcgcggggcccgctgcggccgcaccgtgaggggaggaggccgaggaggacgcagcgccggctgccggcgggaggaagcgctccaccagggcccccgacggcactcgtttaaccacatccgcgcctctgctggaaacgcttgctggcgcctgtcaccggttccctccattttgaaagggaaaaaggctctccccacccattcccctgcccctaggagctggagccggaggagccgcgctcatggcgttcagcccgtggcagatcctgtcccccgtgcagtgggcgaaatggacgtggtctgcggtacgcggcggggccgccggcgaggacgaggctggcgggcccgagggcgaccccgaggaggaggattcgcaagccgagaccaaatccttgagtttcagctcggattctgaaggtaattttgagactcctgaagctgaaaccccgatccgatcacctttcaaggagtcctgtgatccatcactcggattggcaggacctggggccaaaagccaagaatcacaagaagctgatgaacagcttgtagcagaagtggttgaaaaatgttcatctaagacttgttctaaaccttcagaaaatgaagtgccacagcaggccattgactctcactcagtcaagaatttcagagaagaacctgaacatgattttagcaaaatttccatcgtgaggccattttcaatagaaacgaaggattccacggatatctcggcagtcctcggaacaaaagcagctcatggctgtgtaactgcagtctcaggcaaggctctgccttccagcccgccagacgccctccaggacgaggcgatgacagaaggcagcatgggggtcaccctcgaggcctccgcagaagctgatctaaaagctggcaactcctgtccagagcttgtgcccagcagaagaagcaagctgagaaagcccaagcctgtccccctgaggaagaaagcaattggaggagagttctcagacaccaacgctgctgtggagggcacacctctccccaaggcatcctatcacttcagtcctgaagagttggatgagaacacaagtcctttgctaggagatgccaggttccagaagtctccccctgacattaaagaaactcccggcactctcagtagtgacaccaacgactcaggggttgagctgggggaggagtcgaggagctcacctctcaagcttgagtttgatttcacagaagatacaggaaacatagaggccaggaaagcccttccaaggaagcttggcaggaaactgggtagcacactgactcccaagatacaaaaagatggcatcagtaagtcagcaggtttagaacagcctacagacccagtggcacgagacgggcctctctcccaaacatcttccaagccagatcctagtcagtgggagagccccagcttcaacccctttgggagccactctgttctgcagaactccccacccctctcttctgagggctcctaccactttgacccagataactttgacgaatccatggatccctttaaaccaactacgaccttaacaagcagtgacttttgttctcccactggtaatcacgttaatgaaatcttagaatcacccaagaaggcaaagtcgcgtttaataacgactactgaacaagtgaaatttctctgttttctgttgagtggctgtaaggtgaagaagcatgaaactcagtctctcgccctggatgcatgttctcgggatgaaggggcagtgatctcccagatttcagacatttctaatagggatggccatgctactgatgaggagaaactggcatccacgtcatgtggtcagaaatcagctggtgccgaggtgaaaggtgagccagaggaagacctggagtactttgaatgttccaatgttcctgtgtctaccataaatcatgcgttttcatcctcagaagcaggcatagagaaggagacgtgccagaagatggaagaagacgggtccactgtgcttgggctgctggagtcctctgcagagaaggcccctgtgtcggtgtcctgtggaggtgagagccccctggatgggatctgcctcagcgaatcagacaagacagccgtgctcaccttaataagagaagagataattactaaagagattgaagcaaatgaatggaagaagaaatacgaagagacccggcaagaagttttggagatgaggaaaattgtagctgaatatgaaaagactattgctcaaatgattgaagatgaacaaaggacaagtatgacctctcagaagagcttccagcaactgaccatggagaaggaacaggccctggctgaccttaactctgtggaaaggtccctttctgatctcttcaggagatatgagaacctgaaaggtgttctggaagggttcaagaagaatgaagaagccttgaagaaatgtgctcaggattacttagccagagttaaacaagaggagcagcgataccaggccctgaaaatccacgcagaagagaaactggacaaagccaatgaagagattgctcaggttcgaacaaaagcaaaggctgagagtgcagctctccatgctggactccgcaaagagcagatgaaggtggagtccctggaaagggccctgcagcagaagaaccaagaaattgaagaactgacaaaaatctgtgatgagctgattgcaaagctgggaaagactgactgagacactccccctgttagctcaacagatctgcatttggctgcttctcttgtgaccacaattatcttgccttatccaggaataattgcccctttgcagagaaaaaaaaaaacttaaaaaaagcacatgcctactgctgcctgtcccgctttgctgccaatgcaacagccctggaagaaaccctagagggttgcatagtctagaaaggagtgtgacctgacagtgctggagcctcctagtttccccctatgaaggttcccttaggctgctgagtttgggtttgtgatttatctttagtttgttttaaagtcatctttactttcccaaatgtgttaaatttgtaactcctctttggggtcttctccaccacctgtctgatttttttgtgatctgtttaatcttttaattttttagtatcagtggttttatttaaggagacagtttggcctattgttacttccaatttataatcaagaaggggctctggatccccttttaaattacacacactctcacacacatacatgtatgtttatagatgctgctgctcttttccctgaagcatagtcaagtaagaactgctctacagaaggacatatttccttggatgtgagaccctattttgaaatagagtcctgactcagaacaccaacttaagaatttgggggattaaagatgtgaagaccacagtcttgggttttcatatctggagaagactatttgccatgacgttttgttgccctggtatttggacactcctcagctttaatgggtgtggcccctttagggttagtcctcagactaatgatagtgtctgctttctgcatgaacggcaatatgggactccctccaagctagggtttggcaagtctgccctagagtcatttactctcctctgcctccatttgttaatacagaatcaacatttagtcttcattatctttttttttttttttgagacagagtttcgatctattttaagtatgtgaagaaaatctacttgtaaaaggctcagatcttaattaaaaggtaattgtagcacattaccaattataaggtgaagaaatgtttttttcccaagtgtgatgcattgttcttcagatgttgaaaagaaagcaaaaaataccttctaacttaagacagaatttttaacaaaatgagcagtaaaagtcacatgaaccactccaaaaatcagtgcattttgcatatttttaaacaaagacagcttgttgaatactgagaagaggagtgcaaggagaaggtctgtactaacaaagccaaattcctcaagctcttactggactcagttcagagtggtgggccattaaccccaacatggaatttttccatataaatctcaatgaattccctttcatttgaataggcaaacccaaatccatgcaagtgttttaaagcactgtcctgtcttaatcttacatgctgaaagtcttcatggtgatatgcactatattcagtatacgtatgttttcctacttctcttgtaaaactgttgcatgatccaacttcagcaatgaattgtgcctagtggagaacctctatagatcttaaaaaatgaattattctttagcagtgtattactcacatgggtgcaatctttagccccagggaggtcaataatgtcttttaaagccagaagtcacattttaccaatatgcatttatcataattggtgcttaggctgtatattcaagcctgttgtcttaacattttgtataaaaaagaacaacagaaattatctgtcatttgagaagtggcttgacaatcatttgagctttgaaagcagtcactgtggtgtaatatgaatgctgtcctagtggtcatagtaccaagggcacgtgtctccccttggtataactgatttcctttttagtcctctactgctaaataagttaattttgcattttgcagaaagaaacattgattgctaaatctttttgctgctgtgttttggtgttttcatgtttacttgttttatattgatctgttttaagtatgagaggcttatagtgccctccattgtaaatccatagtcatctttttaagcttattgtgtttaagaaagtagctatgtgttaaacagaggtgatggcagcccttccctagcacactggtggaagagaccccttaagaacctgaccccagtgaatgaagctgatgcacagggagcaccaaaggaccttcgttaagtgataattgtcctggcctctcagccatgaccgttatgaggaaatatcccccattcgaacttaacagatgcctcctctccaaagagaattaaaatcgtagcttgtacagatcaagagaatatactgggcagaatgaagtatgtttgtttatttttctttaaaaataaaggattttggaactctggagagtaagaatatagtatagagtttgcctcaacacatgtgagggccaaataacctgctagctaggcagtaataaactctgttacagaagagaaaaagggccgggcacagtggcttattcctgtaatcccaacactgtggaaggccgaggcaggaggatcacttgagtccaggagtttgaaacctacctaggcaacatggtgaaaccttgtctctaccaaaataaaaattagctgggcatggtggcacgtgcctgtggtcccagctacttgggaggctgaggtgggagcctgggaggtcaaggctgcagtgagccatgatcatgccactgcactccatcctgggtgacagcaagatcttgtctcaaaaaaaaaaaaaaaaaccaggagtgaaaaaggaaagtagaaggcagctgctggcctagatgttggtttgggaatattaggtgatcctgttgagattctggatccagagcaatttctttagcttttgactttgccaaagtgtagatagcctttatccagcagtattttaagtggggaatgcaacgtgaggccaactgaacaattccccccgtggctgcccagatagtcacagtcaaggttggagagtctccttccagccagtgacctacccaaaccttttgttctgtaaaactgctctggaaataccgggaagcccagttttctcacgtggtttctagcttcttcagactcagcccaaattaggaagtgcagaagcacatgatggtgaaaaacctaggatttggcagccttccagaatggtatggaatctgagggaagatttatgtttcgttttggaggatagctcaagttgaattttctttccagccagttaccctttcaacctacccatactttgtacaactcttacacaaatacttagatatttattagatagccctgaattcactctaattataaacagggagtgtaaactgcccccagatgttcctgggctgggtaaaagcagctggagtgaagcactcattttccataaaggtaacaaagggcagctcagtggttactcaagctcaaaagggtttttttaagagcaagcattggttaagtctgtgtatactgagttggaagtgatttcagcacattcttttttagtggagtgaaagttctgaagcccccttttaacttcctcttggtttttcattataattggtagccatctcatgaactgtctctgactgttgtctctttgtggtcatgtgattgtgagcttgctttctgacttgcatttctgactttatcctgttgttaggaagatagaaactaggttttgaaagattacatgattcaagcgagggattttaaagtaaagatgtatttattctgaagaatctaaaagataacagattatttgcttatgaaagaacaatatagtctgggaatcccagaatgtcaagccaaaggtctaagaagtcatctccttcaaatactttaataaagaagtatttcgaggagatatctgtccaaaaaggtttgactggcctccagattccagttatttttaaaaagcaacttaccactaaatccttgagtctccatagagtaacagtaaagaaactgatgtaacagactctcctctcaaaggatctcctctggaagagactatcagcggcagcattctccagggaagacccatcccctagtgccagagcttgcatcctggagactaaagattgcacttttttgtagttttttgtccaaatgcaatcccatttctgtgcctcttagcatgcagttagatttggacaaacaagattcctaaggaatgactttattaactataatatggttacagctattatataaatatatattctggttatagttctaatatggagatgttgtgtgcaatgctggcctgtggtggtctgtgtaatgctttaacttgtatggaggaggccaggctcagagctgagatgtggcctgaaccttccctgtatcgatcctttaatttagaactgtcaagatgtcactttctccccctctgccttttagtggtatctgacatatactcaaaacagtaatttcctggtcacatcattaactgctaattctgtatttataaagaattttcagatggacatgtacaaatttgaactcaaaccatccccagtccagatacagggcagcgtgtaggtgaccacaccagagcctcagcctcggtccttctcagccgtcgggataggatccaggcatttcttttaaatctcagaggtagcagtaaacttttcagtacagcgccaggactgtgatggcatcacccatgtaacaccgtctctcctgtgatactctcagaacg

SEQ ID NO: 302897 - DNA, 7932 bp, Homo sapiens
  misc_feature (227)..(227): n is a, c, g, or t
atcaccatcgccgtgaagtcacagtggcaagatgaaaatgtttaaaaaaattttaaaaaggaataaggaaagaggaagaggacagcgtgccccggctcagaaaacggtcctcctctgccccggacgccggcggacctgtggggtatgaccgaatctccccgcgcagccggcaagccccggccctcagtcgggccgcgaccagcgtgacgccgcggtagggggatccnggcgggcgcgcggccgtcttcaaagccccggcgccgccgccgcccccgcgcgcgcgcgcgagtagtacggtccgagggggcggcttctggggcgcggctccggcggcagctgatgcgcgccccgccggccgggaggcgggagtccgcgagccgggagcgggagcagcagaggtctagcagccgggcgccgcgggccgggggcctgaggaggccacaggacgggcgtcttcccggctagtggagcccggcgcggggcccgctgcggccgcaccgtgaggggaggaggccgaggaggacgcagcgccggctgccggcgggaggaagcgctccaccagggcccccgacggcactcgtttaaccacatccgcgcctctgctggaaacgcttgctggcgcctgtcaccggttccctccattttgaaagggaaaaaggctctccccacccattcccctgcccctaggagctggagccggaggagccgcgctcatggcgttcagcccgtggcagatcctgtcccccgtgcagtgggcgaaatggacgtggtctgcggtacgcggcggggccgccggcgaggacgaggctggcgggcccgagggcgaccccgaggaggaggattcgcaagccgagaccaaatccttgagtttcagctcggattctgaaggtaattttgagactcctgaagctgaaaccccgatccgatcacctttcaaggagtcctgtgatccatcactcggattggcaggacctggggccaaaagccaagaatcacaagaagctgatgaacagcttgtagcagaagtggttgaaaaatgttcatctaagacttgttctaaaccttcagaaaatgaagtgccacagcaggccattgactctcactcagtcaagaatttcagagaagaacctgaacatgattttagcaaaatttccatcgtgaggccattttcaatagaaacgaaggattccacggatatctcggcagtcctcggaacaaaagcagctcatggctgtgtaactgcagtctcaggcaaggctctgccttccagcccgccagacgccctccaggacgaggcgatgacagaaggcagcatgggggtcaccctcgaggcctccgcagaagctgatctaaaagctggcaactcctgtccagagcttgtgcccagcagaagaagcaagctgagaaagcccaagcctgtccccctgaggaagaaagcaattggaggagagttctcagacaccaacgctgctgtggagggcacacctctccccaaggcatcctatcacttcagtcctgaagagttggatgagaacacaagtcctttgctaggagatgccaggttccagaagtctccccctgacattaaagaaactcccggcactctcagtagtgacaccaacgactcaggggttgagctgggggaggagtcgaggagctcacctctcaagcttgagtttgatttcacagaagatacaggaaacatagaggccaggaaagcccttccaaggaagcttggcaggaaactgggtagcacactgactcccaagatacaaaaagatggcatcagtaagtcagcaggtttagaacagcctacagacccagtggcacgagacgggcctctctcccaaacatcttccaagccagatcctagtcagtgggagagccccagcttcaacccctttgggagccactctgttctgcagaactccccacccctctcttctgagggctcctaccactttgacccagataactttgacgaatccatggatccctttaaaccaactacgaccttaacaagcagtgacttttgttctcccactggtaatcacgttaatgaaatcttagaatcacccaagaaggcaaagtcgcgtttaataacgactactgaacaagtgaaatttctctgttttctgttgagtggctgtaaggtgaagaagcatgaaactcagtctctcgccctggatgcatgttctcgggatgaaggggcagtgatctcccagatttcagacatttctaatagggatggccatgctactgatgaggagaaactggcatccacgtcatgtggtcagaaatcagctggtgccgaggtgaaaggtgagccagaggaagacctggagtactttgaatgttccaatgttcctgtgtctaccataaatcatgcgttttcatcctcagaagcaggcatagagaaggagacgtgccagaagatggaagaagacgggtccactgtgcttgggctgctggagtcctctgcagagaaggcccctgtgtcggtgtcctgtggaggtgagagccccctggatgggatctgcctcagcgaatcagacaagacagccgtgctcaccttaataagagaagagataattactaaagagattgaagcaaatgaatggaagaagaaatacgaagagacccggcaagaagttttggagatgaggaaaattgtagctgaatatgaaaagactattgctcaaatgattgaagatgaacaaaggacaagtatgacctctcagaagagcttccagcaactgaccatggagaaggaacaggccctggctgaccttaactctgtggaaaggtccctttctgatctcttcaggagatatgagaacctgaaaggtgttctggaagggttcaagaagaatgaagaagccttgaagaaatgtgctcaggattacttagccagagttaaacaagaggagcagcgataccaggccctgaaaatccacgcagaagagaaactggacaaagccaatgaagagattgctcaggttcgaacaaaagcaaaggctgagagtgcagctctccatgctggactccgcaaagagcagatgaaggtggagtccctggaaagggccctgcagcagaagaaccaagaaattgaagaactgacaaaaatctgtgatgagctgattgcaaagctgggaaagactgactgagacactccccctgttagctcaacagatctgcatttggctgcttctcttgtgaccacaattatcttgccttatccaggaataattgcccctttgcagagaaaaaaaaaaacttaaaaaaagcacatgcctactgctgcctgtcccgctttgctgccaatgcaacagccctggaagaaaccctagagggttgcatagtctagaaaggagtgtgacctgacagtgctggagcctcctagtttccccctatgaaggttcccttaggctgctgagtttgggtttgtgatttatctttagtttgttttaaagtcatctttactttcccaaatgtgttaaatttgtaactcctctttggggtcttctccaccacctgtctgatttttttgtgatctgtttaatcttttaattttttagtatcagtggttttatttaaggagacagtttggcctattgttacttccaatttataatcaagaaggggctctggatccccttttaaattacacacactctcacacacatacatgtatgtttatagatgctgctgctcttttccctgaagcatagtcaagtaagaactgctctacagaaggacatatttccttggatgtgagaccctattttgaaatagagtcctgactcagaacaccaacttaagaatttgggggattaaagatgtgaagaccacagtcttgggttttcatatctggagaagactatttgccatgacgttttgttgccctggtatttggacactcctcagctttaatgggtgtggcccctttagggttagtcctcagactaatgatagtgtctgctttctgcatgaacggcaatatgggactccctccaagctagggtttggcaagtctgccctagagtcatttactctcctctgcctccatttgttaatacagaatcaacatttagtcttcattatctttttttttttttttgagacagagtttcgatctattttaagtatgtgaagaaaatctacttgtaaaaggctcagatcttaattaaaaggtaattgtagcacattaccaattataaggtgaagaaatgtttttttcccaagtgtgatgcattgttcttcagatgttgaaaagaaagcaaaaaataccttctaacttaagacagaatttttaacaaaatgagcagtaaaagtcacatgaaccactccaaaaatcagtgcattttgcatatttttaaacaaagacagcttgttgaatactgagaagaggagtgcaaggagaaggtctgtactaacaaagccaaattcctcaagctcttactggactcagttcagagtggtgggccattaaccccaacatggaatttttccatataaatctcaatgaattccctttcatttgaataggcaaacccaaatccatgcaagtgttttaaagcactgtcctgtcttaatcttacatgctgaaagtcttcatggtgatatgcactatattcagtatacgtatgttttcctacttctcttgtaaaactgttgcatgatccaacttcagcaatgaattgtgcctagtggagaacctctatagatcttaaaaaatgaattattctttagcagtgtattactcacatgggtgcaatctttagccccagggaggtcaataatgtcttttaaagccagaagtcacattttaccaatatgcatttatcataattggtgcttaggctgtatattcaagcctgttgtcttaacattttgtataaaaaagaacaacagaaattatctgtcatttgagaagtggcttgacaatcatttgagctttgaaagcagtcactgtggtgtaatatgaatgctgtcctagtggtcatagtaccaagggcacgtgtctccccttggtataactgatttcctttttagtcctctactgctaaataagttaattttgcattttgcagaaagaaacattgattgctaaatctttttgctgctgtgttttggtgttttcatgtttacttgttttatattgatctgttttaagtatgagaggcttatagtgccctccattgtaaatccatagtcatctttttaagcttattgtgtttaagaaagtagctatgtgttaaacagaggtgatggcagcccttccctagcacactggtggaagagaccccttaagaacctgaccccagtgaatgaagctgatgcacagggagcaccaaaggaccttcgttaagtgataattgtcctggcctctcagccatgaccgttatgaggaaatatcccccattcgaacttaacagatgcctcctctccaaagagaattaaaatcgtagcttgtacagatcaagagaatatactgggcagaatgaagtatgtttgtttatttttctttaaaaataaaggattttggaactctggagagtaagaatatagtatagagtttgcctcaacacatgtgagggccaaataacctgctagctaggcagtaataaactctgttacagaagagaaaaagggccgggcacagtggcttattcctgtaatcccaacactgtggaaggccgaggcaggaggatcacttgagtccaggagtttgaaacctacctaggcaacatggtgaaaccttgtctctaccaaaataaaaattagctgggcatggtggcacgtgcctgtggtcccagctacttgggaggctgaggtgggagcctgggaggtcaaggctgcagtgagccatgatcatgccactgcactccatcctgggtgacagcaagatcttgtctcaaaaaaaaaaaaaaaaaccaggagtgaaaaaggaaagtagaaggcagctgctggcctagatgttggtttgggaatattaggtgatcctgttgagattctggatccagagcaatttctttagcttttgactttgccaaagtgtagatagcctttatccagcagtattttaagtggggaatgcaacgtgaggccaactgaacaattccccccgtggctgcccagatagtcacagtcaaggttggagagtctccttccagccagtgacctacccaaaccttttgttctgtaaaactgctctggaaataccgggaagcccagttttctcacgtggtttctagcttcttcagactcagcccaaattaggaagtgcagaagcacatgatggtgaaaaacctaggatttggcagccttccagaatggtatggaatctgagggaagatttatgtttcgttttggaggatagctcaagttgaattttctttccagccagttaccctttcaacctacccatactttgtacaactcttacacaaatacttagatatttattagatagccctgaattcactctaattataaacagggagtgtaaactgcccccagatgttcctgggctgggtaaaagcagctggagtgaagcactcattttccataaaggtaacaaagggcagctcagtggttactcaagctcaaaagggtttttttaagagcaagcattggttaagtctgtgtatactgagttggaagtgatttcagcacattcttttttagtggagtgaaagttctgaagcccccttttaacttcctcttggtttttcattataattggtagccatctcatgaactgtctctgactgttgtctctttgtggtcatgtgattgtgagcttgctttctgacttgcatttctgactttatcctgttgttaggaagatagaaactaggttttgaaagattacatgattcaagcgagggattttaaagtaaagatgtatttattctgaagaatctaaaagataacagattatttgcttatgaaagaacaatatagtctgggaatcccagaatgtcaagccaaaggtctaagaagtcatctccttcaaatactttaataaagaagtatttcgaggagatatctgtccaaaaaggtttgactggcctccagattccagttatttttaaaaagcaacttaccactaaatccttgagtctccatagagtaacagtaaagaaactgatgtaacagactctcctctcaaaggatctcctctggaagagactatcagcggcagcattctccagggaagacccatcccctagtgccagagcttgcatcctggagactaaagattgcacttttttgtagttttttgtccaaatgcaatcccatttctgtgcctcttagcatgcagttagatttggacaaacaagattcctaaggaatgactttattaactataatatggttacagctattatataaatatatattctggttatagttctaatatggagatgttgtgtgcaatgctggcctgtggtggtctgtgtaatgctttaacttgtatggaggaggccaggctcagagctgagatgtggcctgaaccttccctgtatcgatcctttaatttagaactgtcaagatgtcactttctccccctctgccttttagtggtatctgacatatactcaaaacagtaatttcctggtcacatcattaactgctaattctgtatttataaagaatttatccagtctgggacacgagactaagactcgaagatctaagccattccgcacgactccgcgatgaaccttagagacgaagccgttgtttgctgatgaactacccaagtatatatccactcctcaggtcactttttcagaccgtcgggataaggattaagacatgttcgtttgaatactgcgagcgtagtcagtagatttttctcataattagctccggtgcttgagtatggcagtcaccattgcacacgtctctaggatcctgcta

SEQ ID NO: 302898 - DNA, 6455 bp, Homo sapiens
  misc_feature (227)..(227): n is a, c, g, or t
atcaccatcgccgtgaagtcacagtggcaagatgaaaatgtttaaaaaaattttaaaaaggaataaggaaagaggaagaggacagcgtgccccggctcagaaaacggtcctcctctgccccggacgccggcggacctgtggggtatgaccgaatctccccgcgcagccggcaagccccggccctcagtcgggccgcgaccagcgtgacgccgcggtagggggatccnggcgggcgcgcggccgtcttcaaagccccggcgccgccgccgcccccgcgcgcgcgcgcgagtagtacggtccgagggggcggcttctggggcgcggctccggcggcagctgatgcgcgccccgccggccgggaggcgggagtccgcgagccgggagcgggagcagcagaggtctagcagccgggcgccgcgggccgggggcctgaggaggccacaggacgggcgtcttcccggctagtggagcccggcgcggggcccgctgcggccgcaccgtgaggggaggaggccgaggaggacgcagcgccggctgccggcgggaggaagcgctccaccagggcccccgacggcactcgtttaaccacatccgcgcctctgctggaaacgcttgctggcgcctgtcaccggttccctccattttgaaagggaaaaaggctctccccacccattcccctgcccctaggagctggagccggaggagccgcgctcatggcgttcagcccgtggcagatcctgtcccccgtgcagtgggcgaaatggacgtggtctgcggtacgcggcggggccgccggcgaggacgaggctggcgggcccgagggcgaccccgaggaggaggattcgcaagccgagaccaaatccttgagtttcagctcggattctgaaggtaattttgagactcctgaagctgaaaccccgatccgatcacctttcaaggagtcctgtgatccatcactcggattggcaggacctggggccaaaagccaagaatcacaagaagctgatgaacagcttgtagcagaagtggttgaaaaatgttcatctaagacttgttctaaaccttcagaaaatgaagtgccacagcaggccattgactctcactcagtcaagaatttcagagaagaacctgaacatgattttagcaaaatttccatcgtgaggccattttcaatagaaacgaaggattccacggatatctcggcagtcctcggaacaaaagcagctcatggctgtgtaactgcagtctcaggcaaggctctgccttccagcccgccagacgccctccaggacgaggcgatgacagaaggcagcatgggggtcaccctcgaggcctccgcagaagctgatctaaaagctggcaactcctgtccagagcttgtgcccagcagaagaagcaagctgagaaagcccaagcctgtccccctgaggaagaaagcaattggaggagagttctcagacaccaacgctgctgtggagggcacacctctccccaaggcatcctatcacttcagtcctgaagagttggatgagaacacaagtcctttgctaggagatgccaggttccagaagtctccccctgacattaaagaaactcccggcactctcagtagtgacaccaacgactcaggggttgagctgggggaggagtcgaggagctcacctctcaagcttgagtttgatttcacagaagatacaggaaacatagaggccaggaaagcccttccaaggaagcttggcaggaaactgggtagcacactgactcccaagatacaaaaagatggcatcagtaagtcagcaggtttagaacagcctacagacccagtggcacgagacgggcctctctcccaaacatcttccaagccagatcctagtcagtgggagagccccagcttcaacccctttgggagccactctgttctgcagaactccccacccctctcttctgagggctcctaccactttgacccagataactttgacgaatccatggatccctttaaaccaactacgaccttaacaagcagtgacttttgttctcccactggtaatcacgttaatgaaatcttagaatcacccaagaaggcaaagtcgcgtttaataacgactactgaacaagtgaaatttctctgttttctgttgagtggctgtaaggtgaagaagcatgaaactcagtctctcgccctggatgcatgttctcgggatgaaggggcagtgatctcccagatttcagacatttctaatagggatggccatgctactgatgaggagaaactggcatccacgtcatgtggtcagaaatcagctggtgccgaggtgaaaggtgagccagaggaagacctggagtactttgaatgttccaatgttcctgtgtctaccataaatcatgcgttttcatcctcagaagcaggcatagagaaggagacgtgccagaagatggaagaagacgggtccactgtgcttgggctgctggagtcctctgcagagaaggcccctgtgtcggtgtcctgtggaggtgagagccccctggatgggatctgcctcagcgaatcagacaagacagccgtgctcaccttaataagagaagagataattactaaagagattgaagcaaatgaatggaagaagaaatacgaagagacccggcaagaagttttggagatgaggaaaattgtagctgaatatgaaaagactattgctcaaatgattgaagatgaacaaaggacaagtatgacctctcagaagagcttccagcaactgaccatggagaaggaacaggccctggctgaccttaactctgtggaaaggtccctttctgatctcttcaggagatatgagaacctgaaaggtgttctggaagggttcaagaagaatgaagaagccttgaagaaatgtgctcaggattacttagccagagttaaacaagaggagcagcgataccaggccctgaaaatccacgcagaagagaaactggacaaagccaatgaagagattgctcaggttcgaacaaaagcaaaggctgagagtgcagctctccatgctggactccgcaaagagcagatgaaggtggagtccctggaaagggccctgcagcagaagaaccaagaaattgaagaactgacaaaaatctgtgatgagctgattgcaaagctgggaaagactgactgagacactccccctgttagctcaacagatctgcatttggctgcttctcttgtgaccacaattatcttgccttatccaggaataattgcccctttgcagagaaaaaaaaaaacttaaaaaaagcacatgcctactgctgcctgtcccgctttgctgccaatgcaacagccctggaagaaaccctagagggttgcatagtctagaaaggagtgtgacctgacagtgctggagcctcctagtttccccctatgaaggttcccttaggctgctgagtttgggtttgtgatttatctttagtttgttttaaagtcatctttactttcccaaatgtgttaaatttgtaactcctctttggggtcttctccaccacctgtctgatttttttgtgatctgtttaatcttttaattttttagtatcagtggttttatttaaggagacagtttggcctattgttacttccaatttataatcaagaaggggctctggatccccttttaaattacacacactctcacacacatacatgtatgtttatagatgctgctgctcttttccctgaagcatagtcaagtaagaactgctctacagaaggacatatttccttggatgtgagaccctattttgaaatagagtcctgactcagaacaccaacttaagaatttgggggattaaagatgtgaagaccacagtcttgggttttcatatctggagaagactatttgccatgacgttttgttgccctggtatttggacactcctcagctttaatgggtgtggcccctttagggttagtcctcagactaatgatagtgtctgctttctgcatgaacggcaatatgggactccctccaagctagggtttggcaagtctgccctagagtcatttactctcctctgcctccatttgttaatacagaatcaacatttagtcttcattatctttttttttttttttgagacagagtttcgatctattttaagtatgtgaagaaaatctacttgtaaaaggctcagatcttaattaaaaggtaattgtagcacattaccaattataaggtgaagaaatgtttttttcccaagtgtgatgcattgttcttcagatgttgaaaagaaagcaaaaaataccttctaacttaagacagaatttttaacaaaatgagcagtaaaagtcacatgaaccactccaaaaatcagtgcattttgcatatttttaaacaaagacagcttgttgaatactgagaagaggagtgcaaggagaaggtctgtactaacaaagccaaattcctcaagctcttactggactcagttcagagtggtgggccattaaccccaacatggaatttttccatataaatctcaatgaattccctttcatttgaataggcaaacccaaatccatgcaagtgttttaaagcactgtcctgtcttaatcttacatgctgaaagtcttcatggtgatatgcactatattcagtatacgtatgttttcctacttctcttgtaaaactgttgcatgatccaacttcagcaatgaattgtgcctagtggagaacctctatagatcttaaaaaatgaattattctttagcagtgtattactcacatgggtgcaatctttagccccagggaggtcaataatgtcttttaaagccagaagtcacattttaccaatatgcatttatcataattggtgcttaggctgtatattcaagcctgttgtcttaacattttgtataaaaaagaacaacagaaattatctgtcatttgagaagtggcttgacaatcatttgagctttgaaagcagtcactgtggtgtaatatgaatgctgtcctagtggtcatagtaccaagggcacgtgtctccccttggtataactgatttcctttttagtcctctactgctaaataagttaattttgcattttgcagaaagaaacattgattgctaaatctttttgctgctgtgttttggtgttttcatgtttacttgttttatattgatctgttttaagtatgagaggcttatagtgccctccattgtaaatccatagtcatctttttaagcttattgtgtttaagaaagtagctatgtgttaaacagaggtgatggcagcccttccctagcacactggtggaagagaccccttaagaacctgaccccagtgaatgaagctgatgcacagggagcaccaaaggaccttcgttaagtgataattgtcctggcctctcagccatgaccgttatgaggaaatatcccccattcgaacttaacagatgcctcctctccaaagagaattaaaatcgtagcttgtacagatcaagagaatatactgggcagaatgaagtatgtttgtttatttttctttaaaaataaaggattttggaactctggagagtaagaatatagtatagagtttgcctcaacacatgtgagggccaaataacctgctagctaggcagtaataaactctgttacagaagagaaaaagggccgggcacagtggcttattcctgtaatcccaacactgtggaaggccgaggcaggaggatcacttgagtccaggagtttgaaacctacctaggcaacatggtgaaaccttgtctctaccaaaataaaaattagctgggcatggtggcacgtgcctgtggtcccagctacttgggaggctgaggtgggagcctgggaggtcaaggctgcagtgagccatgatcatgccactgcactccatcctgggtgacagcaagatcttgtctcaaaaaaaaaaaaaaaaaccaggagtgaaaaaggaaagtagaaggcagctgctggcctagatgttggtttgggaatattaggtgatcctgttgagattctggatccagagcaatttctttagcttttgactttgccaaagtgtagatagcctttatccagcagtattttaagtggggaatgcaacgtgaggccaactgaacaattccccccgtggctgcccagatagtcacagtcaaggttggagagtctccttccagccagtgacctacccaaaccttttgttctgtaaaactgctctggaaataccgggaagcccagttttctcacgtggtttctagcttcttcagactcagcccaaattaggaagtgcagaagcacatgatggtgaaaaacctaggatttggcagccttccagaatggtatggaatctgagggaagatttatgtttcgttttggaggatagctcaagttgaattttctttccagccagttaccctttcaacctacctatatcacaatcggggatcctcgaacct

SEQ ID NO: 302899 - DNA, 2304 bp, Homo sapiens
tttggagacggaatcttgctctgtgcactccatcctgggtgacagcaagatcttgtctcaaaaaaaaaaaaaaaaaccaggagtgaaaaaggaaagtagaaggcagctgctggcctagatgttggtttgggaatattaggtgatcctgttgagattctggatccagagcaatttctttagcttttgactttgccaaagtgtagatagcctttatccagcagtattttaagtggggaatgcaacgtgaggccaactgaacaattccccccgtggctgcccagatagtcacagtcaaggttggagagtctccttccagccagtgacctacccaaaccttttgttctgtaaaactgctctggaaataccgggaagcccagttttctcacgtggtttctagcttcttcagactcagcccaaattaggaagtgcagaagcacatgatggtgaaaaacctaggatttggcagccttccagaatggtatggaatctgagggaagatttatgtttcgttttggaggatagctcaagttgaattttctttccagccagttaccctttcaacctacccatactttgtacaactcttacacaaatacttagatatttattagatagccctgaattcactctaattataaacagggagtgtaaactgcccccagatgttcctgggctgggtaaaagcagctggagtgaagcactcattttccataaaggtaacaaagggcagctcagtggttactcaagctcaaaagggtttttttaagagcaagcattggttaagtctgtgtatactgagttggaagtgatttcagcacattcttttttagtggagtgaaagttctgaagcccccttttaacttcctcttggtttttcattataattggtagccatctcatgaactgtctctgactgttgtctctttgtggtcatgtgattgtgagcttgctttctgacttgcatttctgactttatcctgttgttaggaagatagaaactaggttttgaaagattacatgattcaagcgagggattttaaagtaaagatgtatttattctgaagaatctaaaagataacagattatttgcttatgaaagaacaatatagtctgggaatcccagaatgtcaagccaaaggtctaagaagtcatctccttcaaatactttaataaagaagtatttcgaggagatatctgtccaaaaaggtttgactggcctccagattccagttatttttaaaaagcaacttaccactaaatccttgagtctccatagagtaacagtaaagaaactgatgtaacagactctcctctcaaaggatctcctctggaagagactatcagcggcagcattctccagggaagacccatcccctagtgccagagcttgcatcctggagactaaagattgcacttttttgtagttttttgtccaaatgcaatcccatttctgtgcctcttagcatgcagttagatttggacaaacaagattcctaaggaatgactttattaactataatatggttacagctattatataaatatatattctggttatagttctaatatggagatgttgtgtgcaatgctggcctgtggtggtctgtgtaatgctttaacttgtatggaggaggccaggctcagagctgagatgtggcctgaaccttccctgtatcgatcctttaatttagaactgtcaagatgtcactttctccccctctgccttttagtggtatctgacatatactcaaaacagtaatttcctggtcacatcattaactgctaattctgtatttataaagaattttcagatggacatgtacaaatttgaactcaaaccatccccagtccagatacagggcagcgtgtaggtgaccacaccagagcctcagcctcggtccttctcagccgtcgggataggatccaggcatttcttttaaatctcagaggtagcagtaaacttttcagtattgctgttagcaagtgtgtgtttgccaatagatacccattatactaatgtgccaagtaaatgttcattgcacatctgcttccactgtgttcccacgggtgccatgaagtgtgtgaggagcccctcatctggagggatgagtgctgcgttgactactgctatcaggattgtgttgtgtggaatattcatctacataaattttatatgcacagtaatttccctttttatatgtcaagtaactatttgtaaaagttatactcacaaattattataatgattactaatatattttttccatgtttcattgcctgaataaaaactgtttaccactgtta

SEQ ID NO: 302900 - DNA, 2102 bp, Homo sapiens
gtaaaactgggcttcccggtatttccagagcagttttacagaacaaaaggtttgggtaggtcacatggctggaaggagactctccaaccttgactgtgactatctgggcagccacggggggaatgttcagttggcctcacgttgcattccccacttaaaataccgggaagcccagttttctcacgtggtttctagcttcttcagactcagcccaaattaggaagtgcagaagcacatgatggtgaaaaacctaggatttggcagccttccagaatggtatggaatctgagggaagatttatgtttcgttttggaggatagctcaagttgaattttctttccagccagttaccctttcaacctacccatactttgtacaactcttacacaaatacttagatatttattagatagccctgaattcactctaattataaacagggagtgtaaactgcccccagatgttcctgggctgggtaaaagcagctggagtgaagcactcattttccataaaggtaacaaagggcagctcagtggttactcaagctcaaaagggtttttttaagagcaagcattggttaagtctgtgtatactgagttggaagtgatttcagcacattcttttttagtggagtgaaagttctgaagcccccttttaacttcctcttggtttttcattataattggtagccatctcatgaactgtctctgactgttgtctctttgtggtcatgtgattgtgagcttgctttctgacttgcatttctgactttatcctgttgttaggaagatagaaactaggttttgaaagattacatgattcaagcgagggattttaaagtaaagatgtatttattctgaagaatctaaaagataacagattatttgcttatgaaagaacaatatagtctgggaatcccagaatgtcaagccaaaggtctaagaagtcatctccttcaaatactttaataaagaagtatttcgaggagatatctgtccaaaaaggtttgactggcctccagattccagttatttttaaaaagcaacttaccactaaatccttgagtctccatagagtaacagtaaagaaactgatgtaacagactctcctctcaaaggatctcctctggaagagactatcagcggcagcattctccagggaagacccatcccctagtgccagagcttgcatcctggagactaaagattgcacttttttgtagttttttgtccaaatgcaatcccatttctgtgcctcttagcatgcagttagatttggacaaacaagattcctaaggaatgactttattaactataatatggttacagctattatataaatatatattctggttatagttctaatatggagatgttgtgtgcaatgctggcctgtggtggtctgtgtaatgctttaacttgtatggaggaggccaggctcagagctgagatgtggcctgaaccttccctgtatcgatcctttaatttagaactgtcaagatgtcactttctccccctctgccttttagtggtatctgacatatactcaaaacagtaatttcctggtcacatcattaactgctaattctgtatttataaagaattttcagatggacatgtacaaatttgaactcaaaccatccccagtccagatacagggcagcgtgtaggtgaccacaccagagcctcagcctcggtccttctcagccgtcgggataggatccaggcatttcttttaaatctcagaggtagcagtaaacttttcagtattgctgttagcaagtgtgtgtttgccaatagatacccattatactaatgtgccaagtaaatgttcattgcacatctgcttccactgtgttcccacgggtgccatgaagtgtgtgaggagcccctcatctggagggatgagtgctgcgttgactactgctatcaggattgtgttgtgtggaatattcatctacataaattttatatgcacagtaatttccctttttatatgtcaagtaactatttgtaaaagttatactcacaaattattataatgattactaatatattttttccatgtttcattgcctgaataaaaactgtttaccactgtta

SEQ ID NO: 302901 - DNA, 1018 bp, Homo sapiens
acatgatagccatgagatgttggaaggggcatgagatgttggaaggagcaatgagatgtaggaaggccttccaacatagacccatcccctagtgccagagcttgcatcctggagactaaagattgcacttttttgtagttttttgtccaaatgcaatcccatttctgtgcctcttagcatgcagttagatttggacaaacaagattcctaaggaatgactttattaactataatatggttacagctattatataaatatatattctggttatagttctaatatggagatgttgtgtgcaatgctggcctgtggtggtctgtgtaatgctttaacttgtatggaggaggccaggctcagagctgagatgtggcctgaaccttccctgtatcgatcctttaatttagaactgtcaagatgtcactttctccccctctgccttttagtggtatctgacatatactcaaaacagtaatttcctggtcacatcattaactgctaattctgtatttataaagaattttcagatggacatgtacaaatttgaactcaaaccatccccagtccagatacagggcagcgtgtaggtgaccacaccagagcctcagcctcggtccttctcagccgtcgggataggatccaggcatttcttttaaatctcagaggtagcagtaaacttttcagtattgctgttagcaagtgtgtgtttgccaatagatacccattatactaatgtgccaagtaaatgttcattgcacatctgcttccactgtgttcccacgggtgccatgaagtgtgtgaggagcccctcatctggagggatgagtgctgcgttgactactgctatcaggattgtgttgtgtggaatattcatctacataaattttatatgcacagtaatttccctttttatatgtcaagtaactatttgtaaaagttatactcacaaattattataatgattactaatatattttttccatgtttcattgcctgaataaaaactgtttaccactgtta

SEQ ID NO: 302902 - DNA, 5531 bp, Homo sapiens
  misc_feature (227)..(227): n is a, c, g, or t
atcaccatcgccgtgaagtcacagtggcaagatgaaaatgtttaaaaaaattttaaaaaggaataaggaaagaggaagaggacagcgtgccccggctcagaaaacggtcctcctctgccccggacgccggcggacctgtggggtatgaccgaatctccccgcgcagccggcaagccccggccctcagtcgggccgcgaccagcgtgacgccgcggtagggggatccnggcgggcgcgcggccgtcttcaaagccccggcgccgccgccgcccccgcgcgcgcgcgcgagtagtacggtccgagggggcggcttctggggcgcggctccggcggcagctgatgcgcgccccgccggccgggaggcgggagtccgcgagccgggagcgggagcagcagaggtctagcagccgggcgccgcgggccgggggcctgaggaggccacaggacgggcgtcttcccggctagtggagcccggcgcggggcccgctgcggccgcaccgtgaggggaggaggccgaggaggacgcagcgccggctgccggcgggaggaagcgctccaccagggcccccgacggcactcgtttaaccacatccgcgcctctgctggaaacgcttgctggcgcctgtcaccggttccctccattttgaaagggaaaaaggctctccccacccattcccctgcccctaggagctggagccggaggagccgcgctcatggcgttcagcccgtggcagatcctgtcccccgtgcagtgggcgaaatggacgtggtctgcggtacgcggcggggccgccggcgaggacgaggctggcgggcccgagggcgaccccgaggaggaggattcgcaagccgagaccaaatccttgagtttcagctcggattctgaaggtaattttgagactcctgaagctgaaaccccgatccgatcacctttcaaggagtcctgtgatccatcactcggattggcaggacctggggccaaaagccaagaatcacaagaagctgatgaacagcttgtagcagaagtggttgaaaaatgttcatctaagacttgttctaaaccttcagaaaatgaagtgccacagcaggccattgactctcactcagtcaagaatttcagagaagaacctgaacatgattttagcaaaatttccatcgtgaggccattttcaatagaaacgaaggattccacggatatctcggcagtcctcggaacaaaagcagctcatggctgtgtaactgcagtctcaggcaaggctctgccttccagcccgccagacgccctccaggacgaggcgatgacagaaggcagcatgggggtcaccctcgaggcctccgcagaagctgatctaaaagctggcaactcctgtccagagcttgtgcccagcagaagaagcaagctgagaaagcccaagcctgtccccctgaggaagaaagcaattggaggagagttctcagacaccaacgctgctgtggagggcacacctctccccaaggcatcctatcacttcagtcctgaagagttggatgagaacacaagtcctttgctaggagatgccaggttccagaagtctccccctgacattaaagaaactcccggcactctcagtagtgacaccaacgactcaggggttgagctgggggaggagtcgaggagctcacctctcaagcttgagtttgatttcacagaagatacaggaaacatagaggccaggaaagcccttccaaggaagcttggcaggaaactgggtagcacactgactcccaagatacaaaaagatggcatcagtaagtcagcaggtttagaacagcctacagacccagtggcacgagacgggcctctctcccaaacatcttccaagccagatcctagtcagtgggagagccccagcttcaacccctttgggagccactctgttctgcagaactccccacccctctcttctgagggctcctaccactttgacccagataactttgacgaatccatggatccctttaaaccaactacgaccttaacaagcagtgacttttgttctcccactggtaatcacgttaatgaaatcttagaatcacccaagaaggcaaagtcgcgtttaataacgagtggctgtaaggtgaagaagcatgaaactcagtctctcgccctggatgcatgttctcgggatgaaggggcagtgatctcccagatttcagacatttctaatagggatggccatgctactgatgaggagaaactggcatccacgtcatgtggtcagaaatcagctggtgccgaggtgaaaggtgagccagaggaagacctggagtactttgaatgttccaatgttcctgtgtctaccataaatcatgcgttttcatcctcagaagcaggcatagagaaggagacgtgccagaagatggaagaagacgggtccactgtgcttgggctgctggagtcctctgcagagaaggcccctgtgtcggtgtcctgtggaggtgagagccccctggatgggatctgcctcagcgaatcagacaagacagccgtgctcaccttaataagagaagagataattactaaagagattgaagcaaatgaatggaagaagaaatacgaagagacccggcaagaagttttggagatgaggaaaattgtagctgaatatgaaaagactattgctcaaatgattgaagatgaacaaaggacaagtatgacctctcagaagagcttccagcaactgaccatggagaaggaacaggccctggctgaccttaactctgtggaaaggtccctttctgatctcttcaggagatatgagaacctgaaaggtgttctggaagggttcaagaagaatgaagaagccttgaagaaatgtgctcaggattacttagccagagttaaacaagaggagcagcgataccaggccctgaaaatccacgcagaagagaaactggacaaagccaatgaagagattgctcaggttcgaacaaaagcaaaggctgagagtgcagctctccatgctggactccgcaaagagcagatgaaggtggagtccctggaaagggccctgcagcagaagaaccaagaaattgaagaactgacaaaaatctgtgatgagctgattgcaaagctgggaaagactgactgagacactccccctgttagctcaacagatctgcatttggctgcttctcttgtgaccacaattatcttgccttatccaggaataattgcccctttgcagagaaaaaaaaaaacttaaaaaaagcacatgcctactgctgcctgtcccgctttgctgccaatgcaacagccctggaagaaaccctagagggttgcatagtctagaaaggagtgtgacctgacagtgctggagcctcctagtttccccctatgaaggttcccttaggctgctgagtttgggtttgtgatttatctttagtttgttttaaagtcatctttactttcccaaatgtgttaaatttgtaactcctctttggggtcttctccaccacctgtctgatttttttgtgatctgtttaatcttttaattttttagtatcagtggttttatttaaggagacagtttggcctattgttacttccaatttataatcaagaaggggctctggatccccttttaaattacacacactctcacacacatacatgtatgtttatagatgctgctgctcttttccctgaagcatagtcaagtaagaactgctctacagaaggacatatttccttggatgtgagaccctattttgaaatagagtcctgactcagaacaccaacttaagaatttgggggattaaagatgtgaagaccacagtcttgggttttcatatctggagaagactatttgccatgacgttttgttgccctggtatttggacactcctcagctttaatgggtgtggcccctttagggttagtcctcagactaatgatagtgtctgctttctgcatgaacggcaatatgggactccctccaagctagggtttggcaagtctgccctagagtcatttactctcctctgcctccatttgttaatacagaatcaacatttagtcttcattatctttttttttttttttgagacagagtttcgatctattttaagtatgtgaagaaaatctacttgtaaaaggctcagatcttaattaaaaggtaattgtagcacattaccaattataaggtgaagaaatgtttttttcccaagtgtgatgcattgttcttcagatgttgaaaagaaagcaaaaaataccttctaacttaagacagaatttttaacaaaatgagcagtaaaagtcacatgaaccactccaaaaatcagtgcattttgcatatttttaaacaaagacagcttgttgaatactgagaagaggagtgcaaggagaaggtctgtactaacaaagccaaattcctcaagctcttactggactcagttcagagtggtgggccattaaccccaacatggaatttttccatataaatctcaatgaattccctttcatttgaataggcaaacccaaatccatgcaagtgttttaaagcactgtcctgtcttaatcttacatgctgaaagtcttcatggtgatatgcactatattcagtatacgtatgttttcctacttctcttgtaaaactgttgcatgatccaacttcagcaatgaattgtgcctagtggagaacctctatagatcttaaaaaatgaattattctttagcagtgtattactcacatgggtgcaatctttagccccagggaggtcaataatgtcttttaaagccagaagtcacattttaccaatatgcatttatcataattggtgcttaggctgtatattcaagcctgttgtcttaacattttgtataaaaaagaacaacagaaattatctgtcatttgagaagtggcttgacaatcatttgagctttgaaagcagtcactgtggtgtaatatgaatgctgtcctagtggtcatagtaccaagggcacgtgtctccccttggtataactgatttcctttttagtcctctactgctaaataagttaattttgcattttgcagaaagaaacattgattgctaaatctttttgctgctgtgttttggtgttttcatgtttacttgttttatattgatctgttttaagtatgagaggcttatagtgccctccattgtaaatccatagtcatctttttaagcttattgtgtttaagaaagtagctatgtgttaaacagaggtgatggcagcccttccctagcacactggtggaagagaccccttaagaacctgaccccagtgaatgaagctgatgcacagggagcaccaaaggaccttcgttaagtgataattgtcctggcctctcagccatgaccgttatgaggaaatatcccccattcgaacttaacagatgcctcctctccaaagagaattaaaatcgtagcttgtacagatcaagagaatatactgggcagaatgaagtatgtttgtttatttttctttaaaagggccaatatctgctactagcagtataaacttg

SEQ ID NO: 302903 - DNA, 3517 bp, Homo sapiens
  misc_feature (227)..(227): n is a, c, g, or t
atcaccatcgccgtgaagtcacagtggcaagatgaaaatgtttaaaaaaattttaaaaaggaataaggaaagaggaagaggacagcgtgccccggctcagaaaacggtcctcctctgccccggacgccggcggacctgtggggtatgaccgaatctccccgcgcagccggcaagccccggccctcagtcgggccgcgaccagcgtgacgccgcggtagggggatccnggcgggcgcgcggccgtcttcaaagccccggcgccgccgccgcccccgcgcgcgcgcgcgagtagtacggtccgagggggcggcttctggggcgcggctccggcggcagctgatgcgcgccccgccggccgggaggcgggagtccgcgagccgggagcgggagcagcagaggtctagcagccgggcgccgcgggccgggggcctgaggaggccacaggacgggcgtcttcccggctagtggagcccggcgcggggcccgctgcggccgcaccgtgaggggaggaggccgaggaggacgcagcgccggctgccggcgggaggaagcgctccaccagggcccccgacggcactcgtttaaccacatccgcgcctctgctggaaacgcttgctggcgcctgtcaccggttccctccattttgaaagggaaaaaggctctccccacccattcccctgcccctaggagctggagccggaggagccgcgctcatggcgttcagcccgtggcagatcctgtcccccgtgcagtgggcgaaatggacgtggtctgcggtacgcggcggggccgccggcgaggacgaggctggcgggcccgagggcgaccccgaggaggaggattcgcaagccgagaccaaatccttgagtttcagctcggattctgaaggtaattttgagactcctgaagctgaaaccccgatccgatcacctttcaaggagtcctgtgatccatcactcggattggcaggacctggggccaaaagccaagaatcacaagaagctgatgaacagcttgtagcagaagtggttgaaaaatgttcatctaagacttgttctaaaccttcagaaaatgaagtgccacagcaggccattgactctcactcagtcaagaatttcagagaagaacctgaacatgattttagcaaaatttccatcgtgaggccattttcaatagaaacgaaggattccacggatatctcggcagtcctcggaacaaaagcagctcatggctgtgtaactgcagtctcaggcaaggctctgccttccagcccgccagacgccctccaggacgaggcgatgacagaaggcagcatgggggtcaccctcgaggcctccgcagaagctgatctaaaagctggcaactcctgtccagagcttgtgcccagcagaagaagcaagctgagaaagcccaagcctgtccccctgaggaagaaagcaattggaggagagttctcagacaccaacgctgctgtggagggcacacctctccccaaggcatcctatcacttcagtcctgaagagttggatgagaacacaagtcctttgctaggagatgccaggttccagaagtctccccctgacattaaagaaactcccggcactctcagtagtgacaccaacgactcaggggttgagctgggggaggagtcgaggagctcacctctcaagcttgagtttgatttcacagaagatacaggaaacatagaggccaggaaagcccttccaaggaagcttggcaggaaactgggtagcacactgactcccaagatacaaaaagatggcatcagtaagtcagcaggtttagaacagcctacagacccagtggcacgagacgggcctctctcccaaacatcttccaagccagatcctagtcagtgggagagccccagcttcaacccctttgggagccactctgttctgcagaactccccacccctctcttctgagggctcctaccactttgacccagataactttgacgaatccatggatccctttaaaccaactacgaccttaacaagcagtgacttttgttctcccactggtaatcacgttaatgaaatcttagaatcacccaagaaggcaaagtcgcgtttaataacgagtggctgtaaggtgaagaagcatgaaactcagtctctcgccctggatgcatgttctcgggatgaaggggcagtgatctcccagatttcagacatttctaatagggatggccatgctactgatgaggagaaactggcatccacgtcatgtggtcagaaatcagctggtgccgaggtgaaaggtgagccagaggaagacctggagtactttgaatgttccaatgttcctgtgtctaccataaatcatgcgttttcatcctcagaagcaggcatagagaaggagacgtgccagaagatggaagaagacgggtccactgtgcttgggctgctggagtcctctgcagagaaggcccctgtgtcggtgtcctgtggaggtgagagccccctggatgggatctgcctcagcgaatcagacaagacagccgtgctcaccttaataagagaagagataattactaaagagattgaagcaaatgaatggaagaagaaatacgaagagacccggcaagaagttttggagatgaggaaaattgtagctgaatatgaaaagactattgctcaaatgattgaagatgaacaaaggacaagtatgacctctcagaagagcttccagcaactgaccatggagaaggaacaggccctggctgaccttaactctgtggaaaggtccctttctgatctcttcaggagatatgagaacctgaaaggtgttctggaagggttcaagaagaatgaagaagccttgaagaaatgtgctcaggattacttagccagagttaaacaagaggagcagcgataccaggccctgaaaatccacgcagaagagaaactggacaaagccaatgaagagattgctcaggttcgaacaaaagcaaaggctgagagtgcagctctccatgctggactccgcaaagagcagatgaaggtggagtccctggaaagggccctgcagcagaagaaccaagaaattgaagaactgacaaaaatctgtgatgagctgattgcaaagctgggaaagactgactgagacactccccctgttagctcaacagatctgcatttggctgcttctcttgtgaccacaattatcttgccttatccaggaataattgcccctttgcagagaaaaaaaaaaacttaaaaaaagcacatgcctactgctgcctgtcccgctttgctgccaatgcaacagccctggaagaaaccctagagggttgcatagtctagaaaggagtgtgacctgacagtgctggagcctcctagtttccccctatgaaggttcccttaggctgctgagtttgggtttgtgatttatctttagtttgttttaaagtcatctttactttcccaaatgtgttaaatttgtaaccgctcaggtgtggtccctagtcacgacgtttgtttaatctgact

SEQ ID NO: 302904 - DNA, 3244 bp, Homo sapiens
  misc_feature (227)..(227): n is a, c, g, or t
  misc_feature (3224)..(3224): n is a, c, g, or t
  misc_feature (3231)..(3231): n is a, c, g, or t
  misc_feature (3235)..(3235): n is a, c, g, or t
atcaccatcgccgtgaagtcacagtggcaagatgaaaatgtttaaaaaaattttaaaaaggaataaggaaagaggaagaggacagcgtgccccggctcagaaaacggtcctcctctgccccggacgccggcggacctgtggggtatgaccgaatctccccgcgcagccggcaagccccggccctcagtcgggccgcgaccagcgtgacgccgcggtagggggatccnggcgggcgcgcggccgtcttcaaagccccggcgccgccgccgcccccgcgcgcgcgcgcgagtagtacggtccgagggggcggcttctggggcgcggctccggcggcagctgatgcgcgccccgccggccgggaggcgggagtccgcgagccgggagcgggagcagcagaggtctagcagccgggcgccgcgggccgggggcctgaggaggccacaggacgggcgtcttcccggctagtggagcccggcgcggggcccgctgcggccgcaccgtgaggggaggaggccgaggaggacgcagcgccggctgccggcgggaggaagcgctccaccagggcccccgacggcactcgtttaaccacatccgcgcctctgctggaaacgcttgctggcgcctgtcaccggttccctccattttgaaagggaaaaaggctctccccacccattcccctgcccctaggagctggagccggaggagccgcgctcatggcgttcagcccgtggcagatcctgtcccccgtgcagtgggcgaaatggacgtggtctgcggtacgcggcggggccgccggcgaggacgaggctggcgggcccgagggcgaccccgaggaggaggattcgcaagccgagaccaaatccttgagtttcagctcggattctgaaggtaattttgagactcctgaagctgaaaccccgatccgatcacctttcaaggagtcctgtgatccatcactcggattggcaggacctggggccaaaagccaagaatcacaagaagctgatgaacagcttgtagcagaagtggttgaaaaatgttcatctaagacttgttctaaaccttcagaaaatgaagtgccacagcaggccattgactctcactcagtcaagaatttcagagaagaacctgaacatgattttagcaaaatttccatcgtgaggccattttcaatagaaacgaaggattccacggatatctcggcagtcctcggaacaaaagcagctcatggctgtgtaactgcagtctcaggcaaggctctgccttccagcccgccagacgccctccaggacgaggcgatgacagaaggcagcatgggggtcaccctcgaggcctccgcagaagctgatctaaaagctggcaactcctgtccagagcttgtgcccagcagaagaagcaagctgagaaagcccaagcctgtccccctgaggaagaaagcaattggaggagagttctcagacaccaacgctgctgtggagggcacacctctccccaaggcatcctatcacttcagtcctgaagagttggatgagaacacaagtcctttgctaggagatgccaggttccagaagtctccccctgacattaaagaaactcccggcactctcagtagtgacaccaacgactcaggggttgagctgggggaggagtcgaggagctcacctctcaagcttgagtttgatttcacagaagatacaggaaacatagaggccaggaaagcccttccaaggaagcttggcaggaaactgggtagcacactgactcccaagatacaaaaagatggcatcagtaagtcagcaggtttagaacagcctacagacccagtggcacgagacgggcctctctcccaaacatcttccaagccagatcctagtcagtgggagagccccagcttcaacccctttgggagccactctgttctgcagaactccccacccctctcttctgagggctcctaccactttgacccagataactttgacgaatccatggatccctttaaaccaactacgaccttaacaagcagtgacttttgttctcccactggtaatcacgttaatgaaatcttagaatcacccaagaaggcaaagtcgcgtttaataacgagtggctgtaaggtgaagaagcatgaaactcagtctctcgccctggatgcatgttctcgggatgaaggggcagtgatctcccagatttcagacatttctaatagggatggccatgctactgatgaggagaaactggcatccacgtcatgtggtcagaaatcagctggtgccgaggtgaaaggtgagccagaggaagacctggagtactttgaatgttccaatgttcctgtgtctaccataaatcatgcgttttcatcctcagaagcaggcatagagaaggagacgtgccagaagatggaagaagacgggtccactgtgcttgggctgctggagtcctctgcagagaaggcccctgtgtcggtgtcctgtggaggtgagagccccctggatgggatctgcctcagcgaatcagacaagacagccgtgctcaccttaataagagaagagataattactaaagagattgaagcaaatgaatggaagaagaaatacgaagagacccggcaagaagttttggagatgaggaaaattgtagctgaatatgaaaagactattgctcaaatgattgaagatgaacaaaggacaagtatgacctctcagaagagcttccagcaactgaccatggagaaggaacaggccctggctgaccttaactctgtggaaaggtccctttctgatctcttcaggagatatgagaacctgaaaggtgttctggaagggttcaagaagaatgaagaagccttgaagaaatgtgctcaggattacttagccagagttaaacaagaggagcagcgataccaggccctgaaaatccacgcagaagagaaactggacaaagccaatgaagagattgctcaggttcgaacaaaagcaaaggctgagagtgcagctctccatgctggactccgcaaagagcagatgaaggtggagtccctggaaagggccctgcagcagaagaaccaagaaattgaagaactgacaaaaatctgtgatgagctgattgcaaagctgggaaagactgactgagacactccccctgttagctcaacagatctgcatttggctgcttctcttgtgaccacaattatcttgccttatccaggaataattgcccctttngtctccntccntctggtacc

SEQ ID NO: 302905 - DNA, 2674 bp, Homo sapiens
  misc_feature (227)..(227): n is a, c, g, or t
atcaccatcgccgtgaagtcacagtggcaagatgaaaatgtttaaaaaaattttaaaaaggaataaggaaagaggaagaggacagcgtgccccggctcagaaaacggtcctcctctgccccggacgccggcggacctgtggggtatgaccgaatctccccgcgcagccggcaagccccggccctcagtcgggccgcgaccagcgtgacgccgcggtagggggatccnggcgggcgcgcggccgtcttcaaagccccggcgccgccgccgcccccgcgcgcgcgcgcgagtagtacggtccgagggggcggcttctggggcgcggctccggcggcagctgatgcgcgccccgccggccgggaggcgggagtccgcgagccgggagcgggagcagcagaggtctagcagccgggcgccgcgggccgggggcctgaggaggccacaggacgggcgtcttcccggctagtggagcccggcgcggggcccgctgcggccgcaccgtgaggggaggaggccgaggaggacgcagcgccggctgccggcgggaggaagcgctccaccagggcccccgacggcactcgtttaaccacatccgcgcctctgctggaaacgcttgctggcgcctgtcaccggttccctccattttgaaagggaaaaaggctctccccacccattcccctgcccctaggagctggagccggaggagccgcgctcatggcgttcagcccgtggcagatcctgtcccccgtgcagtgggcgaaatggacgtggtctgcggtacgcggcggggccgccggcgaggacgaggctggcgggcccgagggcgaccccgaggaggaggattcgcaagccgagaccaaatccttgagtttcagctcggattctgaaggtaattttgagactcctgaagctgaaaccccgatccgatcacctttcaaggagtcctgtgatccatcactcggattggcaggacctggggccaaaagccaagaatcacaagaagctgatgaacagcttgtagcagaagtggttgaaaaatgttcatctaagacttgttctaaaccttcagaaaatgaagtgccacagcaggccattgactctcactcagtcaagaatttcagagaagaacctgaacatgattttagcaaaatttccatcgtgaggccattttcaatagaaacgaaggattccacggatatctcggcagtcctcggaacaaaagcagctcatggctgtgtaactgcagtctcaggcaaggctctgccttccagcccgccagacgccctccaggacgaggcgatgacagaaggcagcatgggggtcaccctcgaggcctccgcagaagctgatctaaaagctggcaactcctgtccagagcttgtgcccagcagaagaagcaagctgagaaagcccaagcctgtccccctgaggaagaaagcaattggaggagagttctcagacaccaacgctgctgtggagggcacacctctccccaaggcatcctatcacttcagtcctgaagagttggatgagaacacaagtcctttgctaggagatgccaggttccagaagtctccccctgacattaaagaaactcccggcactctcagtagtgacaccaacgactcaggggttgagctgggggaggagtcgaggagctcacctctcaagcttgagtttgatttcacagaagatacaggaaacatagaggccaggaaagcccttccaaggaagcttggcaggaaactgggtagcacactgactcccaagatacaaaaagatggcatcagtaagtcagcaggtttagaacagcctacagacccagtggcacgagacgggcctctctcccaaacatcttccaagccagatcctagtcagtgggagagccccagcttcaacccctttgggagccactctgttctgcagaactccccacccctctcttctgagggctcctaccactttgacccagataactttgacgaatccatggatccctttaaaccaactacgaccttaacaagcagtgacttttgttctcccactggtaatcacgttaatgaaatcttagaatcacccaagaaggcaaagtcgcgtttaataacgagtggctgtaaggtgaagaagcatgaaactcagtctctcgccctggatgcatgttctcgggatgaaggggcagtgatctcccagatttcagacatttctaatagggatggccatgctactgatgaggagaaactggcatccacgtcatgtggtcagaaatcagctggtgccgaggtgaaaggcatagagaaggagacgtgccagaagatggaagaagacgggtccactgtgcttgggctgctggagtcctctgcagagaaggcccctgtgtcggtgtcctgtggaggtgagagccccctggatgggatctgcctcagcgaatcagacaagacagccgtgctcaccttaataagagaagagatccactaatgtagcttaaggttattagatttgggcttttaatcatggaataatcttatgtattggtgtaagagttgatgaatgactttagctgtgtgaatatataatagtcaaactgcaaacattttgcatcccttttgtgacctaatttacagacatttaaattgtgttgcagttctgctttgccgtttaataaaaagctatttcag

SEQ ID NO: 302906 - DNA, 2673 bp, Homo sapiens
  misc_feature (227)..(227): n is a, c, g, or t
atcaccatcgccgtgaagtcacagtggcaagatgaaaatgtttaaaaaaattttaaaaaggaataaggaaagaggaagaggacagcgtgccccggctcagaaaacggtcctcctctgccccggacgccggcggacctgtggggtatgaccgaatctccccgcgcagccggcaagccccggccctcagtcgggccgcgaccagcgtgacgccgcggtagggggatccnggcgggcgcgcggccgtcttcaaagccccggcgccgccgccgcccccgcgcgcgcgcgcgagtagtacggtccgagggggcggcttctggggcgcggctccggcggcagctgatgcgcgccccgccggccgggaggcgggagtccgcgagccgggagcgggagcagcagaggtctagcagccgggcgccgcgggccgggggcctgaggaggccacaggacgggcgtcttcccggctagtggagcccggcgcggggcccgctgcggccgcaccgtgaggggaggaggccgaggaggacgcagcgccggctgccggcgggaggaagcgctccaccagggcccccgacggcactcgtttaaccacatccgcgcctctgctggaaacgcttgctggcgcctgtcaccggttccctccattttgaaagggaaaaaggctctccccacccattcccctgcccctaggagctggagccggaggagccgcgctcatggcgttcagcccgtggcagatcctgtcccccgtgcagtgggcgaaatggacgtggtctgcggtacgcggcggggccgccggcgaggacgaggctggcgggcccgagggcgaccccgaggaggaggattcgcaagccgagaccaaatccttgagtttcagctcggattctgaaggtaattttgagactcctgaagctgaaaccccgatccgatcacctttcaaggagtcctgtgatccatcactcggattggcaggacctggggccaaaagccaagaatcacaagaagctgatgaacagcttgtagcagaagtggttgaaaaatgttcatctaagacttgttctaaaccttcagaaaatgaagtgccacagcaggccattgactctcactcagtcaagaatttcagagaagaacctgaacatgattttagcaaaatttccatcgtgaggccattttcaatagaaacgaaggattccacggatatctcggcagtcctcggaacaaaagcagctcatggctgtgtaactgcagtctcaggcaaggctctgccttccagcccgccagacgccctccaggacgaggcgatgacagaaggcagcatgggggtcaccctcgaggcctccgcagaagctgatctaaaagctggcaactcctgtccagagcttgtgcccagcagaagaagcaagctgagaaagcccaagcctgtccccctgaggaagaaagcaattggaggagagttctcagacaccaacgctgctgtggagggcacacctctccccaaggcatcctatcacttcagtcctgaagagttggatgagaacacaagtcctttgctaggagatgccaggttccagaagtctccccctgacattaaagaaactcccggcactctcagtagtgacaccaacgactcaggggttgagctgggggaggagtcgaggagctcacctctcaagcttgagtttgatttcacagaagatacaggaaacatagaggccaggaaagcccttccaaggaagcttggcaggaaactgggtagcacactgactcccaagatacaaaaagatggcatcagtaagtcagcaggtttagaacagcctacagacccagtggcacgagacgggcctctctcccaaacatcttccaagccagatcctagtcagtgggagagccccagcttcaacccctttgggagccactctgttctgcagaactccccacccctctcttctgagggctcctaccactttgacccagataactttgacgaatccatggatccctttaaaccaactacgaccttaacaagcagtgacttttgttctcccactggtaatcacgttaatgaaatcttagaatcacccaagaaggcaaagtcgcgtttaataacgactactgaacaagtgaaatttctctgttttctgttgtaagtactcctgctgtttctttagtccctgggaccgttggcagtttcctctctcccctcccccagccatctctccatagcatgtttgcttctaattctgagtttgatcttctgatgatttttttgcatttcatcagtcacttcatgagtcagcttagccttgcagttgtccatacctaagggagtggggcttggcctttacaccttaggtgctagagcttgcactccctggcttggcaggtgtcacgtggcgctttgacaataccaaaagctggcttggccccaagatcatcacagcagtggtttgagggactgttctgctatttaatattggaaatcattggcttttttggtagcataaagctactggcttggaacagttaataaattttactgagtcagctcaacttgagtttggtggcagagggtagcactcagtaagaagattagggaaagaagatcatgaactagtgattatgcacattccggtaacttatgtgcttgtctttgtattttttctcacaaaagaaaaa

SEQ ID NO: 302907 - DNA, 2304 bp, Homo sapiens
  misc_feature (227)..(227): n is a, c, g, or t
atcaccatcgccgtgaagtcacagtggcaagatgaaaatgtttaaaaaaattttaaaaaggaataaggaaagaggaagaggacagcgtgccccggctcagaaaacggtcctcctctgccccggacgccggcggacctgtggggtatgaccgaatctccccgcgcagccggcaagccccggccctcagtcgggccgcgaccagcgtgacgccgcggtagggggatccnggcgggcgcgcggccgtcttcaaagccccggcgccgccgccgcccccgcgcgcgcgcgcgagtagtacggtccgagggggcggcttctggggcgcggctccggcggcagctgatgcgcgccccgccggccgggaggcgggagtccgcgagccgggagcgggagcagcagaggtctagcagccgggcgccgcgggccgggggcctgaggaggccacaggacgggcgtcttcccggctagtggagcccggcgcggggcccgctgcggccgcaccgtgaggggaggaggccgaggaggacgcagcgccggctgccggcgggaggaagcgctccaccagggcccccgacggcactcgtttaaccacatccgcgcctctgctggaaacgcttgctggcgcctgtcaccggttccctccattttgaaagggaaaaaggctctccccacccattcccctgcccctaggagctggagccggaggagccgcgctcatggcgttcagcccgtggcagatcctgtcccccgtgcagtgggcgaaatggacgtggtctgcggtacgcggcggggccgccggcgaggacgaggctggcgggcccgagggcgaccccgaggaggaggattcgcaagccgagaccaaatccttgagtttcagctcggattctgaaggtaattttgagactcctgaagctgaaaccccgatccgatcacctttcaaggagtcctgtgatccatcactcggattggcaggacctggggccaaaagccaagaatcacaagaagctgatgaacagcttgtagcagaagtggttgaaaaatgttcatctaagacttgttctaaaccttcagaaaatgaagtgccacagcaggccattgactctcactcagtcaagaatttcagagaagaacctgaacatgattttagcaaaatttccatcgtgaggccattttcaatagaaacgaaggattccacggatatctcggcagtcctcggaacaaaagcagctcatggctgtgtaactgcagtctcaggcaaggctctgccttccagcccgccagacgccctccaggacgaggcgatgacagaaggcagcatgggggtcaccctcgaggcctccgcagaagctgatctaaaagctggcaactcctgtccagagcttgtgcccagcagaagaagcaagctgagaaagcccaagcctgtccccctgaggaagaaagcaattggaggagagttctcagacaccaacgctgctgtggagggcacacctctccccaaggcatcctatcacttcagtcctgaagagttggatgagaacacaagtcctttgctaggagatgccaggttccagaagtctccccctgacattaaagaaactcccggcactctcagtagtgacaccaacgactcaggggttgagctgggggaggagtcgaggagctcacctctcaagcttgagtttgatttcacagaagatacaggaaacatagaggccaggaaagcccttccaaggaagcttggcaggaaactgggtagcacactgactcccaagatacaaaaagatggcatcagtaagtcagcaggtttagaacagcctacagacccagtggcacgagacgggcctctctcccaaacatcttccaagccagatcctagtcagtgggagagccccagcttcaacccctttgggagccactctgttctgcagaactccccacccctctcttctgagggctcctaccactttgacccagataactttgacgaatccatggatccctttaaaccaactacgaccttaacaagcagtgacttttgttctcccactggtaatcacgttaatgaaatcttagaatcacccaagaaggcaaagtcgcgtttaataacgtgagtgacagtgggcgctgggtgtcgtgctctgtgtcttgtctgttgagtttggcagccagctacttttggctttggtgaactgaatttacctttgaggtgcaccgaggttcatacaaagcttataatgttatcctgcagtcttcactgtttggcttaactgttgtgtggaatcagaaataccagaggtttccttttca

SEQ ID NO: 302908 - DNA, 1702 bp, Homo sapiens
tcccctctgcctcccaagtagctgggaccacaggcatgtgccaccatgcctgcataattttttttagagatgaggtctcgctctgttgcccaggctggtttgtaactcctgagctcaagcaatgcacctgcctcagcctcccaaagtgctgggattgcaggcatgagccacagcgcctggtccataatactttttaaaaattaattatgcatgagagtttcaaattacataaccaccaaatagatgatagaaagcttgttaacaagaaacaaaattgattgacttgaaatcgaaatctttttatttttcctcacttttagaaaggagagttatgagccatgaagtgactaaagatgaaatcaaagtagagaagaaaaaaaggcataaataattcacacacagtgtggtcaacacttgaatgattaaaaaacattttaagtatatccctctaatttgttgctcttttattatttgtcttttaagcatttcctaggtgtaaggccctttgctgggcttgatggaaaggaagggacattcctgctcttagagagcggtagccatccataataaccaacttggatatgacgtcaaaagtgatgggggcaccaccattgagggcaggggaggacgtgatgcgactcacagagcacccagcaccggactgggtcagaaggacattgtcattcttcactagaagaaaggttaacccaagaggttgatctttaaagtctttgaataagtgaaatacttttggaattaggacacaaaataaaacttgtcactgaatcagaggtagagtgtctgaaagggtggattgactcaggaaagtctaaagtcagatcgcatctgttaggaagagcccagaagaatatctttaacttagtttgtaaaagattgactcatctaagcagaatgaatctatttccttgcagtattcaaataggtgcaaagagaaagggaaggcagttggttctataagtaaaatataagtttgactaaagataaaatcttaacaaaaacctttttagaaccttaagaaaccttatataatgtaaaaaaaaaaaaaaaaaaaaagataacgagagccccaaagcagataaatggattacatacattgtcagtgtatgttaatgtgtttaattgtttgggacagcatttctccaactttcattgtctgaaaatcctcctctggtaataagttctttttttctcatttaggaaaattgtagctgaatatgaaaagactattgctcaaatgattgaagatgaacaaaggacaagtatgacctctcagaagagcttccagcaactgaccatggagaaggaacaggccctggctgaccttaactctgtggaaaggtccctttctgatctcttcaggagatatgagaacctgaaaggtgttctggaagggttcaagaagaatgaagaagccttgaagaaatgtgctcaggattacttagccagagttaaacaagaggagcagcgataccaggccctgaaaatccacgcagaagagaaactggacaagtaagagcttgtaaatgttgaatttcactcttcatgatgttgtgggaagattgagagaggaaaacaaaatcactgtttcgcaactccaggttgtatttttatgtgtgtgtttatttcactttttaaacccttttcccattgttaaaacattaaaaagtaaaaaaaggtatat

SEQ ID NO: 302909 - DNA, 246 bp, Homo sapiens
atcacaagttgtgtgctaatctacaaataacagatggttcaagcttccccagtttcaggctttgtgcagcgtgtgacattcatcttccatcttactacttaataggaatggtaacagtttactcacatatttttacttttatactttttattgatgacagttcttctctgtgagcacacaagtctaactggaactgttttatgagacgtctatggcttttagtgcaataaagaatttttaaagaat

SEQ ID NO: 302910 - DNA, 377 bp, Homo sapiens
actttctcccttttagatcagaataaaattctctaggttatctgctcaacagaagctaagaccactctgatagtcattataacagtttttctttagttacttccataattagatttgttttttaaaaagcttccccccgctgacttttctttaaacatggttttaaaggatgtgatcaatttagtaatgaggaagttgttgaaggatgtctggggttaagaagctgaaagctgacagattcagtgtaatccctttccccacaggggctgctggagtcctctgcagagaaggcccctgtgtcggtgtcctgtggaggtgagagccccctggatgggatctgcctcagcgaatcagacaagacagccgtgctcacctta

SEQ ID NO: 302911 - DNA, 3919 bp, Homo sapiens
ggcacgaggctcgccgcggactcaagatggcggcgtgtggacgtgtacggaggatgttccgcttgtcggcggcgctgcatctgctgctgctattcgcggccggggccgagaaactccccggccagggcgtccacagccagggccagggtcccggggccaactttgtgtccttcgtagggcaggccggaggcggcggcccggcgggtcagcagctgccccagctgcctcagtcatcgcagcttcagcagcaacagcagcagcagcaacagcaacagcagcctcagccgccgcagccgcctttcccggcgggtgggcctccggcccggcggggaggagcgggggctggtgggggctggaagctggcggaggaagagtcctgcagggaggacgtgacccgcgtgtgccctaagcacacctggagcaacaacctggcggtgctcgagtgcctgcaggatgtgagggagcctgaaaatgaaatttcttcagactgcaatcatttgttgtggaattataagctgaacctaactacagatcccaaatttgaatctgtggccagagaggtttgcaaatctactataacagagattaaagaatgtgctgatgaaccggttggaaaaggttacatggtttcctgcttagtggatcaccgaggcaacatcactgagtatcagtgtcaccagtacattaccaagatgacggccatcatttttagtgattaccgtttaatctgtggcttcatggatgactgcaaaaatgacatcaacattctgaaatgtggcagtattcggcttggagaaaaggatgcacattcacaaggtgaggtggtatcatgcttggagaaaggcctggtgaaagaagcagaagaaagagaacccaagattcaagtttctgaactctgcaagaaagccattctccgggtggctgagctgtcatcggatgactttcacttagaccggcatttatattttgcttgccgagatgatcgggagcgtttttgtgaaaatacacaagctggtgagggcagagtgtataagtgcctctttaaccataaatttgaagaatccatgagtgaaaagtgtcgagaagcacttacaacccgccaaaagctgattgcccaggattataaagtcagttattcattggccaaatcctgtaaaagtgacttgaagaaataccggtgcaatgtggaaaaccttccgcgatcgcgtgaagccaggctctcctacttgttaatgtgcctggagtcagctgtacacagagggcgacaagtcagcagtgagtgccagggggagatgctggattaccgacgcatgttgatggaagacttttctctgagccctgagatcatcctaagctgtcggggggagattgaacaccattgttccggattacatcgaaaagggcggaccctacactgtctgatgaaagtagttcgaggggagaaggggaaccttggaatgaactgccagcaggcgcttcaaacactgattcaggagactgaccctggtgcagattaccgcattgatcgagctttgaatgaagcttgtgaatctgtaatccagacagcctgcaaacatataagatctggagacccaatgatcttgtcgtgcctgatggaacatttatacacagagaagatggtagaagactgtgaacaccgtctcttagagctgcagtatttcatctcccgggattggaagctggaccctgtcctgtaccgcaagtgccagggagacgcttctcgtctttgccacacccacggttggaatgagaccagtgaatttatgcctcagggagctgtgttctcttgtttatacagacacgcctaccgcactgaggaacagggaaggaggctctcacgggagtgccgagctgaagtccaaaggatcctacaccagcgtgccatggatgtcaagctggatcctgccctccaggataagtgcctgattgatctgggaaaatggtgcagtgagaaaacagagactggacaggagctggagtgccttcaggaccatctggatgacttggtggtggagtgtagagatatagttggcaacctcactgagttagaatcagaggatattcaaatagaagccttgctgatgagagcctgtgagcccataattcagaacttctgccacgatgtggcagataaccagatagactctggggacctgatggagtgtctgatacagaacaaacaccagaaggacatgaacgagaagtgtgccatcggagttacccacttccagctggtgcagatgaaggattttcggttttcttacaagtttaaaatggcctgcaaggaggacgtgttgaagctttgcccaaacataaaaaagaaggtggacgtggtgatctgcctgagcacgaccgtgcgcaatgacactctgcaggaagccaaggagcacagggtgtccctgaagtgccgcaggcagctccgtgtggaggagctggagatgacggaggacatccgcttggagccagatctatacgaagcctgcaagagtgacatcaaaaacttctgttccgctgtgcaatatggcaacgctcagattatcgaatgtctgaaagaaaacaagaagcagctaagcacccgctgccaccaaaaagtatttaagctgcaggagacagagatgatggacccagagctagactacaccctcatgagggtctgcaagcagatgataaagaggttctgtccggaagcagattctaaaaccatgttgcagtgcttgaagcaaaataaaaacagtgaattgatggatcccaaatgcaaacagatgataaccaagcgccagatcacccagaacacagattaccgcttaaaccccatgttaagaaaagcctgtaaagctgacattcctaaattctgtcacggtatcctgactaaggccaaggatgattcagaattagaaggacaagtcatctcttgcctgaagctgagatatgctgaccagcgcctgtcttcagactgtgaagaccagatccgaatcattatccaggagtccgccctggactaccgcctggatcctcagctccagctgcactgctcagacgagatctccagtctatgtgctgaagaagcagcagcccaagagcagacaggtcaggtggaggagtgcctcaaggtcaacctgctcaagatcaaaacagaattgtgtaaaaaggaagtgctaaacatgctgaaggaaagcaaagcagacatctttgttgacccggtacttcatactgcttgtgccctggacattaaacaccactgcgcagccatcacccctggccgcgggcgtcaaatgtcctgtctcatggaagcactggaggataagcgggtgaggttacagcccgagtgcaaaaagcgcctcaatgaccggattgagatgtggagttacgcagcaaaggtggccccagcagatggcttctctgatcttgccatgcaagtaatgacgtctccatctaagaactacattctctctgtgatcagtgggagcatctgtatattgttcctgattggcctgatgtgtggacggatcaccaagcgagtgacacgagagctcaaggacaggtagagccaccttgaccaccaaaggaactacctatccagtgcccagtttgtacagccctcttgtatagcatccccactcacctcgctcttctcagaagtgacaccaaccccgtgttagagcattagcagatgtccactgcgttgtcccatccagcctccactcgtgtccatggtgtcctcctcctcctcaccgtgcagcagcagcagctggtcgctggggttactgcctttgtttggcaaacttgggtttacctgcctgtagacaagtctctctcataccaacagaacttccggtacttccagaaccaactcacctgacctgcaactcaaaggcttttttaagaaaaccaccaaaaa

SEQ ID NO: 302912 - DNA, 4028 bp, Homo sapiens
ggcacgaggctcgccgcggactcaagatggcggcgtgtggacgtgtacggaggatgttccgcttgtcggcggcgctgcatctgctgctgctattcgcggccggggccgagaaactccccggccagggcgtccacagccagggccagggtcccggggccaactttgtgtccttcgtagggcaggccggaggcggcggcccggcgggtcagcagctgccccagctgcctcagtcatcgcagcttcagcagcaacagcagcagcagcaacagcaacagcagcctcagccgccgcagccgcctttcccggcgggtgggcctccggcccggcggggaggagcgggggctggtgggggctggaagctggcggaggaagagtcctgcagggaggacgtgacccgcgtgtgccctaagcacacctggagcaacaacctggcggtgctcgagtgcctgcaggatgtgagggagcctgaaaatgaaatttcttcagactgcaatcatttgttgtggaattataagctgaacctaactacagatcccaaatttgaatctgtggccagagaggtttgcaaatctactataacagagattaaagaatgtgctgatgaaccggttggaaaaggttacatggtttcctgcttagtggatcaccgaggcaacatcactgagtatcagtgtcaccagtacattaccaagatgacggccatcatttttagtgattaccgtttaatctgtggcttcatggatgactgcaaaaatgacatcaacattctgaaatgtggcagtattcggcttggagaaaaggatgcacattcacaaggtgaggtggtatcatgcttggagaaaggcctggtgaaagaagcagaagaaagagaacccaagattcaagtttctgaactctgcaagaaagccattctccgggtggctgagctgtcatcggatgactttcacttagaccggcatttatattttgcttgccgagatgatcgggagcgtttttgtgaaaatacacaagctggtgagggcagagtgtataagtgcctctttaaccataaatttgaagaatccatgagtgaaaagtgtcgagaagcacttacaacccgccaaaagctgattgcccaggattataaagtcagttattcattggccaaatcctgtaaaagtgacttgaagaaataccggtgcaatgtggaaaaccttccgcgatcgcgtgaagccaggctctcctacttgttaatgtgcctggagtcagctgtacacagagggcgacaagtcagcagtgagtgccagggggagatgctggattaccgacgcatgttgatggaagacttttctctgagccctgagatcatcctaagctgtcggggggagattgaacaccattgttccggattacatcgaaaagggcggaccctacactgtctgatgaaagtagttcgaggggagaaggggaaccttggaatgaactgccagcaggcgcttcaaacactgattcaggagactgaccctggtgcagattaccgcattgatcgagctttgaatgaagcttgtgaatctgtaatccagacagcctgcaaacatataagatctggagacccaatgatcttgtcgtgcctgatggaacatttatacacagagaagatggtagaagactgtgaacaccgtctcttagagctgcagtatttcatctcccgggattggaagctggaccctgtcctgtaccgcaagtgccagggagacgcttctcgtctttgccacacccacggttggaatgagaccagtgaatttatgcctcagggagctgtgttctcttgtttatacagacacgcctaccgcactgaggaacagggaaggaggctctcacgggagtgccgagctgaagtccaaaggatcctacaccagcgtgccatggatgtcaagctggatcctgccctccaggataagtgcctgattgatctgggaaaatggtgcagtgagaaaacagagactggacaggagctggagtgccttcaggaccatctggatgacttggtggtggagtgtagagatatagttggcaacctcactgagttagaatcagaggccgaaagggaatatgtctttaaaaatttgcctttcaaagtataacggaggagcagttctatatttattctggggctatctacttcaaatactagaatcgtttccaaaagatattcaaatagaagccttgctgatgagagcctgtgagcccataattcagaacttctgccacgatgtggcagataaccagatagactctggggacctgatggagtgtctgatacagaacaaacaccagaaggacatgaacgagaagtgtgccatcggagttacccacttccagctggtgcagatgaaggattttcggttttcttacaagtttaaaatggcctgcaaggaggacgtgttgaagctttgcccaaacataaaaaagaaggtggacgtggtgatctgcctgagcacgaccgtgcgcaatgacactctgcaggaagccaaggagcacagggtgtccctgaagtgccgcaggcagctccgtgtggaggagctggagatgacggaggacatccgcttggagccagatctatacgaagcctgcaagagtgacatcaaaaacttctgttccgctgtgcaatatggcaacgctcagattatcgaatgtctgaaagaaaacaagaagcagctaagcacccgctgccaccaaaaagtatttaagctgcaggagacagagatgatggacccagagctagactacaccctcatgagggtctgcaagcagatgataaagaggttctgtccggaagcagattctaaaaccatgttgcagtgcttgaagcaaaataaaaacagtgaattgatggatcccaaatgcaaacagatgataaccaagcgccagatcacccagaacacagattaccgcttaaaccccatgttaagaaaagcctgtaaagctgacattcctaaattctgtcacggtatcctgactaaggccaaggatgattcagaattagaaggacaagtcatctcttgcctgaagctgagatatgctgaccagcgcctgtcttcagactgtgaagaccagatccgaatcattatccaggagtccgccctggactaccgcctggatcctcagctccagctgcactgctcagacgagatctccagtctatgtgctgaagaagcagcagcccaagagcagacaggtcaggtggaggagtgcctcaaggtcaacctgctcaagatcaaaacagaattgtgtaaaaaggaagtgctaaacatgctgaaggaaagcaaagcagacatctttgttgacccggtacttcatactgcttgtgccctggacattaaacaccactgcgcagccatcacccctggccgcgggcgtcaaatgtcctgtctcatggaagcactggaggataagcgggtgaggttacagcccgagtgcaaaaagcgcctcaatgaccggattgagatgtggagttacgcagcaaaggtggccccagcagatggcttctctgatcttgccatgcaagtaatgacgtctccatctaagaactacattctctctgtgatcagtgggagcatctgtatattgttcctgattggcctgatgtgtggacggatcaccaagcgagtgacacgagagctcaaggacaggtagagccaccttgaccaccaaaggaactacctatccagtgcccagtttgtacagccctcttgtatagcatccccactcacctcgctcttctcagaagtgacaccaaccccgtgttagagcattagcagatgtccactgcgttgtcccatccagcctccactcgtgtccatggtgtcctcctcctcctcaccgtgcagcagcagcagctggtcgctggggttactgcctttgtttggcaaacttgggtttacctgcctgtagacaagtctctctcataccaacagaacttccggtacttccagaaccaactcacctgacctgcaactcaaaggcttttttaagaaaaccaccaaaaa

SEQ ID NO: 302913 - DNA, 3744 bp, Homo sapiens
ggcacgaggctcgccgcggactcaagatggcggcgtgtggacgtgtacggaggatgttccgcttgtcggcggcgctgcatctgctgctgctattcgcggccggggccgagaaactccccggccagggcgtccacagccagggccagggtcccggggccaactttgtgtccttcgtagggcaggccggaggcggcggcccggcgggtcagcagctgccccagctgcctcagtcatcgcagcttcagcagcaacagcagcagcagcaacagcaacagcagcctcagccgccgcagccgcctttcccggcgggtgggcctccggcccggcggggaggagcgggggctggtgggggctggaagctggcggaggaagagtcctgcagggaggacgtgacccgcgtgtgccctaagcacacctggagcaacaacctggcggtgctcgagtgcctgcaggatgtgagggagcctgaaaatgaaatttcttcagactgcaatcatttgttgtggaattataagctgaacctaactacagatcccaaatttgaatctgtggccagagaggtttgcaaatctactataacagagattaaagaatgtgctgatgaaccggttggaaaaggttacatggtttcctgcttagtggatcaccgaggcaacatcactgagtatcagtgtcaccagtacattaccaagatgacggccatcatttttagtgattaccgtttaatctgtggcttcatggatgactgcaaaaatgacatcaacattctgaaatgtggcagtattcggcttggagaaaaggatgcacattcacaaggtgaggtggtatcatgcttggagaaaggcctggtgaaagaagcagaagaaagagaacccaagattcaagtttctgaactctgcaagaaagccattctccgggtggctgagctgtcatcggatgactttcacttagaccggcatttatattttgcttgccgagatgatcgggagcgtttttgtgaaaatacacaagctggtgagggcagagtgtataagtgcctctttaaccataaatttgaagaatccatgagtgaaaagtgtcgagaagcacttacaacccgccaaaagctgattgcccaggattataaagtcagttattcattggccaaatcctgtaaaagtgacttgaagaaataccggtgcaatgtggaaaaccttccgcgatcgcgtgaagccaggctctcctacttgttaatgtgcctggagtcagctgtacacagagggcgacaagtcagcagtgagtgccagggggagatgctggattaccgacgcatgttgatggaagacttttctctgagccctgagatcatcctaagctgtcggggggagattgaacaccattgttccggattacatcgaaaagggcggaccctacactgtctgatgaaagtagttcgaggggagaaggggaaccttggaatgaactgccagcaggcgcttcaaacactgattcaggagactgaccctggtgcagattaccgcattgatcgagctttgaatgaagcttgtgaatctgtaatccagacagcctgcaaacatataagatctggagacccaatgatcttgtcgtgcctgatggaacatttatacacagagaagatggtagaagactgtgaacaccgtctcttagagctgcagtatttcatctcccgggattggaagctggaccctgtcctgtaccgcaagtgccagggagacgcttctcgtctttgccacacccacggttggaatgagaccagtgaatttatgcctcagggagctgtgttctcttgtttatacagacacgcctaccgcactgaggaacagggaaggaggctctcacgggagtgccgagctgaagtccaaaggatcctacaccagcgtgccatggatgtcaagctggatcctgccctccaggataagtgcctgattgatctgggaaaatggtgcagtgagaaaacagagactggacaggagctggagtgccttcaggaccatctggatgacttggtggtggagtgtagagatatagttggcaacctcactgagttagaatcagaggatattcaaatagaagccttgctgatgagagcctgtgagcccataattcagaacttctgccacgatgtggcagataaccagatagactctggggacctgatggagtgtctgatacagaacaaacaccagaaggacatgaacgagaagtgtgccatcggagttacccacttccagctggtgcagatgaaggattttcggttttcttacaagtttaaaatggcctgcaaggaggacgtgttgaagctttgcccaaacataaaaaagaaggtggacgtggtgatctgcctgagcacgaccgtgcgcaatgacactctgcaggaagccaaggagcacagggtgtccctgaagtgccgcaggcagctccgtgtggaggagctggagatgacggaggacatccgcttggagccagatctatacgaagcctgcaagagtgacatcaaaaacttctgttccgctgtgcaatatggcaacgctcagattatcgaatgtctgaaagaaaacaagaagcagctaagcacccgctgccaccaaaaagtatttaagctgcaggagacagagatgatggacccagagctagactacaccctcatgagggtctgcaagcagatgataaagaggttctgtccggaagcagattctaaaaccatgttgcagtgcttgaagcaaaataaaaacagtgaattgatggatcccaaatgcaaacagatgataaccaagcgccagatcacccagaacacagattaccgcttaaaccccatgttaagaaaagcctgtaaagctgacattcctaaattctgtcacggtatcctgactaaggccaaggatgattcagaattagaaggacaagtcatctcttgcctgaagctgagatatgctgaccagcgcctgtcttcagactgtgaagaccagatccgaatcattatccaggagtccgccctggactaccgcctggatcctcagctccagctgcactgctcagacgagatctccagtctatgtgctgaagaagcagcagcccaagagcagacaggtcaggtggaggagtgcctcaaggtcaacctgctcaagatcaaaacagaattgtgtaaaaaggaagtgctaaacatgctgaaggaaagcaaagcagacatctttgttgacccggtacttcatactgcttgtgccctggacattaaacaccactgcgcagccatcacccctggccgcgggcgtcaaatgtcctgtctcatggaagcactggaggataagcgggtgaggttacagcccgagtgcaaaaagcgcctcaatgaccggattgagatgtggagttacgcagcaaaggtggccccagcagatggcttctctgatcttgccatgcaagtaatgacgtctccatctaagaactacattctctctgtgatcagtgggagcatctgtatattgttcctgattggcctgatgtgtggacggatcaccaagcgagtgacacgagagctcaaggacaggctacaatacaggtcagagacaatggcttataaaggtttagtgtggtctcaggatgtgacaggcagtccagcctgacctttctgcacactccagacaaacttcccagacaagctcctttgtgcctctacgtggagagggtgtggaaagttatcacattaaaagatggaggatttgctctgtt

SEQ ID NO: 302914 - DNA, 2343 bp, Homo sapiens
tttacacatttaatggcctaggatcttgtcgtgcctgatggaacatttatacacagagaagatggtagaagactgtgaacaccgtctcttagagctgcagtatttcatctcccgggattggaagctggaccctgtcctgtaccgcaagtgccagggagacgcttctcgtctttgccacacccacggttggaatgagaccagtgaatttatgcctcagggagctgtgttctcttgtttatacagacacgcctaccgcactgaggaacagggaaggaggctctcacgggagtgccgagctgaagtccaaaggatcctacaccagcgtgccatggatgtcaagctggatcctgccctccaggataagtgcctgattgatctgggaaaatggtgcagtgagaaaacagagactggacaggagctggagtgccttcaggaccatctggatgacttggtggtggagtgtagagatatagttggcaacctcactgagttagaatcagaggatattcaaatagaagccttgctgatgagagcctgtgagcccataattcagaacttctgccacgatgtggcagataaccagatagactctggggacctgatggagtgtctgatacagaacaaacaccagaaggacatgaacgagaagtgtgccatcggagttacccacttccagctggtgcagatgaaggattttcggttttcttacaagtttaaaatggcctgcaaggaggacgtgttgaagctttgcccaaacataaaaaagaaggtggacgtggtgatctgcctgagcacgaccgtgcgcaatgacactctgcaggaagccaaggagcacagggtgtccctgaagtgccgcaggcagctccgtgtggaggagctggagatgacggaggacatccgcttggagccagatctatacgaagcctgcaagagtgacatcaaaaacttctgttccgctgtgcaatatggcaacgctcagattatcgaatgtctgaaagaaaacaagaagcagctaagcacccgctgccaccaaaaagtatttaagctgcaggagacagagatgatggacccagagctagactacaccctcatgagggtctgcaagcagatgataaagaggttctgtccggaagcagattctaaaaccatgttgcagtgcttgaagcaaaataaaaacagtgaattgatggatcccaaatgcaaacagatgataaccaagcgccagatcacccagaacacagattaccgcttaaaccccatgttaagaaaagcctgtaaagctgacattcctaaattctgtcacggtatcctgactaaggccaaggatgattcagaattagaaggacaagtcatctcttgcctgaagctgagatatgctgaccagcgcctgtcttcagactgtgaagaccagatccgaatcattatccaggagtccgccctggactaccgcctggatcctcagctccagctgcactgctcagacgagatctccagtctatgtgctgaagaagcagcagcccaagagcagacaggtcaggtggaggagtgcctcaaggtcaacctgctcaagatcaaaacagaattgtgtaaaaaggaagtgctaaacatgctgaaggaaagcaaagcagacatctttgttgacccggtacttcatactgcttgtgccctggacattaaacaccactgcgcagccatcacccctggccgcgggcgtcaaatgtcctgtctcatggaagcactggaggataagcgggtgaggttacagcccgagtgcaaaaagcgcctcaatgaccggattgagatgtggagttacgcagcaaaggtggccccagcagatggcttctctgatcttgccatgcaagtaatgacgtctccatctaagaactacattctctctgtgatcagtgggagcatctgtatattgttcctgattggcctgatgtgtggacggatcaccaagcgagtgacacgagagctcaaggacaggtagagccaccttgaccaccaaaggaactacctatccagtgcccagtttgtacagccctcttgtatagcatccccactcacctcgctcttctcagaagtgacaccaaccccgtgttagagcattagcagatgtccactgcgttgtcccatccagcctccactcgtgtccatggtgtcctcctcctcctcaccgtgcagcagcagcagctggtcgctggggttactgcctttgtttggcaaacttgggtttacctgcctgtagacaagtctctctcataccaacagaacttccggtacttccagaaccaactcacctgacctgcaactcaaaggcttttttaagaaaaccaccaaaaa

SEQ ID NO: 302915 - DNA, 2558 bp, Homo sapiens
  misc_feature (10)..(10): n is a, c, g, or t
  misc_feature (17)..(17): n is a, c, g, or t
  misc_feature (24)..(24): n is a, c, g, or t
  misc_feature (33)..(33): n is a, c, g, or t
  misc_feature (47)..(47): n is a, c, g, or t
  misc_feature (49)..(49): n is a, c, g, or t
  misc_feature (121)..(121): n is a, c, g, or t
gggaatgacnatacttngtagcangaggatgcnaacgtgcatgtgcnanagctttgaaaaagaaaaagaagatgccaaagcttcgctttgccagtagaatccggaaaattcggaagaagcnattttgaacattcttaatatgtcatcttgtttgtctttatggcttatttgcctttatggttgtatctgaagaataatatgacagcctgcaaacatataagatctggagacccaatgatcttgtcgtgcctgatggaacatttatacacagagaagatggtagaagactgtgaacaccgtctcttagagctgcagtatttcatctcccgggattggaagctggaccctgtcctgtaccgcaagtgccagggagacgcttctcgtctttgccacacccacggttggaatgagaccagtgaatttatgcctcagggagctgtgttctcttgtttatacagacacgcctaccgcactgaggaacagggaaggaggctctcacgggagtgccgagctgaagtccaaaggatcctacaccagcgtgccatggatgtcaagctggatcctgccctccaggataagtgcctgattgatctgggaaaatggtgcagtgagaaaacagagactggacaggagctggagtgccttcaggaccatctggatgacttggtggtggagtgtagagatatagttggcaacctcactgagttagaatcagaggatattcaaatagaagccttgctgatgagagcctgtgagcccataattcagaacttctgccacgatgtggcagataaccagatagactctggggacctgatggagtgtctgatacagaacaaacaccagaaggacatgaacgagaagtgtgccatcggagttacccacttccagctggtgcagatgaaggattttcggttttcttacaagtttaaaatggcctgcaaggaggacgtgttgaagctttgcccaaacataaaaaagaaggtggacgtggtgatctgcctgagcacgaccgtgcgcaatgacactctgcaggaagccaaggagcacagggtgtccctgaagtgccgcaggcagctccgtgtggaggagctggagatgacggaggacatccgcttggagccagatctatacgaagcctgcaagagtgacatcaaaaacttctgttccgctgtgcaatatggcaacgctcagattatcgaatgtctgaaagaaaacaagaagcagctaagcacccgctgccaccaaaaagtatttaagctgcaggagacagagatgatggacccagagctagactacaccctcatgagggtctgcaagcagatgataaagaggttctgtccggaagcagattctaaaaccatgttgcagtgcttgaagcaaaataaaaacagtgaattgatggatcccaaatgcaaacagatgataaccaagcgccagatcacccagaacacagattaccgcttaaaccccatgttaagaaaagcctgtaaagctgacattcctaaattctgtcacggtatcctgactaaggccaaggatgattcagaattagaaggacaagtcatctcttgcctgaagctgagatatgctgaccagcgcctgtcttcagactgtgaagaccagatccgaatcattatccaggagtccgccctggactaccgcctggatcctcagctccagctgcactgctcagacgagatctccagtctatgtgctgaagaagcagcagcccaagagcagacaggtcaggtggaggagtgcctcaaggtcaacctgctcaagatcaaaacagaattgtgtaaaaaggaagtgctaaacatgctgaaggaaagcaaagcagacatctttgttgacccggtacttcatactgcttgtgccctggacattaaacaccactgcgcagccatcacccctggccgcgggcgtcaaatgtcctgtctcatggaagcactggaggataagcgggtgaggttacagcccgagtgcaaaaagcgcctcaatgaccggattgagatgtggagttacgcagcaaaggtggccccagcagatggcttctctgatcttgccatgcaagtaatgacgtctccatctaagaactacattctctctgtgatcagtgggagcatctgtatattgttcctgattggcctgatgtgtggacggatcaccaagcgagtgacacgagagctcaaggacaggtagagccaccttgaccaccaaaggaactacctatccagtgcccagtttgtacagccctcttgtatagcatccccactcacctcgctcttctcagaagtgacaccaaccccgtgttagagcattagcagatgtccactgcgttgtcccatccagcctccactcgtgtccatggtgtcctcctcctcctcaccgtgcagcagcagcagctggtcgctggggttactgcctttgtttggcaaacttgggtttacctgcctgtagacaagtctctctcataccaacagaacttccggtacttccagaaccaactcacctgacctgcaactcaaaggcttttttaagaaaaccaccaaaaa

SEQ ID NO: 302916 - DNA, 3098 bp, Homo sapiens
ggcacgaggctcgccgcggactcaagatggcggcgtgtggacgtgtacggaggatgttccgcttgtcggcggcgctgcatctgctgctgctattcgcggccggggccgagaaactccccggccagggcgtccacagccagggccagggtcccggggccaactttgtgtccttcgtagggcaggccggaggcggcggcccggcgggtcagcagctgccccagctgcctcagtcatcgcagcttcagcagcaacagcagcagcagcaacagcaacagcagcctcagccgccgcagccgcctttcccggcgggtgggcctccggcccggcggggaggagcgggggctggtgggggctggaagctggcggaggaagagtcctgcagggaggacgtgacccgcgtgtgccctaagcacacctggagcaacaacctggcggtgctcgagtgcctgcaggatgtgagggagcctgaaaatgaaatttcttcagactgcaatcatttgttgtggaattataagctgaacctaactacagatcccaaatttgaatctgtggccagagaggtttgcaaatctactataacagagattaaagaatgtgctgatgaaccggttggaaaaggttacatggtttcctgcttagtggatcaccgaggcaacatcactgagtatcagtgtcaccagtacattaccaagatgacggccatcatttttagtgattaccgtttaatctgtggcttcatggatgactgcaaaaatgacatcaacattctgaaatgtggcagtattcggcttggagaaaaggatgcacattcacaaggtgaggtggtatcatgcttggagaaaggcctggtgaaagaagcagaagaaagagaacccaagattcaagtttctgaactctgcaagaaagccattctccgggtggctgagctgtcatcggatgactttcacttagaccggcatttatattttgcttgccgagatgatcgggagcgtttttgtgaaaatacacaagctggtgagggcagagtgtataagtgcctctttaaccataaatttgaagaatccatgagtgaaaagtgtcgagaagcacttacaacccgccaaaagctgattgcccaggattataaagtcagttattcattggccaaatcctgtaaaagtgacttgaagaaataccggtgcaatgtggaaaaccttccgcgatcgcgtgaagccaggctctcctacttgttaatgtgcctggagtcagctgtacacagagggcgacaagtcagcagtgagtgccagggggagatgctggattaccgacgcatgttgatggaagacttttctctgagccctgagatcatcctaagctgtcggggggagattgaacaccattgttccggattacatcgaaaagggcggaccctacactgtctgatgaaagtagttcgaggggagaaggggaaccttggaatgaactgccagcaggcgcttcaaacactgattcaggagactgaccctggtgcagattaccgcattgatcgagctttgaatgaagcttgtgaatctgtaatccagacagcctgcaaacatataagatctggagacccaatgatcttgtcgtgcctgatggaacatttatacacagagaagatggtagaagactgtgaacaccgtctcttagagctgcagtatttcatctcccgggattggaagctggaccctgtcctgtaccgcaagtgccagggagacgcttctcgtctttgccacacccacggttggaatgagaccagtgaatttatgcctcagggagctgtgttctcttgtttatacagacacgcctaccgcactgaggaacagggaaggaggctctcacgggagtgccgagctgaagtccaaaggatcctacaccagcgtgccatggatgtcaagctggatcctgccctccaggataagtgcctgattgatctgggaaaatggtgcagtgagaaaacagagactggacaggagctggagtgccttcaggaccatctggatgacttggtggtggagtgtagagatatagttggcaacctcactgagttagaatcagaggatattcaaatagaagccttgctgatgagagcctgtgagcccataattcagaacttctgccacgatgtggcagataaccagatagactctggggacctgatggagtgtctgatacagaacaaacaccagaaggacatgaacgagaagtgtgccatcggagttacccacttccagctggtgcagatgaaggattttcggttttcttacaagtttaaaatggcctgcaaggaggacgtgttgaagctttgcccaaacataaaaaagaaggtggacgtggtgatctgcctgagcacgaccgtgcgcaatgacactctgcaggaagccaaggagcacagggtgtccctgaagtgccgcaggcagctccgtgtggaggagctggagatgacggaggacatccgcttggagccagatctatacgaagcctgcaagagtgacatcaaaaacttctgttccgctgtgcaatatggcaacgctcagattatcgaatgtctgaaagaaaacaagaagcagctaagcacccgctgccaccaaaaagtatttaagctgcaggagacagagatgatggacccagagctagactacaccctcatgagggtctgcaagcagatgataaagaggttctgtccggaagcagattctaaaaccatgttgcagtgcttgaagcaaaataaaaacagtgaattgatggatcccaaatgcaaacagatgataaccaagcgccagatcacccagaacacagattaccgcttaaaccccatgttaagaaaagcctgtaaagctgacattcctaaattctgtcacggtatcctgactaaggccaaggatgattcagaattagaaggacaagtcatctcttgcctgaagctgagatatgctgaccagcgcctgtcttcagactgtgaagaccagatccgaatcattatccaggagtccgccctggactaccgcctggatcctcagctccagctgcactgctcagacgagctccagtccggggatcctctataatcgcggcagaca

SEQ ID NO: 302917 - DNA, 3089 bp, Homo sapiens
ggcacgaggctcgccgcggactcaagatggcggcgtgtggacgtgtacggaggatgttccgcttgtcggcggcgctgcatctgctgctgctattcgcggccggggccgagaaactccccggccagggcgtccacagccagggccagggtcccggggccaactttgtgtccttcgtagggcaggccggaggcggcggcccggcgggtcagcagctgccccagctgcctcagtcatcgcagcttcagcagcaacagcagcagcagcaacagcaacagcagcctcagccgccgcagccgcctttcccggcgggtgggcctccggcccggcggggaggagcgggggctggtgggggctggaagctggcggaggaagagtcctgcagggaggacgtgacccgcgtgtgccctaagcacacctggagcaacaacctggcggtgctcgagtgcctgcaggatgtgagggagcctgaaaatgaaatttcttcagactgcaatcatttgttgtggaattataagctgaacctaactacagatcccaaatttgaatctgtggccagagaggtttgcaaatctactataacagagattaaagaatgtgctgatgaaccggttggaaaaggttacatggtttcctgcttagtggatcaccgaggcaacatcactgagtatcagtgtcaccagtacattaccaagatgacggccatcatttttagtgattaccgtttaatctgtggcttcatggatgactgcaaaaatgacatcaacattctgaaatgtggcagtattcggcttggagaaaaggatgcacattcacaaggtgaggtggtatcatgcttggagaaaggcctggtgaaagaagcagaagaaagagaacccaagattcaagtttctgaactctgcaagaaagccattctccgggtggctgagctgtcatcggatgactttcacttagaccggcatttatattttgcttgccgagatgatcgggagcgtttttgtgaaaatacacaagctggtgagggcagagtgtataagtgcctctttaaccataaatttgaagaatccatgagtgaaaagtgtcgagaagcacttacaacccgccaaaagctgattgcccaggattataaagtcagttattcattggccaaatcctgtaaaagtgacttgaagaaataccggtgcaatgtggaaaaccttccgcgatcgcgtgaagccaggctctcctacttgttaatgtgcctggagtcagctgtacacagagggcgacaagtcagcagtgagtgccagggggagatgctggattaccgacgcatgttgatggaagacttttctctgagccctgagatcatcctaagctgtcggggggagattgaacaccattgttccggattacatcgaaaagggcggaccctacactgtctgatgaaagtagttcgaggggagaaggggaaccttggaatgaactgccagcaggcgcttcaaacactgattcaggagactgaccctggtgcagattaccgcattgatcgagctttgaatgaagcttgtgaatctgtaatccagacagcctgcaaacatataagatctggagacccaatgatcttgtcgtgcctgatggaacatttatacacagagaagatggtagaagactgtgaacaccgtctcttagagctgcagtatttcatctcccgggattggaagctggaccctgtcctgtaccgcaagtgccagggagacgcttctcgtctttgccacacccacggttggaatgagaccagtgaatttatgcctcagggagctgtgttctcttgtttatacagacacgcctaccgcactgaggaacagggaaggaggctctcacgggagtgccgagctgaagtccaaaggatcctacaccagcgtgccatggatgtcaagctggatcctgccctccaggataagtgcctgattgatctgggaaaatggtgcagtgagaaaacagagactggacaggagctggagtgccttcaggaccatctggatgacttggtggtggagtgtagagatatagttggcaacctcactgagttagaatcagaggatattcaaatagaagccttgctgatgagagcctgtgagcccataattcagaacttctgccacgatgtggcagataaccagatagactctggggacctgatggagtgtctgatacagaacaaacaccagaaggacatgaacgagaagtgtgccatcggagttacccacttccagctggtgcagatgaaggattttcggttttcttacaagtttaaaatggcctgcaaggaggacgtgttgaagctttgcccaaacataaaaaagaaggtggacgtggtgatctgcctgagcacgaccgtgcgcaatgacactctgcaggaagccaaggagcacagggtgtccctgaagtgccgcaggcagctccgtgtggaggagctggagatgacggaggacatccgcttggagccagatctatacgaagcctgcaagagtgacatcaaaaacttctgttccgctgtgcaatatggcaacgctcagattatcgaatgtctgaaagaaaacaagaagcagctaagcacccgctgccaccaaaaagtatttaagctgcaggagacagagatgatggacccagagctagactacaccctcatgagggtctgcaagcagatgataaagaggttctgtccggaagcagattctaaaaccatgttgcagtgcttgaagcaaaataaaaacagtgaattgatggatcccaaatgcaaacagatgataaccaagcgccagatcacccagaacacagattaccgcttaaaccccatgttaagaaaagcctgtaaagctgacattcctaaattctgtcacggtatcctgactaaggccaaggatgattcagaattagaaggacaagtcatctcttgcctgaagctgagatatgctgaccagcgcctgtcttcagactgtgaagaccagatccgaatcattatccaggagtccgccctggactaccgcctggatcctcagctccagctgcactgctcagacgaggtgggatttgcgtgcaaaactggttac

SEQ ID NO: 302918 - DNA, 3367 bp, Homo sapiens
ggcacgaggctcgccgcggactcaagatggcggcgtgtggacgtgtacggaggatgttccgcttgtcggcggcgctgcatctgctgctgctattcgcggccggggccgagaaactccccggccagggcgtccacagccagggccagggtcccggggccaactttgtgtccttcgtagggcaggccggaggcggcggcccggcgggtcagcagctgccccagctgcctcagtcatcgcagcttcagcagcaacagcagcagcagcaacagcaacagcagcctcagccgccgcagccgcctttcccggcgggtgggcctccggcccggcggggaggagcgggggctggtgggggctggaagctggcggaggaagagtcctgcagggaggacgtgacccgcgtgtgccctaagcacacctggagcaacaacctggcggtgctcgagtgcctgcaggatgtgagggagcctgaaaatgaaatttcttcagactgcaatcatttgttgtggaattataagctgaacctaactacagatcccaaatttgaatctgtggccagagaggtttgcaaatctactataacagagattaaagaatgtgctgatgaaccggttggaaaaggttacatggtttcctgcttagtggatcaccgaggcaacatcactgagtatcagtgtcaccagtacattaccaagatgacggccatcatttttagtgattaccgtttaatctgtggcttcatggatgactgcaaaaatgacatcaacattctgaaatgtggcagtattcggcttggagaaaaggatgcacattcacaaggtgaggtggtatcatgcttggagaaaggcctggtgaaagaagcagaagaaagagaacccaagattcaagtttctgaactctgcaagaaagccattctccgggtggctgagctgtcatcggatgactttcacttagaccggcatttatattttgcttgccgagatgatcgggagcgtttttgtgaaaatacacaagctggtgagggcagagtgtataagtgcctctttaaccataaatttgaagaatccatgagtgaaaagtgtcgagaagcacttacaacccgccaaaagctgattgcccaggattataaagtcagttattcattggccaaatcctgtaaaagtgacttgaagaaataccggtgcaatgtggaaaaccttccgcgatcgcgtgaagccaggctctcctacttgttaatgtgcctggagtcagctgtacacagagggcgacaagtcagcagtgagtgccagggggagatgctggattaccgacgcatgttgatggaagacttttctctgagccctgagatcatcctaagctgtcggggggagattgaacaccattgttccggattacatcgaaaagggcggaccctacactgtctgatgaaagtagttcgaggggagaaggggaaccttggaatgaactgccagcaggcgcttcaaacactgattcaggagactgaccctggtgcagattaccgcattgatcgagctttgaatgaagcttgtgaatctgtaatccagacagcctgcaaacatataagatctggagacccaatgatcttgtcgtgcctgatggaacatttatacacagagaagatggtagaagactgtgaacaccgtctcttagagctgcagtatttcatctcccgggattggaagctggaccctgtcctgtaccgcaagtgccagggagacgcttctcgtctttgccacacccacggttggaatgagaccagtgaatttatgcctcagggagctgtgttctcttgtttatacagacacgcctaccgcactgaggaacagggaaggaggctctcacgggagtgccgagctgaagtccaaaggatcctacaccagcgtgccatggatgtcaagctggatcctgccctccaggataagtgcctgattgatctgggaaaatggtgcagtgagaaaacagagactggacaggagctggagtgccttcaggaccatctggatgacttggtggtggagtgtagagatatagttggcaacctcactgagttagaatcagaggatattcaaatagaagccttgctgatgagagcctgtgagcccataattcagaacttctgccacgatgtggcagataaccagatagactctggggacctgatggagtgtctgatacagaacaaacaccagaaggacatgaacgagaagtgtgccatcggagttacccacttccagctggtgcagatgaaggattttcggttttcttacaagtttaaaatggcctgcaaggaggacgtgttgaagctttgcccaaacataaaaaagaaggtggacgtggtgatctgcctgagcacgaccgtgcgcaatgacactctgcaggaagccaaggagcacagggtgtccctgaagtgccgcaggcagctccgtgtggaggagctggagatggtaatgcctcccagcctctgctcccagaaaccacagtgggccagggcttggaaagctggggagaggctagggcaagggggaggcattttatccactactgtgatggttaagacttgaagtcctgtgcaaaagttttaacatacgaccattagcttcctgtgtcattcttttgattttgaatgataaaacctttcttcccacatgtaactggaagtccagctgtaagacaggctctaactaagcatgtgatccaatcactggatcagtaatgtcctcaggggctgggtgctgtggctcatgcaggtaatcccagcactttgggaggccgaggcaggtggatcgcttgaggtcaggagttcaaaaccagcctggccaacgtgatgaaaccctgcctgtactaaaagagacttaggccagcgaggtggctcatgcctgtaattccagcactttgggaggcaaatgcggtcaaatcacttgaggtctgtaattcaagaccagcctggccaacatggcgacaccccatctctactaaaaatacaaaatttagccagctgtggtggcacatacctgtaatcccagctacttgagagactgaggcaggagaatcacttgaaccgggagatggagtttgcagtgagccgagatggtgccactgtactccagcctgggtgacagagcaagactctgtctccaaaaaaaaaaaaaaaaaaaaaaaaaaagacatttcaagctggaagatttggttccctaactttgagcctagctctttcattaaagtaataataaaagtagaactctacatttatataatggttttgactttccaaagtgattttcacatctcagcagtcctgtgaaggactaaataaggtgtttcagggtagacttggcattgtgttttgcaa

SEQ ID NO: 302919 - DNA, 2033 bp, Homo sapiens
ggggaatacccgccattggaaatgcctagggggtggccaaattcccaaatattgcaaaaaaaggtcttcccttagaaaaccgggttttgttaccaaagaaaggggttggaaggaagaagtcagttcatggggccaaagcaaagtttttagggaccctttttttttttttttttgaaagtgtgttagcatcaggatattcaaatagaagccttgctgatgagagcctgtgagcccataattcagaacttctgccacgatgtggcagataaccagatagactctggggacctgatggagtgtctgatacagaacaaacaccagaaggacatgaacgagaagtgtgccatcggagttacccacttccagctggtgcagatgaaggattttcggttttcttacaagtttaaaatggcctgcaaggaggacgtgttgaagctttgcccaaacataaaaaagaaggtggacgtggtgatctgcctgagcacgaccgtgcgcaatgacactctgcaggaagccaaggagcacagggtgtccctgaagtgccgcaggcagctccgtgtggaggagctggagatgacggaggacatccgcttggagccagatctatacgaagcctgcaagagtgacatcaaaaacttctgttccgctgtgcaatatggcaacgctcagattatcgaatgtctgaaagaaaacaagaagcagctaagcacccgctgccaccaaaaagtatttaagctgcaggagacagagatgatggacccagagctagactacaccctcatgagggtctgcaagcagatgataaagaggttctgtccggaagcagattctaaaaccatgttgcagtgcttgaagcaaaataaaaacagtgaattgatggatcccaaatgcaaacagatgataaccaagcgccagatcacccagaacacagattaccgcttaaaccccatgttaagaaaagcctgtaaagctgacattcctaaattctgtcacggtatcctgactaaggccaaggatgattcagaattagaaggacaagtcatctcttgcctgaagctgagatatgctgaccagcgcctgtcttcagactgtgaagaccagatccgaatcattatccaggagtccgccctggactaccgcctggatcctcagctccagctgcactgctcagacgagatctccagtctatgtgctgaagaagcagcagcccaagagcagacaggtcaggtggaggagtgcctcaaggtcaacctgctcaagatcaaaacagaattgtgtaaaaaggaagtgctaaacatgctgaaggaaagcaaagcagacatctttgttgacccggtacttcatactgcttgtgccctggacattaaacaccactgcgcagccatcacccctggccgcgggcgtcaaatgtcctgtctcatggaagcactggaggataagcgggtgaggttacagcccgagtgcaaaaagcgcctcaatgaccggattgagatgtggagttacgcagcaaaggtggccccagcagatggcttctctgatcttgccatgcaagtaatgacgtctccatctaagaactacattctctctgtgatcagtgggagcatctgtatattgttcctgattggcctgatgtgtggacggatcaccaagcgagtgacacgagagctcaaggacaggtagagccaccttgaccaccaaaggaactacctatccagtgcccagtttgtacagccctcttgtatagcatccccactcacctcgctcttctcagaagtgacaccaaccccgtgttagagcattagcagatgtccactgcgttgtcccatccagcctccactcgtgtccatggtgtcctcctcctcctcaccgtgcagcagcagcagctggtcgctggggttactgcctttgtttggcaaacttgggtttacctgcctgtagacaagtctctctcataccaacagaacttccggtacttccagaaccaactcacctgacctgcaactcaaaggcttttttaagaaaaccaccaaaaa

SEQ ID NO: 302920 - DNA, 1722 bp, Homo sapiens
ccactactgaccacaagttgccacaaaacttctgactttctttctctttacctttcaggtgcagatgaaggattttcggttttcttacaagtttaaaatggcctgcaaggaggacgtgttgaagctttgcccaaacataaaaaagaaggtggacgtggtgatctgcctgagcacgaccgtgcgcaatgacactctgcaggaagccaaggagcacagggtgtccctgaagtgccgcaggcagctccgtgtggaggagctggagatgacggaggacatccgcttggagccagatctatacgaagcctgcaagagtgacatcaaaaacttctgttccgctgtgcaatatggcaacgctcagattatcgaatgtctgaaagaaaacaagaagcagctaagcacccgctgccaccaaaaagtatttaagctgcaggagacagagatgatggacccagagctagactacaccctcatgagggtctgcaagcagatgataaagaggttctgtccggaagcagattctaaaaccatgttgcagtgcttgaagcaaaataaaaacagtgaattgatggatcccaaatgcaaacagatgataaccaagcgccagatcacccagaacacagattaccgcttaaaccccatgttaagaaaagcctgtaaagctgacattcctaaattctgtcacggtatcctgactaaggccaaggatgattcagaattagaaggacaagtcatctcttgcctgaagctgagatatgctgaccagcgcctgtcttcagactgtgaagaccagatccgaatcattatccaggagtccgccctggactaccgcctggatcctcagctccagctgcactgctcagacgagatctccagtctatgtgctgaagaagcagcagcccaagagcagacaggtcaggtggaggagtgcctcaaggtcaacctgctcaagatcaaaacagaattgtgtaaaaaggaagtgctaaacatgctgaaggaaagcaaagcagacatctttgttgacccggtacttcatactgcttgtgccctggacattaaacaccactgcgcagccatcacccctggccgcgggcgtcaaatgtcctgtctcatggaagcactggaggataagcgggtgaggttacagcccgagtgcaaaaagcgcctcaatgaccggattgagatgtggagttacgcagcaaaggtggccccagcagatggcttctctgatcttgccatgcaagtaatgacgtctccatctaagaactacattctctctgtgatcagtgggagcatctgtatattgttcctgattggcctgatgtgtggacggatcaccaagcgagtgacacgagagctcaaggacaggtagagccaccttgaccaccaaaggaactacctatccagtgcccagtttgtacagccctcttgtatagcatccccactcacctcgctcttctcagaagtgacaccaaccccgtgttagagcattagcagatgtccactgcgttgtcccatccagcctccactcgtgtccatggtgtcctcctcctcctcaccgtgcagcagcagcagctggtcgctggggttactgcctttgtttggcaaacttgggtttacctgcctgtagacaagtctctctcataccaacagaacttccggtacttccagaaccaactcacctgacctgcaactcaaaggcttttttaagaaaaccaccaaaaa

SEQ ID NO: 302921 - DNA, 2909 bp, Homo sapiens
ggcacgaggctcgccgcggactcaagatggcggcgtgtggacgtgtacggaggatgttccgcttgtcggcggcgctgcatctgctgctgctattcgcggccggggccgagaaactccccggccagggcgtccacagccagggccagggtcccggggccaactttgtgtccttcgtagggcaggccggaggcggcggcccggcgggtcagcagctgccccagctgcctcagtcatcgcagcttcagcagcaacagcagcagcagcaacagcaacagcagcctcagccgccgcagccgcctttcccggcgggtgggcctccggcccggcggggaggagcgggggctggtgggggctggaagctggcggaggaagagtcctgcagggaggacgtgacccgcgtgtgccctaagcacacctggagcaacaacctggcggtgctcgagtgcctgcaggatgtgagggagcctgaaaatgaaatttcttcagactgcaatcatttgttgtggaattataagctgaacctaactacagatcccaaatttgaatctgtggccagagaggtttgcaaatctactataacagagattaaagaatgtgctgatgaaccggttggaaaaggttacatggtttcctgcttagtggatcaccgaggcaacatcactgagtatcagtgtcaccagtacattaccaagatgacggccatcatttttagtgattaccgtttaatctgtggcttcatggatgactgcaaaaatgacatcaacattctgaaatgtggcagtattcggcttggagaaaaggatgcacattcacaaggtgaggtggtatcatgcttggagaaaggcctggtgaaagaagcagaagaaagagaacccaagattcaagtttctgaactctgcaagaaagccattctccgggtggctgagctgtcatcggatgactttcacttagaccggcatttatattttgcttgccgagatgatcgggagcgtttttgtgaaaatacacaagctggtgagggcagagtgtataagtgcctctttaaccataaatttgaagaatccatgagtgaaaagtgtcgagaagcacttacaacccgccaaaagctgattgcccaggattataaagtcagttattcattggccaaatcctgtaaaagtgacttgaagaaataccggtgcaatgtggaaaaccttccgcgatcgcgtgaagccaggctctcctacttgttaatgtgcctggagtcagctgtacacagagggcgacaagtcagcagtgagtgccagggggagatgctggattaccgacgcatgttgatggaagacttttctctgagccctgagatcatcctaagctgtcggggggagattgaacaccattgttccggattacatcgaaaagggcggaccctacactgtctgatgaaagtagttcgaggggagaaggggaaccttggaatgaactgccagcaggcgcttcaaacactgattcaggagactgaccctggtgcagattaccgcattgatcgagctttgaatgaagcttgtgaatctgtaatccagacagcctgcaaacatataagatctggagacccaatgatcttgtcgtgcctgatggaacatttatacacagagaagatggtagaagactgtgaacaccgtctcttagagctgcagtatttcatctcccgggattggaagctggaccctgtcctgtaccgcaagtgccagggagacgcttctcgtctttgccacacccacggttggaatgagaccagtgaatttatgcctcagggagctgtgttctcttgtttatacagacacgcctaccgcactgaggaacagggaaggaggctctcacgggagtgccgagctgaagtccaaaggatcctacaccagcgtgccatggatgtcaagctggatcctgccctccaggataagtgcctgattgatctgggaaaatggtgcagtgagaaaacagagactggacaggagctggagtgccttcaggaccatctggatgacttggtggtggagtgtagagatatagttggcaacctcactgagttagaatcagaggatattcaaatagaagccttgctgatgagagcctgtgagcccataattcagaacttctgccacgatgtggcagataaccagatagactctggggacctgatggagtgtctgatacagaacaaacaccagaaggacatgaacgagaagtgtgccatcggagttacccacttccagctggtgcagatgaaggattttcggttttcttacaagtttaaaatggcctgcaaggaggacgtgttgaagctttgcccaaacataaaaaagaagtatgtagcttgtagttgtttcattccactttcccgaagttcctcttagctccggaatgagtatgcgagatgttaggcagccctcctgctgcctcgtggggttagccctggaggcctcccgcatctctcctttgattagcgtggcaaacactcggactgtctggacagagcatctggcgatggtagttctcacatggaggtcccataggctaaaggagcatttttaatttttccaggtcaggccatctaactgaccaagtagggctggattgtgtacttagagaagcagggtgcagtgtgagtgaaagaggcgaactgacctcttccctgcgtcgtcccgttatgtcatctcatctaagatgcagcagtttttgtattggattagatatttagtgaagaaacagaatctttattcatttaagaattaagtctttttgaggaaactgatgagctttttcagcgtgactgtccaaattcttccatgttgctctttgaaaggaccatttctagaacacttgccctcatacaaaccaaattcccaatttgctcaggtttctctaccttt

SEQ ID NO: 302922 - DNA, 2295 bp, Homo sapiens
ggcacgaggctcgccgcggactcaagatggcggcgtgtggacgtgtacggaggatgttccgcttgtcggcggcgctgcatctgctgctgctattcgcggccggggccgagaaactccccggccagggcgtccacagccagggccagggtcccggggccaactttgtgtccttcgtagggcaggccggaggcggcggcccggcgggtcagcagctgccccagctgcctcagtcatcgcagcttcagcagcaacagcagcagcagcaacagcaacagcagcctcagccgccgcagccgcctttcccggcgggtgggcctccggcccggcggggaggagcgggggctggtgggggctggaagctggcggaggaagagtcctgcagggaggacgtgacccgcgtgtgccctaagcacacctggagcaacaacctggcggtgctcgagtgcctgcaggatgtgagggagcctgaaaatgaaatttcttcagactgcaatcatttgttgtggaattataagctgaacctaactacagatcccaaatttgaatctgtggccagagaggtttgcaaatctactataacagagattaaagaatgtgctgatgaaccggttggaaaaggttacatggtttcctgcttagtggatcaccgaggcaacatcactgagtatcagtgtcaccagtacattaccaagatgacggccatcatttttagtgattaccgtttaatctgtggcttcatggatgactgcaaaaatgacatcaacattctgaaatgtggcagtattcggcttggagaaaaggatgcacattcacaaggtgaggtggtatcatgcttggagaaaggcctggtgaaagaagcagaagaaagagaacccaagattcaagtttctgaactctgcaagaaagccattctccgggtggctgagctgtcatcggatgactttcacttagaccggcatttatattttgcttgccgagatgatcgggagcgtttttgtgaaaatacacaagctggtgagggcagagtgtataagtgcctctttaaccataaatttgaagaatccatgagtgaaaagtgtcgagaagcacttacaacccgccaaaagctgattgcccaggattataaagtcagttattcattggccaaatcctgtaaaagtgacttgaagaaataccggtgcaatgtggaaaaccttccgcgatcgcgtgaagccaggctctcctacttgttaatgtgcctggagtcagctgtacacagagggcgacaagtcagcagtgagtgccagggggagatgctggattaccgacgcatgttgatggaagacttttctctgagccctgagatcatcctaagctgtcggggggagattgaacaccattgttccggattacatcgaaaagggcggaccctacactgtctgatgaaagtagttcgaggggagaaggggaaccttggaatgaactgccagcaggcgcttcaaacactgattcaggagactgaccctggtgcagattaccgcattgatcgagctttgaatgaagcttgtgaatctgtaatccagacagcctgcaaacatataagatctggagacccaatgatcttgtcgtgcctgatggaacatttatacacagagaagatggtagaagactgtgaacaccgtctcttagagctgcagtatttcatctcccgggattggaagctggaccctgtcctgtaccgcaagtgccagggagacgcttctcgtctttgccacacccacggttggaatgagaccagtgaatttatgcctcagggagctgtgttctcttgtttatacagacacgcctaccgcactgaggaacagggaaggaggctctcacgggagtgccgagctgaagtccaaaggatcctacaccagcgtgccatggatgtcaagctggatcctgccctccaggataagtgcctgattgatctgggaaaatggtgcagtgagaaaacagagactggacaggagctggagtgccttcaggaccatctggatgacttggtggtggagtgtagagatatagttggcaacctcactgagttagaatcagaggatattcaaatagaagccttgctgatgagagcctgtgagcccataattcagaacttctgccacgatgtggcagataaccagatagactctggggacctgatggagtgtctgatacagaacaaactccagacaaacttcccagacaagctcctttgtgcctctacgtggagagggtgtggaaagttatcacattaaaagatggaggatttgctctgtt

SEQ ID NO: 302923 - DNA, 2126 bp, Homo sapiens
ggcacgaggctcgccgcggactcaagatggcggcgtgtggacgtgtacggaggatgttccgcttgtcggcggcgctgcatctgctgctgctattcgcggccggggccgagaaactccccggccagggcgtccacagccagggccagggtcccggggccaactttgtgtccttcgtagggcaggccggaggcggcggcccggcgggtcagcagctgccccagctgcctcagtcatcgcagcttcagcagcaacagcagcagcagcaacagcaacagcagcctcagccgccgcagccgcctttcccggcgggtgggcctccggcccggcggggaggagcgggggctggtgggggctggaagctggcggaggaagagtcctgcagggaggacgtgacccgcgtgtgccctaagcacacctggagcaacaacctggcggtgctcgagtgcctgcaggatgtgagggagcctgaaaatgaaatttcttcagactgcaatcatttgttgtggaattataagctgaacctaactacagatcccaaatttgaatctgtggccagagaggtttgcaaatctactataacagagattaaagaatgtgctgatgaaccggttggaaaaggttacatggtttcctgcttagtggatcaccgaggcaacatcactgagtatcagtgtcaccagtacattaccaagatgacggccatcatttttagtgattaccgtttaatctgtggcttcatggatgactgcaaaaatgacatcaacattctgaaatgtggcagtattcggcttggagaaaaggatgcacattcacaaggtgaggtggtatcatgcttggagaaaggcctggtgaaagaagcagaagaaagagaacccaagattcaagtttctgaactctgcaagaaagccattctccgggtggctgagctgtcatcggatgactttcacttagaccggcatttatattttgcttgccgagatgatcgggagcgtttttgtgaaaatacacaagctggtgagggcagagtgtataagtgcctctttaaccataaatttgaagaatccatgagtgaaaagtgtcgagaagcacttacaacccgccaaaagctgattgcccaggattataaagtcagttattcattggccaaatcctgtaaaagtgacttgaagaaataccggtgcaatgtggaaaaccttccgcgatcgcgtgaagccaggctctcctacttgttaatgtgcctggagtcagctgtacacagagggcgacaagtcagcagtgagtgccagggggagatgctggattaccgacgcatgttgatggaagacttttctctgagccctgagatcatcctaagctgtcggggggagattgaacaccattgttccggattacatcgaaaagggcggaccctacactgtctgatgaaagtagttcgaggggagaaggggaaccttggaatgaactgccagcaggcgcttcaaacactgattcaggagactgaccctggtgcagattaccgcattgatcgagctttgaatgaagcttgtgaatctgtaatccagacagcctgcaaacatataagatctggagacccaatgatcttgtcgtgcctgatggaacatttatacacagagaagatggtagaagactgtgaacaccgtctcttagagctgcagtatttcatctcccgggattggaagctggaccctgtcctgtaccgcaagtgccagggagacgcttctcgtctttgccacacccacggttggaatgagaccagtgaatttatgcctcagggagctgtgttctcttgtttatacagacacgcctaccgcactgaggaacagggaaggaggctctcacgggagtgccgagctgaagtccaaaggatcctacaccagcgtgccatggatgtcaagctggatcctgccctccaggataagtgcctgattgatctgggaaaatggtgcagtgagaaaacagagactggacaggagctggagtgccttcaggaccatctggatgacttggtggtggagtgtagagatatagttggcaacctcactgagttagaatcagaggtaagtggtatgcagcttactcattggaggagagtggctgccagcatc

SEQ ID NO: 302924 - DNA, 1570 bp, Homo sapiens
ggcacgaggctcgccgcggactcaagatggcggcgtgtggacgtgtacggaggatgttccgcttgtcggcggcgctgcatctgctgctgctattcgcggccggggccgagaaactccccggccagggcgtccacagccagggccagggtcccggggccaactttgtgtccttcgtagggcaggccggaggcggcggcccggcgggtcagcagctgccccagctgcctcagtcatcgcagctaagcacccgctgccaccaaaaagtatttaagctgcaggagacagagatgatggacccagagctagactacaccctcatgagggtctgcaagcagatgataaagaggttctgtccggaagcagattctaaaaccatgttgcagtgcttgaagcaaaataaaaacagtgaattgatggatcccaaatgcaaacagatgataaccaagcgccagatcacccagaacacagattaccgcttaaaccccatgttaagaaaagcctgtaaagctgacattcctaaattctgtcacggtatcctgactaaggccaaggatgattcagaattagaaggacaagtcatctcttgcctgaagctgagatatgctgaccagcgcctgtcttcagactgtgaagaccagatccgaatcattatccaggagtccgccctggactaccgcctggatcctcagctccagctgcactgctcagacgagatctccagtctatgtgctgaagaagcagcagcccaagagcagacaggtcaggtggaggagtgcctcaaggtcaacctgctcaagatcaaaacagaattgtgtaaaaaggaagtgctaaacatgctgaaggaaagcaaagcagacatctttgttgacccggtacttcatactgcttgtgccctggacattaaacaccactgcgcagccatcacccctggccgcgggcgtcaaatgtcctgtctcatggaagcactggaggataagcgggtgaggttacagcccgagtgcaaaaagcgcctcaatgaccggattgagatgtggagttacgcagcaaaggtggccccagcagatggcttctctgatcttgccatgcaagtaatgacgtctccatctaagaactacattctctctgtgatcagtgggagcatctgtatattgttcctgattggcctgatgtgtggacggatcaccaagcgagtgacacgagagctcaaggacaggtagagccaccttgaccaccaaaggaactacctatccagtgcccagtttgtacagccctcttgtatagcatccccactcacctcgctcttctcagaagtgacaccaaccccgtgttagagcattagcagatgtccactgcgttgtcccatccagcctccactcgtgtccatggtgtcctcctcctcctcaccgtgcagcagcagcagctggtcgctggggttactgcctttgtttggcaaacttgggtttacctgcctgtagacaagtctctctcataccaacagaacttccggtacttccagaaccaactcacctgacctgcaactcaaaggcttttttaagaaaaccaccaaaaa

SEQ ID NO: 302925 - DNA, 515 bp, Homo sapiens
cattaattgttaccaatgaagtgtaaatgcatgctgtcttccccaggatgtggcagataaccagatagactctggggacctgatggagtgtctgatacagaacaaacaccagaaggacatgaacgagaagtgtgccatcggagttacccacttccagctggtcagtgacacctggctgccaatatcccatcatagctgcctggatgttgactgaatcctttccttttttggaacatcagagcacctctgatgttctgttaaaagtcatttttttccagccaggcgtggtggctcacacctgtaatcccagcactttgggaggctgaggtgggtggatcacttgaggccaggagttcaagaccaacctgagcaacatggtgaaactccgtctctactgaaaatacaaaattagccaggcatggtggcacacacctgtaatcccagctgtttcaaaggctgaggcaggagaattgcttgaacctgggaggcggaggttgtagtgagccgagatcgcc

SEQ ID NO: 302926 - DNA, 756 bp, Homo sapiens
cccggcgccacccaccaccatggacccccgtctgcccgcctgggcactggtgctgctgggccctgccctggtgttcgcgttgggccccgcgcccaccccagagatgcgtgagaagttgtgcggccaccacttcgtacgcgcgctagtgcgcgtgtgcgggggcccccgctggtccaccgaagccaggaggcctgcggccggaggcgaccgtgagttgctacagtggctggagagacgacatctgctccatgggctggtggccgacagtaatctcacgctgggacctggcctgcagcccctgccccagacctctcaccatcaccgccaccaccgtgcagctgccaccaaccctgcacgctactgctgcctcagtggctgtacccaacaagacctgctgaccctctgtccctactgattcctccttgggtgcagcctcagagtggcctgaggcccagagggtctggtctggtgagctcctgaggccacacagcaccataaagtctcgcatctacaggcctttgattacctcctgggatgggtgctcactatctaccccagaccaatgccacctgcagcctgtggagtcaactgcagaataaatcacaccctagccctggcttggaggatccccgctttcacagatgctggacactgacagccaaatgtcctcactccagaggagccccagacgctccgctccctgcatgtgtaacaccccttcttgctgtctcttagtaaataaacgacccaaagcag

SEQ ID NO: 302927 - DNA, 778 bp, Homo sapiens
cccggcgccacccaccaccatggacccccgtctgcccgcctgggcactggtgctgctgggccctgccctggtgttcgcgttgggccccgcgcccaccccagagatgcgtgagaagttgtgcggccaccacttcgtacgcgcgctagtgcgcgtgtgcgggggcccccgctggtccaccgaagccaggaggcctgcggccggaggcgaccctgagtttcactctgtccccaggtgagttgctacagtggctggagagacgacatctgctccatgggctggtggccgacagtaatctcacgctgggacctggcctgcagcccctgccccagacctctcaccatcaccgccaccaccgtgcagctgccaccaaccctgcacgctactgctgcctcagtggctgtacccaacaagacctgctgaccctctgtccctactgattcctccttgggtgcagcctcagagtggcctgaggcccagagggtctggtctggtgagctcctgaggccacacagcaccataaagtctcgcatctacaggcctttgattacctcctgggatgggtgctcactatctaccccagaccaatgccacctgcagcctgtggagtcaactgcagaataaatcacaccctagccctggcttggaggatccccgctttcacagatgctggacactgacagccaaatgtcctcactccagaggagccccagacgctccgctccctgcatgtgtaacaccccttcttgctgtctcttagtaaataaacgacccaaagcag

SEQ ID NO: 302928 - DNA, 666 bp, Homo sapiens
cccggcgccacccaccaccatggacccccgtctgcccgcctgggcactggtgctgctgggccctgccctggtgttcgcgttgggccccgcgcccaccccagagatgcgtgagaagttgtgcggccaccacttcgtacgcgcgctagtgcgcgtgtgcgggggcccccgctggtccaccgaagccaggaggcctgcggccggaggcgacctgccccagacctctcaccatcaccgccaccaccgtgcagctgccaccaaccctgcacgctactgctgcctcagtggctgtacccaacaagacctgctgaccctctgtccctactgattcctccttgggtgcagcctcagagtggcctgaggcccagagggtctggtctggtgagctcctgaggccacacagcaccataaagtctcgcatctacaggcctttgattacctcctgggatgggtgctcactatctaccccagaccaatgccacctgcagcctgtggagtcaactgcagaataaatcacaccctagccctggcttggaggatccccgctttcacagatgctggacactgacagccaaatgtcctcactccagaggagccccagacgctccgctccctgcatgtgtaacaccccttcttgctgtctcttagtaaataaacgacccaaagcag

SEQ ID NO: 302929 - DNA, 1547 bp, Homo sapiens
ctcgctgcagcctgagctctaggtcttgttttccctgctttgtgttttctgctcgtggacgcccagcctctgtggccctgtggcctgcaggtattgggagatccacagctaagacgccgggaccccctggaagcctagaaatgggaccattgacatttagggatgtggccatagaattctctctgaaggagtggcaatgcctggacactgcacagcggaatttatatagaaatgtgatgttagagaactacagaaacctggtcttcctgggtattactgtttctaagccagacctgatcacttgtctggagcaagggaaagaggcctggagtatgaagagacatgagatcatggtggccaaacccacagaatcttactctgtcacccagtctggaatgcagtagcaagattttggcccactgcagcctcaaccttctggggtcaagtgattgttccacctcagcctcccgagaagcttggactacagacatgcagtactatgcctggctaattttttgattatttgtagagacagagtctcactttgttgcccagtctagtctcaaacttctggctccaaatgatcctcctaccttggtctcccaaagtgttgggattataggtatgagcctgttcacccagccagtattcttaaatttaataagatttgttatgtgtcctaacagaatacacaaggtgcaaataagaatgttgtgtattctcttgcttttgactgaaaagttttgtacatgtctgttaatcctagttggtctgtgatgtggtttagatgttcgtgttcttcaaatcttatgctgcaatgtaatcctcactgttggatgtggaacctggtgggagatgtttagatcatggggcaaatttctcatgaatggctttgtactatcctcttggtaatcaaaaagtttacactctgttaattcagatgagagctgcctcattaaaagaacctggccccttcacctcacatttggttctgtcttttactatgtgatatgtccagttactgttggccttccaccattgtggaagcttactgaaaccttccaccagaggcagatgccggcacacacttcttgtacagtctgcccaacgatgaaccaaacaagcctttttatttataaattatccactctcaggtattcctctatgtgcaaaataatatattctgtaacgttgtctaagttttctgttttcttattgatcttttctctgaattttctatttattattaaaaatggggtcttgatgtctacaattattatgttgctatgtatttcttgtttcacttttgtcaatatttgctttacgtattttggagccctaatgttgtatatacatatacacataaataaataggcataatagttttagattcctggtaaattgatccattttactattgtataatatcagtctttgtctcatgctagtacttgacttaaagcatataatgtctaatataattatgagtgtcttactcaattgtggttatatttgcatgtaataaaaagtttttccattctgttact

SEQ ID NO: 302930 - DNA, 2335 bp, Homo sapiens
ctcgctgcagcctgagctctaggtcttgttttccctgctttgtgttttctgctcgtggacgcccagcctctgtggccctgtggcctgcaggtattgggagatccacagctaagacgccgggaccccctggaagcctagaaatgggaccattgacatttagggatgtggccatagaattctctctgaaggagtggcaatgcctggacactgcacagcggaatttatatagaaatgtgatgttagagaactacagaaacctggtcttcctgggtattactgtttctaagccagacctgatcacttgtctggagcaagggaaagaggcctggagtatgaagagacatgagatcatggtggccaaacccacagttatgtgttctcattttgcccaagacctttggccggagcagaatataaaagattctttccaaaaagtgacactgaaaagatatggaaaatgtagacatgaaaatttaccattaagaaaaggctgtgaaagtatggatgagtgtaagatgcacaaaggaggttgtaatggacttaaccaatgtctcacagctacccagagcaaaatatttcaatgtgataaatatgtaaaagtcgctcataaattttcaaattcaaacagacatgagataagacatactaaaaagaaacctttcaaatgtacaaaatgtggcaaatcatttggcatgatttcatgcctaactgaacatagcagaattcatactagagtaaatttctacaaatgtgaagaatgtggaaaagcctttaactggtcctcaacccttactaaacataagagaattcatacgggagagaaaccttacaaatgtgaagaatgtggtaaagcctttaaccagtcctcaaaccttattaaacataagaaaattcatactggagagaaaccctacaaatgtgaagaatgtggcaaaacttttaaccgattctcaactcttactacccataagataattcatactggagagaaaccctacaaatgtaaagaatgtggtaaagcttttaaccgatcttcaacccttactacccatagaaaaattcatactggagagaaaccttacaaatgtgaagaatgtggcaaagcctttaagcagtcctcaaaccttactacacataagataattcatactggagagaaaccctacaaatgtaaaaaatgtggaaaagcctttaaccagtctgcacaccttaccacacatgaggtaattcatactggagagaaaccctacaaatgtgaaaaatgtggaaaagcctttaatcatttctcacaccttactacacataagataattcatactggagagaaaccttacaaatgtaaagaatgtggtaaagcttttaaacactcttcaacccttactaaacataagataattcatactggagagaagccttacaaatgtaaagaatgtgaaaaagcttttaaccaatcctcaaaacttactgaacataagaaaattcatactggagagaaaccctatgaatgtgaaaaatgtggcaaagcttttaaccagtcctcaaatcttactagacataagaaaagtcatacagaagagaaaccttacaaatgtgaagaatgtggcaaaggttttaaatggccctcaacccttactatccataagataattcatactggagagaaaccatacaaatgtgaagaatgtggcaaagcttttaaccaatcctcaaaacttaccaaacataagaaaattcatactggagagaaaccctacacatgtgaagaatgtggcaaagcctttaaccagtcctcaaaccttactaaacataagagaattcatactggagaaaaaccttacaaatgtgaagaatgtgacaaagcttttaaatggtcctcagtccttactaaacataagataattcataccggagaaaaattacaaatatgaaaattatggcaaagctttaatcaatttacaagtcttactaaacataagaaaatttatactggagagaaactactaacctgaaagatgtgacaataattttgacaacacctcagacttataaaagtaatcatactggtgagaaattctaaaaatgtgaagactatggcaaagtctttaaatggttgtcacactttaggtaagataattcatattggaacaaactacaagtgcaaacaatgtggcaaaacttaatttatgctcacaccttactgcacagaaaagaatttttagttgagaaaaagtatacaaatataaagaatgtggaaaagccgttaatatctgctcacatcttactcagcatcagaaagtacttaataaaagcattataaatggaattactgtcaaaa

SEQ ID NO: 302931 - DNA, 2236 bp, Homo sapiens
ctcgctgcagcctgagctctaggtcttgttttccctgctttgtgttttctgctcgtggacgcccagcctctgtggccctgtggcctgcaggtattgggagatccacagctaagacgccgggaccccctggaagcctagaaatgggaccattgacatttagggatgtggccatagaattctctctgaaggagtggcaatgcctggacactgcacagcggaatttatatagaaatgtgatgttagagaactacagaaacctggtcttcctggttatgtgttctcattttgcccaagacctttggccggagcagaatataaaagattctttccaaaaagtgacactgaaaagatatggaaaatgtagacatgaaaatttaccattaagaaaaggctgtgaaagtatggatgagtgtaagatgcacaaaggaggttgtaatggacttaaccaatgtctcacagctacccagagcaaaatatttcaatgtgataaatatgtaaaagtcgctcataaattttcaaattcaaacagacatgagataagacatactaaaaagaaacctttcaaatgtacaaaatgtggcaaatcatttggcatgatttcatgcctaactgaacatagcagaattcatactagagtaaatttctacaaatgtgaagaatgtggaaaagcctttaactggtcctcaacccttactaaacataagagaattcatacgggagagaaaccttacaaatgtgaagaatgtggtaaagcctttaaccagtcctcaaaccttattaaacataagaaaattcatactggagagaaaccctacaaatgtgaagaatgtggcaaaacttttaaccgattctcaactcttactacccataagataattcatactggagagaaaccctacaaatgtaaagaatgtggtaaagcttttaaccgatcttcaacccttactacccatagaaaaattcatactggagagaaaccttacaaatgtgaagaatgtggcaaagcctttaagcagtcctcaaaccttactacacataagataattcatactggagagaaaccctacaaatgtaaaaaatgtggaaaagcctttaaccagtctgcacaccttaccacacatgaggtaattcatactggagagaaaccctacaaatgtgaaaaatgtggaaaagcctttaatcatttctcacaccttactacacataagataattcatactggagagaaaccttacaaatgtaaagaatgtggtaaagcttttaaacactcttcaacccttactaaacataagataattcatactggagagaagccttacaaatgtaaagaatgtgaaaaagcttttaaccaatcctcaaaacttactgaacataagaaaattcatactggagagaaaccctatgaatgtgaaaaatgtggcaaagcttttaaccagtcctcaaatcttactagacataagaaaagtcatacagaagagaaaccttacaaatgtgaagaatgtggcaaaggttttaaatggccctcaacccttactatccataagataattcatactggagagaaaccatacaaatgtgaagaatgtggcaaagcttttaaccaatcctcaaaacttaccaaacataagaaaattcatactggagagaaaccctacacatgtgaagaatgtggcaaagcctttaaccagtcctcaaaccttactaaacataagagaattcatactggagaaaaaccttacaaatgtgaagaatgtgacaaagcttttaaatggtcctcagtccttactaaacataagataattcataccggagaaaaattacaaatatgaaaattatggcaaagctttaatcaatttacaagtcttactaaacataagaaaatttatactggagagaaactactaacctgaaagatgtgacaataattttgacaacacctcagacttataaaagtaatcatactggtgagaaattctaaaaatgtgaagactatggcaaagtctttaaatggttgtcacactttaggtaagataattcatattggaacaaactacaagtgcaaacaatgtggcaaaacttaatttatgctcacaccttactgcacagaaaagaatttttagttgagaaaaagtatacaaatataaagaatgtggaaaagccgttaatatctgctcacatcttactcagcatcagaaagtacttaataaaagcattataaatggaattactgtcaaaa

SEQ ID NO: 302932 - DNA, 2141 bp, Homo sapiens
agcggagcgacttagaactttctaaaagaggcaaaggcagaggagaacaaaggaaggagggagcaacttgtggatgctgagaaaggttgtctatcaaaaagaatgtcgtatgagctattgagaaaggtgtatatcctgatgttactgaggagtgttctctatgcctctgttagaattatgtgttctcattttgcccaagacctttggccggagcagaatataaaagattctttccaaaaagtgacactgaaaagatatggaaaatgtagacatgaaaatttaccattaagaaaaggctgtgaaagtatggatgagtgtaagatgcacaaaggaggttgtaatggacttaaccaatgtctcacagctacccagagcaaaatatttcaatgtgataaatatgtaaaagtcgctcataaattttcaaattcaaacagacatgagataagacatactaaaaagaaacctttcaaatgtacaaaatgtggcaaatcatttggcatgatttcatgcctaactgaacatagcagaattcatactagagtaaatttctacaaatgtgaagaatgtggaaaagcctttaactggtcctcaacccttactaaacataagagaattcatacgggagagaaaccttacaaatgtgaagaatgtggtaaagcctttaaccagtcctcaaaccttattaaacataagaaaattcatactggagagaaaccctacaaatgtgaagaatgtggcaaaacttttaaccgattctcaactcttactacccataagataattcatactggagagaaaccctacaaatgtaaagaatgtggtaaagcttttaaccgatcttcaacccttactacccatagaaaaattcatactggagagaaaccttacaaatgtgaagaatgtggcaaagcctttaagcagtcctcaaaccttactacacataagataattcatactggagagaaaccctacaaatgtaaaaaatgtggaaaagcctttaaccagtctgcacaccttaccacacatgaggtaattcatactggagagaaaccctacaaatgtgaaaaatgtggaaaagcctttaatcatttctcacaccttactacacataagataattcatactggagagaaaccttacaaatgtaaagaatgtggtaaagcttttaaacactcttcaacccttactaaacataagataattcatactggagagaagccttacaaatgtaaagaatgtgaaaaagcttttaaccaatcctcaaaacttactgaacataagaaaattcatactggagagaaaccctatgaatgtgaaaaatgtggcaaagcttttaaccagtcctcaaatcttactagacataagaaaagtcatacagaagagaaaccttacaaatgtgaagaatgtggcaaaggttttaaatggccctcaacccttactatccataagataattcatactggagagaaaccatacaaatgtgaagaatgtggcaaagcttttaaccaatcctcaaaacttaccaaacataagaaaattcatactggagagaaaccctacacatgtgaagaatgtggcaaagcctttaaccagtcctcaaaccttactaaacataagagaattcatactggagaaaaaccttacaaatgtgaagaatgtgacaaagcttttaaatggtcctcagtccttactaaacataagataattcataccggagaaaaattacaaatatgaaaattatggcaaagctttaatcaatttacaagtcttactaaacataagaaaatttatactggagagaaactactaacctgaaagatgtgacaataattttgacaacacctcagacttataaaagtaatcatactggtgagaaattctaaaaatgtgaagactatggcaaagtctttaaatggttgtcacactttaggtaagataattcatattggaacaaactacaagtgcaaacaatgtggcaaaacttaatttatgctcacaccttactgcacagaaaagaatttttagttgagaaaaagtatacaaatataaagaatgtggaaaagccgttaatatctgctcacatcttactcagcatcagaaagtacttaataaaagcattataaatggaattactgtcaaaa

SEQ ID NO: 302933 - DNA, 2051 bp, Homo sapiens
agcggagcgacttagaactttctaaaagaggcaaaggcagaggagaacaaaggaaggagggagcaacttgtggatgctgagaaagttatgtgttctcattttgcccaagacctttggccggagcagaatataaaagattctttccaaaaagtgacactgaaaagatatggaaaatgtagacatgaaaatttaccattaagaaaaggctgtgaaagtatggatgagtgtaagatgcacaaaggaggttgtaatggacttaaccaatgtctcacagctacccagagcaaaatatttcaatgtgataaatatgtaaaagtcgctcataaattttcaaattcaaacagacatgagataagacatactaaaaagaaacctttcaaatgtacaaaatgtggcaaatcatttggcatgatttcatgcctaactgaacatagcagaattcatactagagtaaatttctacaaatgtgaagaatgtggaaaagcctttaactggtcctcaacccttactaaacataagagaattcatacgggagagaaaccttacaaatgtgaagaatgtggtaaagcctttaaccagtcctcaaaccttattaaacataagaaaattcatactggagagaaaccctacaaatgtgaagaatgtggcaaaacttttaaccgattctcaactcttactacccataagataattcatactggagagaaaccctacaaatgtaaagaatgtggtaaagcttttaaccgatcttcaacccttactacccatagaaaaattcatactggagagaaaccttacaaatgtgaagaatgtggcaaagcctttaagcagtcctcaaaccttactacacataagataattcatactggagagaaaccctacaaatgtaaaaaatgtggaaaagcctttaaccagtctgcacaccttaccacacatgaggtaattcatactggagagaaaccctacaaatgtgaaaaatgtggaaaagcctttaatcatttctcacaccttactacacataagataattcatactggagagaaaccttacaaatgtaaagaatgtggtaaagcttttaaacactcttcaacccttactaaacataagataattcatactggagagaagccttacaaatgtaaagaatgtgaaaaagcttttaaccaatcctcaaaacttactgaacataagaaaattcatactggagagaaaccctatgaatgtgaaaaatgtggcaaagcttttaaccagtcctcaaatcttactagacataagaaaagtcatacagaagagaaaccttacaaatgtgaagaatgtggcaaaggttttaaatggccctcaacccttactatccataagataattcatactggagagaaaccatacaaatgtgaagaatgtggcaaagcttttaaccaatcctcaaaacttaccaaacataagaaaattcatactggagagaaaccctacacatgtgaagaatgtggcaaagcctttaaccagtcctcaaaccttactaaacataagagaattcatactggagaaaaaccttacaaatgtgaagaatgtgacaaagcttttaaatggtcctcagtccttactaaacataagataattcataccggagaaaaattacaaatatgaaaattatggcaaagctttaatcaatttacaagtcttactaaacataagaaaatttatactggagagaaactactaacctgaaagatgtgacaataattttgacaacacctcagacttataaaagtaatcatactggtgagaaattctaaaaatgtgaagactatggcaaagtctttaaatggttgtcacactttaggtaagataattcatattggaacaaactacaagtgcaaacaatgtggcaaaacttaatttatgctcacaccttactgcacagaaaagaatttttagttgagaaaaagtatacaaatataaagaatgtggaaaagccgttaatatctgctcacatcttactcagcatcagaaagtacttaataaaagcattataaatggaattactgtcaaaa

SEQ ID NO: 302934 - DNA, 2746 bp, Homo sapiens
agcggagcgacttagaactttctaaaagaggcaaaggcagaggagaacaaaggaaggagggagcaacttgtggatgctgagaaaggtaaaaacacctccagataaggaataggaacaggctatgacctaatgcttgcttggaccagtataagcatgccagggcaaatatttaggctaaaatgtgggagctaagaacacaaagtacattgatttctttatcacggctagcagatatctaagaatgtcagcacaggtgtttgaatacattttgcttctaagagaagttactatttattcctaattacacgaggaggaaagtccctttgaaaaggaacctctatttcacattttacgatgagcacaatatagttttgcattggtgtatatgaatttgaatgagcaaacagctcttcaagtttttggggtatttttgtttgttttgttttttgggttttcgttttttgtttttgagacggagtctcactctgtcatcaggctggagtgcagtggcacgatctcggctcactgcaacctccgcctcctgcgttcaagtattcccctgcctcagcctcccaagtagctgtgactaaagccgtgcaccacaacgtctggccaattttttgtatttctagtagagacgaagtttcaccatattggccaggcgagtctcaaactcctgacctcgtgatccacccacctcagcctcccaaagtgcttggattatagacatgagcctcagcgcccagccctcttcaagtttttataaaccagtttcagaagttatgtgttctcattttgcccaagacctttggccggagcagaatataaaagattctttccaaaaagtgacactgaaaagatatggaaaatgtagacatgaaaatttaccattaagaaaaggctgtgaaagtatggatgagtgtaagatgcacaaaggaggttgtaatggacttaaccaatgtctcacagctacccagagcaaaatatttcaatgtgataaatatgtaaaagtcgctcataaattttcaaattcaaacagacatgagataagacatactaaaaagaaacctttcaaatgtacaaaatgtggcaaatcatttggcatgatttcatgcctaactgaacatagcagaattcatactagagtaaatttctacaaatgtgaagaatgtggaaaagcctttaactggtcctcaacccttactaaacataagagaattcatacgggagagaaaccttacaaatgtgaagaatgtggtaaagcctttaaccagtcctcaaaccttattaaacataagaaaattcatactggagagaaaccctacaaatgtgaagaatgtggcaaaacttttaaccgattctcaactcttactacccataagataattcatactggagagaaaccctacaaatgtaaagaatgtggtaaagcttttaaccgatcttcaacccttactacccatagaaaaattcatactggagagaaaccttacaaatgtgaagaatgtggcaaagcctttaagcagtcctcaaaccttactacacataagataattcatactggagagaaaccctacaaatgtaaaaaatgtggaaaagcctttaaccagtctgcacaccttaccacacatgaggtaattcatactggagagaaaccctacaaatgtgaaaaatgtggaaaagcctttaatcatttctcacaccttactacacataagataattcatactggagagaaaccttacaaatgtaaagaatgtggtaaagcttttaaacactcttcaacccttactaaacataagataattcatactggagagaagccttacaaatgtaaagaatgtgaaaaagcttttaaccaatcctcaaaacttactgaacataagaaaattcatactggagagaaaccctatgaatgtgaaaaatgtggcaaagcttttaaccagtcctcaaatcttactagacataagaaaagtcatacagaagagaaaccttacaaatgtgaagaatgtggcaaaggttttaaatggccctcaacccttactatccataagataattcatactggagagaaaccatacaaatgtgaagaatgtggcaaagcttttaaccaatcctcaaaacttaccaaacataagaaaattcatactggagagaaaccctacacatgtgaagaatgtggcaaagcctttaaccagtcctcaaaccttactaaacataagagaattcatactggagaaaaaccttacaaatgtgaagaatgtgacaaagcttttaaatggtcctcagtccttactaaacataagataattcataccggagaaaaattacaaatatgaaaattatggcaaagctttaatcaatttacaagtcttactaaacataagaaaatttatactggagagaaactactaacctgaaagatgtgacaataattttgacaacacctcagacttataaaagtaatcatactggtgagaaattctaaaaatgtgaagactatggcaaagtctttaaatggttgtcacactttaggtaagataattcatattggaacaaactacaagtgcaaacaatgtggcaaaacttaatttatgctcacaccttactgcacagaaaagaatttttagttgagaaaaagtatacaaatataaagaatgtggaaaagccgttaatatctgctcacatcttactcagcatcagaaagtacttaataaaagcattataaatggaattactgtcaaaa

SEQ ID NO: 302935 - DNA, 2425 bp, Homo sapiens
ctcgctgcagcctgagctctaggtcttgttttccctgctttgtgttttctgctcgtggacgcccagcctctgtggccctgtggcctgcaggtattgggagatccacagctaagacgccgggaccccctggaagcctagaaatgggaccattgacatttagggatgtggccatagaattctctctgaaggagtggcaatgcctggacactgcacagcggaatttatatagaaatgtgatgttagagaactacagaaacctggtcttcctgggtattactgtttctaagccagacctgatcacttgtctggagcaagggaaagaggcctggagtatgaagagacatgagatcatggtggccaaacccacaggttgtctatcaaaaagaatgtcgtatgagctattgagaaaggtgtatatcctgatgttactgaggagtgttctctatgcctctgttagaattatgtgttctcattttgcccaagacctttggccggagcagaatataaaagattctttccaaaaagtgacactgaaaagatatggaaaatgtagacatgaaaatttaccattaagaaaaggctgtgaaagtatggatgagtgtaagatgcacaaaggaggttgtaatggacttaaccaatgtctcacagctacccagagcaaaatatttcaatgtgataaatatgtaaaagtcgctcataaattttcaaattcaaacagacatgagataagacatactaaaaagaaacctttcaaatgtacaaaatgtggcaaatcatttggcatgatttcatgcctaactgaacatagcagaattcatactagagtaaatttctacaaatgtgaagaatgtggaaaagcctttaactggtcctcaacccttactaaacataagagaattcatacgggagagaaaccttacaaatgtgaagaatgtggtaaagcctttaaccagtcctcaaaccttattaaacataagaaaattcatactggagagaaaccctacaaatgtgaagaatgtggcaaaacttttaaccgattctcaactcttactacccataagataattcatactggagagaaaccctacaaatgtaaagaatgtggtaaagcttttaaccgatcttcaacccttactacccatagaaaaattcatactggagagaaaccttacaaatgtgaagaatgtggcaaagcctttaagcagtcctcaaaccttactacacataagataattcatactggagagaaaccctacaaatgtaaaaaatgtggaaaagcctttaaccagtctgcacaccttaccacacatgaggtaattcatactggagagaaaccctacaaatgtgaaaaatgtggaaaagcctttaatcatttctcacaccttactacacataagataattcatactggagagaaaccttacaaatgtaaagaatgtggtaaagcttttaaacactcttcaacccttactaaacataagataattcatactggagagaagccttacaaatgtaaagaatgtgaaaaagcttttaaccaatcctcaaaacttactgaacataagaaaattcatactggagagaaaccctatgaatgtgaaaaatgtggcaaagcttttaaccagtcctcaaatcttactagacataagaaaagtcatacagaagagaaaccttacaaatgtgaagaatgtggcaaaggttttaaatggccctcaacccttactatccataagataattcatactggagagaaaccatacaaatgtgaagaatgtggcaaagcttttaaccaatcctcaaaacttaccaaacataagaaaattcatactggagagaaaccctacacatgtgaagaatgtggcaaagcctttaaccagtcctcaaaccttactaaacataagagaattcatactggagaaaaaccttacaaatgtgaagaatgtgacaaagcttttaaatggtcctcagtccttactaaacataagataattcataccggagaaaaattacaaatatgaaaattatggcaaagctttaatcaatttacaagtcttactaaacataagaaaatttatactggagagaaactactaacctgaaagatgtgacaataattttgacaacacctcagacttataaaagtaatcatactggtgagaaattctaaaaatgtgaagactatggcaaagtctttaaatggttgtcacactttaggtaagataattcatattggaacaaactacaagtgcaaacaatgtggcaaaacttaatttatgctcacaccttactgcacagaaaagaatttttagttgagaaaaagtatacaaatataaagaatgtggaaaagccgttaatatctgctcacatcttactcagcatcagaaagtacttaataaaagcattataaatggaattactgtcaaaa

SEQ ID NO: 302936 - DNA, 832 bp, Homo sapiens
ttctctggggcccttgtgtggtgtggcgcttttccgtcctctcttctagacataagaaaagtcatacagaagagaaaccttacaaatgtgaagaatgtggcaaaggttttaaatggccctcaacccttactatccataagataattcatactggagagaaaccatacaaatgtgaagaatgtggcaaagcttttaaccaatcctcaaaacttaccaaacataagaaaattcatactggagagaaaccctacacatgtgaagaatgtggcaaagcctttaaccagtcctcaaaccttactaaacataagagaattcatactggagaaaaaccttacaaatgtgaagaatgtgacaaagcttttaaatggtcctcagtccttactaaacataagataattcataccggagaaaaattacaaatatgaaaattatggcaaagctttaatcaatttacaagtcttactaaacataagaaaatttatactggagagaaactactaacctgaaagatgtgacaataattttgacaacacctcagacttataaaagtaatcatactggtgagaaattctaaaaatgtgaagactatggcaaagtctttaaatggttgtcacactttaggtaagataattcatattggaacaaactacaagtgcaaacaatgtggcaaaacttaatttatgctcacaccttactgcacagaaaagaatttttagttgagaaaaagtatacaaatataaagaatgtggaaaagccgttaatatctgctcacatcttactcagcatcagaaagtacttaataaaagcattataaatggaattactgtcaaaa

SEQ ID NO: 302937 - DNA, 1036 bp, Homo sapiens
tcaacacaacttgcttctctccagacttgggcttaaggctctgataaccatgaggcttctcattctcacctgtcttgtggctgttgctcttgccaggcctaaacttcctcttagatacccagaacgccttcagaatccatcagagagcagtgagcctataccattagaatcaagagaggaatacatgaatggtatgaacaggcagagaaacattctgagagaaaaacagactgatgaaatcaaggatactaggaatgagtctactcagaactgtgttgtggcagagcctgagaagatggaatccagcatcagttcatcgagtgaggaaatgtctctcagtaagtgtgcggaacagttttgtagactgaacgaatacaaccaacttcagctgcaagctgtccatgcccaggagcaaattcgcagaatgaatgaaaacagccatgtccaagtgcctttccagcagctcaaccaacttgctgcctacccctatgctgtttggtactatccacaaatcatgcagtatgttcctttcccaccgttttccgacatctccaatcccactgctcatgaaaattatgaaaaaaataacgtcatgctacagtggtgatatgattgaaaatttcattctctgaatttctcctctcaaggaaaaccatcttatctgaagactggactgttgttttagaatagtaaaatcccatattgaaggaaattgttctttttgagttatctacttaatagcatatcattctttttcttaagctaaattttcctagagagtttattgtctaaatttcagttgtgtcttgccatatggagggcacctaatcagagggtattaaagtgtttactaagtttcttgtggacattttgtttaaaaagtctttgaattgccagttctgtaagtgccatcaattaaaatagttttgtgcagtgacagagattttcttttttcttttcaataaattacgatggcaggccggaacatacgcgccgattatacctcaccaaaccctcgggatatatcacacaatcg

SEQ ID NO: 302938 - DNA, 1013 bp, Homo sapiens
tcaacacaacttgcttctctccagacttgggcttaaggctctgataaccatgaggcttctcattctcacctgtcttgtggctgttgctcttgccaggcctaaacttcctcttagatacccagaacgccttcagaatccatcagagagcagtgagcctataccattagaatcaagagaggaatacatgaatggtatgaacaggcagagaaacattctgagagaaaaacagactgatgaaatcaaggatactaggaatgagtctactcagaactgtgttgtggcagagcctgagaagatggaatccagcatcagttcatcgagtgagggaacagttttgtagactgaacgaatacaaccaacttcagctgcaagctgtccatgcccaggagcaaattcgcagaatgaatgaaaacagccatgtccaagtgcctttccagcagctcaaccaacttgctgcctacccctatgctgtttggtactatccacaaatcatgcagtatgttcctttcccaccgttttccgacatctccaatcccactgctcatgaaaattatgaaaaaaataacgtcatgctacagtggtgatatgattgaaaatttcattctctgaatttctcctctcaaggaaaaccatcttatctgaagactggactgttgttttagaatagtaaaatcccatattgaaggaaattgttctttttgagttatctacttaatagcatatcattctttttcttaagctaaattttcctagagagtttattgtctaaatttcagttgtgtcttgccatatggagggcacctaatcagagggtattaaagtgtttactaagtttcttgtggacattttgtttaaaaagtctttgaattgccagttctgtaagtgccatcaattaaaatagttttgtgcagtgacagagattttcttttttcttttcaataaattacgatggcaggccggaacatacgcgccgattatacctcaccaaaccctcgggatatatcacacaatcg

SEQ ID NO: 302939 - DNA, 952 bp, Homo sapiens
tcaacacaacttgcttctctccagacttgggcttaaggctctgataaccatgaggcttctcattctcacctgtcttgtggctgttgctcttgccaggcctaaacttcctcttagatacccagaacgccttcagaatccatcagagagcagtgagcctataccattagaatcaagagaggaatacatgaatggtatgaacaggcagagaaacattctgagagaaaaacagactgatgaaatcaaggatactaggaatgagtctactcagaactgtgttgtggcagagcctgagaagatggaatccagcatcagttcatcgagtgaggagcaaattcgcagaatgaatgaaaacagccatgtccaagtgcctttccagcagctcaaccaacttgctgcctacccctatgctgtttggtactatccacaaatcatgcagtatgttcctttcccaccgttttccgacatctccaatcccactgctcatgaaaattatgaaaaaaataacgtcatgctacagtggtgatatgattgaaaatttcattctctgaatttctcctctcaaggaaaaccatcttatctgaagactggactgttgttttagaatagtaaaatcccatattgaaggaaattgttctttttgagttatctacttaatagcatatcattctttttcttaagctaaattttcctagagagtttattgtctaaatttcagttgtgtcttgccatatggagggcacctaatcagagggtattaaagtgtttactaagtttcttgtggacattttgtttaaaaagtctttgaattgccagttctgtaagtgccatcaattaaaatagttttgtgcagtgacagagattttcttttttcttttcaataaattacgatggcaggccggaacatacgcgccgattatacctcaccaaaccctcgggatatatcacacaatcg

SEQ ID NO: 302940 - DNA, 659 bp, Homo sapiens
aagtaatttagaatgtgtttccttttatgcaggagcaaattcgcagaatgaatgaaaacagccatgtccaagtgcctttccagcagctcaaccaacttgctgcctacccctatgctgtttggtactatccacaaatcatgcagtatgttcctttcccaccgttttccgacatctccaatcccactgctcatgaaaattatgaaaaaaataacgtcatgctacagtggtgatatgattgaaaatttcattctctgaatttctcctctcaaggaaaaccatcttatctgaagactggactgttgttttagaatagtaaaatcccatattgaaggaaattgttctttttgagttatctacttaatagcatatcattctttttcttaagctaaattttcctagagagtttattgtctaaatttcagttgtgtcttgccatatggagggcacctaatcagagggtattaaagtgtttactaagtttcttgtggacattttgtttaaaaagtctttgaattgccagttctgtaagtgccatcaattaaaatagttttgtgcagtgacagagattttcttttttcttttcaataaattacgatggcaggccggaacatacgcgccgattatacctcaccaaaccctcgggatatatcacacaatcg

SEQ ID NO: 302941 - DNA, 759 bp, Homo sapiens
gccaaaattcatcttcagcgcaggttcttcttcaaacagtggcggaggttctggaatcccacagcctcctccgggaatgagcttttatgcagccaaacgagttattggtgataacccatggacacctgaacaattggaacaggtatcacacaaggcttgctcataatagtagttgattgtggacactttcccctatgaagttcatgaaccgtataaaacataattctagtatattcaggctctccagtgaaatatgtttgaaagaagcagttgatgtaatgtgttcttttcatgctagttatttattaagccctaggggcagggaggagtgggacatactgtttagtttttctaatactgcttacatatgtcaagtataaagcacaactcacttataaattgaatatgtttaacttttgtcattttatttttttttattttttaacttttgtaattttaattttttaattataggtttaactttcatctagcttttatggtgcagttaaaatacaatttttcttacattattcaacttttaagggctgtacgttttatgtaaagtgaggagccccagcacttcacaggtgacaatgtggggaaaagcatgactccctgttatattacttcttgggaatttaaaaattggcattaaggattttattctggatttaaacaggacacagatgttctctgagcagcttttaaaaatgactggtgctctacagagaaggtgccttactgtgtctgtgtcatcag

SEQ ID NO: 302942 - DNA, 921 bp, Homo sapiens
cgcctgcctcggcctcccaaagtgctggctttataggcgccggctactgcacccagccctaaaccttttttaaagtgctttcttacatatttcctggtttgatcatcatctgttttgttctgtatttcacaaattggaggaccagtgcttagagagtgaaatgcattaccaaattttctgtttagttcttggcagacctaggactcaatctccgatctcattcctctgtgtctctgtagtgtcagagaaagtagattcacttattcttccctgtagatatgtgaagtagaaagtcttttgtcagatgaattctttattggatgcgcggtcactttcactaacgtccatgctctttgtatgtgaggtctgtgtgaaaatgtgtgaccctgccaaaggagcagctggccagagaaccatcgctgcccttctgccttgccttctggacaaaggaatgatgagcaccgcatgcaccaaaactcattccagctctgctagagtccttaagtgtattggagccccaagttctcaattatttgagcctccgggcgacagagcaagaaaaggctgcgatggatagtgctcggcttagtgctgccaaatcttctccaatgatggaaacaatcaacatgtgcctgcaataccttgatgtgtcagtgctgggcgagctagttcctaggttgtgtgaactgatcagaagtggtgtaggtcttggaactaaggtaagtgtactttccacaagaggaaatgtgcatcttcattagttctggccataaggatataacagccatcatgtttgaaattcatgttttaccacaaaatctaatattatacactaaccattttatttctgtggttgcactgataactgaaaacatgtaactggttcaagaaataaaacatctaactgttccagtaaaaaaa

SEQ ID NO: 302943 - DNA, 879 bp, Homo sapiens
gcggccgccgcctccgcctcccaggatgagctgaatcagcttgaacgggtctttttacgacttggccatgctgaaacagatgaacaattacagaatattatatctaaattccttcctcctgttttgctcaaactctctagcacccaagaaggagtacgtaaaaaggtaatggaactgctggtccatctgaataaacgtataaaaagccgccccaaaatacaacttccagtagagacactgttggttcagtaccaggaccctgctgcagtttcctttgtcacaaattttactataatttatgttaaaatgggctatcctcgcctaccagtggaaaaacaatgtgaactggcccctacgcttcttactgccatggaagggaagcctcagccacagcaggatagcttaatgcatcttttaataccaaccctttttcacatgaaataccctgttgaatcatcaaaatcagcttctccatttaatcttgctgagaaaccaaagactgtgcagctgcttttggacttcatgctagatgtccttctgatgccttatgggtgagttaaaaaataaaagcaaccttgttcttgactgcttttactacggggagttaagtactattttaaatgattaaactctcactagtaaatgaatgcatctcaacatccatttacgtttacaaagatttttttcttctaaacttcagctccactgcttatcggctttacaaatgctgagttgccattgtgattttagactctacctgcctaagatgaaatcagtctttccccataaaaatagttcctgttaggccaaggtgggacgattactgggggctaggagtttcagaccagcctgggtaacagagcgagactctctctcaaa

SEQ ID NO: 302944 - DNA, 504 bp, Homo sapiens
tttctttcagcaacacaaatttaatcttggaggttgtgtttttcaggcaggccatatgaactgtatgatatttctttttagaaaataagacctactcatctgtgagaacagaagctttatctgtgatagaattgctgcttaaaaaacttgaagaatctaaacagtgggaatgtttgacatctgaatgcagagtgctcctaattgagtctttagctactatggagccagacagcagacctgaactgcaggagaaagcagcgttactgaagaaaacacttgaaaatctggaataaattagaaggggaagaaacaaacaagtgccatgttcattgggggttgaagtggtcgccaatcccggattggcgaccatttcaatatcctcctttgatgtccatttctctggtatgcctcctaccccagagctccagatgcctatccatggtgccttcttatatccttgaaatgtcgccaatccgggcgaccatttcaacctataggagatcc

SEQ ID NO: 302945 - DNA, 305 bp, Homo sapiens
atgagtcaagcagctgttgtgactccagttttttcttagtatatttctcttttcttctctgttactaagtggaataaataattccccaaataccagaaacagttggtccaaatttgtattacaagagacaacaacatatcaagagctctctataaatttacatctgtagtcttttgatctgcctatttagaaaggttcagagttgtgcctgtgcctaatagttatctttgggaggaactaggaaagttataagctgtggaggtatttaatgaagtaggtaacataaaggtatgtgaagagattgg

SEQ ID NO: 302946 - DNA, 6303 bp, Homo sapiens
gccaaaattcatcttcagcgcaggttcttcttcaaacagtggcggaggttctggaatcccacagcctcctccgggaatgagcttttatgcagccaaacgagttattggtgataacccatggacacctgaacaattggaacagtgcaaattgggaatcgtgaaattcatagaagctgaacaggtgcctgaacttgaagctgttctccacttggtgattgcctctagtgatacacgccacagtgtggcaacggcagcagacctggaattgaaaagcaaacagagcttaattgactggaataatcctgccatcattaataagatgtacaaggtgtaccttggagatataccactgaagacaaaagagggtgcagttctgaagccagagttgaaaagggaccctgtcagtacaagagtcaagttaaagattgtcccccatctcctccgctctagacaagctgctgaaacgttcccagccaacattcaggtggtgtatgatggactttttggtacaaatacaaattcaaagttaagaacattatccctgcaatttgtgcatcatatttgtataacctgtccagaaatcaagattaagccattaggtccaatgcttttgaatggcctcaccaagctaatcaatgaatacaaagaggaccctaaactactgtcaatggcatattcagctgttggaaaactctccagtcggatgccacatttattcactaaggatatagcgcttgtgcagcagctttttgaagccctttgcaaggaagagcctgagactcgacttgctattcaagaagctttatctatgatggttggagcgtatagtactttggaaggggcacagcgaactctcatggaggcacttgtggcttcgtacttaataaagcctgaagttcaagttcgacaagtggctgtgaaatttgccagtacggtgtttccctcagatcatatcccttccagatatttgctgctactggctgcaggagatccacgtgaagaagttcatggagaagcacaacgcgtattaaggtgtcttccaggtagaaacagaaaagaaagtacttctgagcagatgccttccttcccagaaatggtttattacatccaagaaaaggcttctcatcgaatgaaaactccagtcaagtacatgaccgggaccactgtccttccatttaacccagcagcctttggagagatcgttctgtacttgcgcatgtgccttgcgcacagtgcgggggtggtgcccacctctcagagtttggctgatatgcaggatcatgccccagccattgggcgctacatacggactttaatgtcaagcgggcagatggcaccctcatcatctaacaagagtggggagactaaccctgtccagatctacattggcctgcttcagcagctgttagcaggtgttggaggtttgccggttatgtactgtctattggaagctgtgtcagtgtatccagaaaagctggctaccaaatttgtagacaaaacagaatggataaagagtctgatgaataacagtaaagaagaaatgcgcgaactggcagcgttgttttattctgtagtggtatcaacagtgtcggggaatgagttgaaatcaatgatagaacagcttataaagactacaaaagacaatcacagcccggagatacagcatggatccttgcttgcattgggattcacggtgggaaggtatttggctaaaaagaaaatgagaatgtcagagcaacaagacctggagagaaatgctgacaccctccctgatcaagaggaactcattcagagtgctacagaaacaataggctcatttttggacagtacatcacccctcctggcaattgctgcctgcacagccctgggtgaaattggcagaaatggtccacttccaatccccagtgagggatctggctttaccaaattgcatcttgtagaaagcttactaagtagaataccttccagtaaagaaacaaataagatgaaagaacgagcaatccaaacactgggatattttccagttggggatggagattttcctcaccagaaactcctcttgcaaggtctgatggattctgtggaggccaagcagatagaacttcagttcactattggcgaagccattaccagtgctgcaataggaactagttctgtggctgcccgagatgcctggcaaatgactgaagaggaatatactccacctgctggagccaaagtgaatgatgtggttccatgggtgttggatgtgattttaaataaacatatcatcagccccaacccacacgtgaggcaagcagcctgcatctggctcctttcccttgtcaggaagctaagtacccacaaagaagtgaagtctcatcttaaagaaattcaaagtgcatttgtttcagttctatcagaaaatgatgaacttagccaagatgttgcatcaaagggccttgggttggtttatgaactaggcaatgaacaagatcaacaggaattggtttctacacttgtggaaacacttatgactggcaaaagagttaaacatgaagtttctggagagacagtggtatttcaagggggagctcttggcaaaacaccagatggtcagggcctttctacttacaaggaactttgttctctggcaagtgatcttagccagccagatctggtgtataaatttatgaatttagccaaccatcatgcaatgtggaactctaggaagggtgctgcttttggttttaatgtaattgctaccagagctggagagcagctggctccttttctgcctcagctagttcctcgactttatcgttaccagtttgatcccaaccttggcattcgacaggccatgacaagtatttggaatgcgttggtcactgacaaatccatggtggataaatatttgaaagaaattcttcaagatttggttaagaaccttacaagcaatatgtggcgagttcgagaatccagctgtttagctttgaatgatttattgagaggaagacccttagatgacatcattgataaacttccagaaatttgggaaacgctttttagagtacaagatgatatcaaggaatctgtacgaaaagcggcagaactagctctgaaaactctgagcaaggtctgtgtgaaaatgtgtgaccctgccaaaggagcagctggccagagaaccatcgctgcccttctgccttgccttctggacaaaggaatgatgagcaccgtgacggaagttcgagccctcagcattaacacccttgtgaagatcagcaaaagtgcaggagccatgttgaaaccgcatgcaccaaaactcattccagctctgctagagtccttaagtgtattggagccccaagttctcaattatttgagcctccgggcgacagagcaagaaaaggctgcgatggatagtgctcggcttagtgctgccaaatcttctccaatgatggaaacaatcaacatgtgcctgcaataccttgatgtgtcagtgctgggcgagctagttcctaggttgtgtgaactgatcagaagtggtgtaggtcttggaactaagggtggctgtgccagtgtcattgtgtcattaactactcagtgtcctcaggacctaacaccttactcaggtaaacttatgagtgctttgctgagtggcctgacagatcggaacagtgtgattcagaaatcttgtgcatttgctatgggccatttagttcggacctcacgggatagcagcactgaaaaactcctgcagaagctcaatgggtggtatatggagaaagaagaacctatctacaagacctcttgtgctttgactattcatgctattggacgatacagccctgatgtattaaagaatcatgcaaaagaagtcctgcctctggcatttttaggcatgcatgaaattgctgatgaggagaaatccgaaaaagaagaatgtaatttatggaccgaagtgtggcaggaaaacgtacctggatcctttggtggcattcgattatacctgcaggagttaattactattacccagaaggctttgcagtctcagtcctggaaaatgaaagcccagggtgcaattgccatggcatcaattgcaaaacagactagctctctagtacctccatatctcggaatgatactgaccgcattgctgcaaggcctggctggaagaacgtgggcaggaaaggaggagctattgaaagccattgcctgtgtggtgacagcttgcagtgcagagctggaaaagtctgtgcccaatcaacccagcacaaatgaaattcttcaagctgttctgaaggaatgtagcaaagagaatgtcaaatacaagattgtagcaatcagctgtgcagctgatatcttgaaggccaccaaagaggacagattccaggagttctctaacattgtcatacctctcatcaagaagaactcacttgaaagcagtggggtccggacaaccaaaaatgaagaggagaatgaaaaggaaaaggagctccagctggaatatctgctgggtgcctttgaaagcctgggcaaagcctggccgcgaaacgcggagacccaacgttgttatcgtcaggagctgtgcaaactgatgtgtgaacggctaaaactcagcacgtggaaagtgcagctaggagtcctgcaatcaatgaatgccttttttcaggggttaatgcttttggaagaagaacatgccgatcctgaggctttggctgaaattctgcttgaaacttgtaaatcaatcacatattctttagaaaataagacctactcatctgtgagaacagaagctttatctgtgatagaattgctgcttaaaaaacttgaagaatctaaacagtgggaatgtttgacatctgaatgcagagtgctcctaattgagtctttagctactatggagccagacagcagacctgaactgcaggagaaagcagcgttactgaagaaaacacttgaaaatctggaataaattagaaggggaagaaacaaacaagtgccatgttcattgggggttgaagtggtggtgttctttgaaaaaccaagtgggaaaaagtaaagattaatctgtagcatgcatcattccttggctgaaataaaaagaaaaagccttaaattttgttccttattagctttattttactttatgtttttaaagtatctgggctgagtgagcttaatggaaccttggatgtttgaggggtggttgtaaaggaaactggcagaaatagttactaaaagagttcaagctgttattaaaggaattaatagacagagttgcagagcaagctggataaaaatcttagaactgcattcaaattagttatttcaggaaggggccctataaataacttattttaacctccctcttacacctgaagaaataggaagctgtgtcatctcagaggctttctgaggcctgtgccaaagtcagaacccaggtgtttaatgtctggccctggatactttcttttatggccatctgccaaatcagtgctaaccccggcttacccaagaaacttccaagatgaggtacgtttagggtggcacacagcagtctttgtgccagaactaaactgacccttaccattgggtttctgaaagccagaagctaaacattgtcttgtcatgtgtttaggtggttgatttggagaaaatgattgtttagcatctttacagatggagaggacagagtcagtctccttcggataattccaatcgtcttccttttacaggtggataaagtagattaggacaagatcacacattctatctgtgtctgtggctgcatattttgcaaaaccagaaacaaaatcgcagactgccgtggtttagaccatttataatgtcaaaactgtaatgacaaatttctgttcacttttatgctaccagtatgactttataggggagaaggaaagccttttaattagccacctgggaattactcttttaaaaaatgccttttctcaaaagaacatgataccactccaagtaaatcattgccactaggggttttcctccttccttctgttgcccatgcccctgcctgaaagtgtagggtaagaggaaaaacaagtaaaaccttagtgttgatggtaaactgagaactctgtagcttaccttggattccagagcagaagactggtttacattcagtactcatccttattgacgttaacaccaggaatctccatgtttattatttttcgtggaaactccatgtttattatttttggtggtctctattgaccaatgtatttcaaacttttttgactgcaagtcataataaaaataactttttacatcacgaaaaaaaaaatg

SEQ ID NO: 302947 - DNA, 6279 bp, Homo sapiens
gcggccgccgcctccgcctcccaggatgagctgaatcagcttgaacgggtctttttacgacttggccatgctgaaacagatgaacaattacagaatattatatctaaattccttcctcctgttttgctcaaactctctagcacccaagaaggagtacgtaaaaaggtaatggaactgctggtccatctgaataaacgtataaaaagccgccccaaaatacaacttccagtagagacactgtgttgaaaccttccatagcttaattgactggaataatcctgccatcattaataagatgtacaaggtgtaccttggagatataccactgaagacaaaagagggtgcagttctgaagccagagttgaaaagggaccctgtcagtacaagagtcaagttaaagattgtcccccatctcctccgctctagacaagctgctgaaacgttcccagccaacattcaggtggtgtatgatggactttttggtacaaatacaaattcaaagttaagaacattatccctgcaatttgtgcatcatatttgtataacctgtccagaaatcaagattaagccattaggtccaatgcttttgaatggcctcaccaagctaatcaatgaatacaaagaggaccctaaactactgtcaatggcatattcagctgttggaaaactctccagtcggatgccacatttattcactaaggatatagcgcttgtgcagcagctttttgaagccctttgcaaggaagagcctgagactcgacttgctattcaagaagctttatctatgatggttggagcgtatagtactttggaaggggcacagcgaactctcatggaggcacttgtggcttcgtacttaataaagcctgaagttcaagttcgacaagtggctgtgaaatttgccagtacggtgtttccctcagatcatatcccttccagatatttgctgctactggctgcaggagatccacgtgaagaagttcatggagaagcacaacgcgtattaaggtgtcttccaggtagaaacagaaaagaaagtacttctgagcagatgccttccttcccagaaatggtttattacatccaagaaaaggcttctcatcgaatgaaaactccagtcaagtacatgaccgggaccactgtccttccatttaacccagcagcctttggagagatcgttctgtacttgcgcatgtgccttgcgcacagtgcgggggtggtgcccacctctcagagtttggctgatatgcaggatcatgccccagccattgggcgctacatacggactttaatgtcaagcgggcagatggcaccctcatcatctaacaagagtggggagactaaccctgtccagatctacattggcctgcttcagcagctgttagcaggtgttggaggtttgccggttatgtactgtctattggaagctgtgtcagtgtatccagaaaagctggctaccaaatttgtagacaaaacagaatggataaagagtctgatgaataacagtaaagaagaaatgcgcgaactggcagcgttgttttattctgtagtggtatcaacagtgtcggggaatgagttgaaatcaatgatagaacagcttataaagactacaaaagacaatcacagcccggagatacagcatggatccttgcttgcattgggattcacggtgggaaggtatttggctaaaaagaaaatgagaatgtcagagcaacaagacctggagagaaatgctgacaccctccctgatcaagaggaactcattcagagtgctacagaaacaataggctcatttttggacagtacatcacccctcctggcaattgctgcctgcacagccctgggtgaaattggcagaaatggtccacttccaatccccagtgagggatctggctttaccaaattgcatcttgtagaaagcttactaagtagaataccttccagtaaagaaacaaataagatgaaagaacgagcaatccaaacactgggatattttccagttggggatggagattttcctcaccagaaactcctcttgcaaggtctgatggattctgtggaggccaagcagatagaacttcagttcactattggcgaagccattaccagtgctgcaataggaactagttctgtggctgcccgagatgcctggcaaatgactgaagaggaatatactccacctgctggagccaaagtgaatgatgtggttccatgggtgttggatgtgattttaaataaacatatcatcagccccaacccacacgtgaggcaagcagcctgcatctggctcctttcccttgtcaggaagctaagtacccacaaagaagtgaagtctcatcttaaagaaattcaaagtgcatttgtttcagttctatcagaaaatgatgaacttagccaagatgttgcatcaaagggccttgggttggtttatgaactaggcaatgaacaagatcaacaggaattggtttctacacttgtggaaacacttatgactggcaaaagagttaaacatgaagtttctggagagacagtggtatttcaagggggagctcttggcaaaacaccagatggtcagggcctttctacttacaaggaactttgttctctggcaagtgatcttagccagccagatctggtgtataaatttatgaatttagccaaccatcatgcaatgtggaactctaggaagggtgctgcttttggttttaatgtaattgctaccagagctggagagcagctggctccttttctgcctcagctagttcctcgactttatcgttaccagtttgatcccaaccttggcattcgacaggccatgacaagtatttggaatgcgttggtcactgacaaatccatggtggataaatatttgaaagaaattcttcaagatttggttaagaaccttacaagcaatatgtggcgagttcgagaatccagctgtttagctttgaatgatttattgagaggaagacccttagatgacatcattgataaacttccagaaatttgggaaacgctttttagagtacaagatgatatcaaggaatctgtacgaaaagcggcagaactagctctgaaaactctgagcaaggtctgtgtgaaaatgtgtgaccctgccaaaggagcagctggccagagaaccatcgctgcccttctgccttgccttctggacaaaggaatgatgagcaccgtgacggaagttcgagccctcagcattaacacccttgtgaagatcagcaaaagtgcaggagccatgttgaaaccgcatgcaccaaaactcattccagctctgctagagtccttaagtgtattggagccccaagttctcaattatttgagcctccgggcgacagagcaagaaaaggctgcgatggatagtgctcggcttagtgctgccaaatcttctccaatgatggaaacaatcaacatgtgcctgcaataccttgatgtgtcagtgctgggcgagctagttcctaggttgtgtgaactgatcagaagtggtgtaggtcttggaactaagggtggctgtgccagtgtcattgtgtcattaactactcagtgtcctcaggacctaacaccttactcaggtaaacttatgagtgctttgctgagtggcctgacagatcggaacagtgtgattcagaaatcttgtgcatttgctatgggccatttagttcggacctcacgggatagcagcactgaaaaactcctgcagaagctcaatgggtggtatatggagaaagaagaacctatctacaagacctcttgtgctttgactattcatgctattggacgatacagccctgatgtattaaagaatcatgcaaaagaagtcctgcctctggcatttttaggcatgcatgaaattgctgatgaggagaaatccgaaaaagaagaatgtaatttatggaccgaagtgtggcaggaaaacgtacctggatcctttggtggcattcgattatacctgcaggagttaattactattacccagaaggctttgcagtctcagtcctggaaaatgaaagcccagggtgcaattgccatggcatcaattgcaaaacagactagctctctagtacctccatatctcggaatgatactgaccgcattgctgcaaggcctggctggaagaacgtgggcaggaaaggaggagctattgaaagccattgcctgtgtggtgacagcttgcagtgcagagctggaaaagtctgtgcccaatcaacccagcacaaatgaaattcttcaagctgttctgaaggaatgtagcaaagagaatgtcaaatacaagattgtagcaatcagctgtgcagctgatatcttgaaggccaccaaagaggacagattccaggagttctctaacattgtcatacctctcatcaagaagaactcacttgaaagcagtggggtccggacaaccaaaaatgaagaggagaatgaaaaggaaaaggagctccagctggaatatctgctgggtgcctttgaaagcctgggcaaagcctggccgcgaaacgcggagacccaacgttgttatcgtcaggagctgtgcaaactgatgtgtgaacggctaaaactcagcacgtggaaagtgcagctaggagtcctgcaatcaatgaatgccttttttcaggggttaatgcttttggaagaagaacatgccgatcctgaggctttggctgaaattctgcttgaaacttgtaaatcaatcacatattctttagaaaataagacctactcatctgtgagaacagaagctttatctgtgatagaattgctgcttaaaaaacttgaagaatctaaacagtgggaatgtttgacatctgaatgcagagtgctcctaattgagtctttagctactatggagccagacagcagacctgaactgcaggagaaagcagcgttactgaagaaaacacttgaaaatctggaataaattagaaggggaagaaacaaacaagtgccatgttcattgggggttgaagtggtggtgttctttgaaaaaccaagtgggaaaaagtaaagattaatctgtagcatgcatcattccttggctgaaataaaaagaaaaagccttaaattttgttccttattagctttattttactttatgtttttaaagtatctgggctgagtgagcttaatggaaccttggatgtttgaggggtggttgtaaaggaaactggcagaaatagttactaaaagagttcaagctgttattaaaggaattaatagacagagttgcagagcaagctggataaaaatcttagaactgcattcaaattagttatttcaggaaggggccctataaataacttattttaacctccctcttacacctgaagaaataggaagctgtgtcatctcagaggctttctgaggcctgtgccaaagtcagaacccaggtgtttaatgtctggccctggatactttcttttatggccatctgccaaatcagtgctaaccccggcttacccaagaaacttccaagatgaggtacgtttagggtggcacacagcagtctttgtgccagaactaaactgacccttaccattgggtttctgaaagccagaagctaaacattgtcttgtcatgtgtttaggtggttgatttggagaaaatgattgtttagcatctttacagatggagaggacagagtcagtctccttcggataattccaatcgtcttccttttacaggtggataaagtagattaggacaagatcacacattctatctgtgtctgtggctgcatattttgcaaaaccagaaacaaaatcgcagactgccgtggtttagaccatttataatgtcaaaactgtaatgacaaatttctgttcacttttatgctaccagtatgactttataggggagaaggaaagccttttaattagccacctgggaattactcttttaaaaaatgccttttctcaaaagaacatgataccactccaagtaaatcattgccactaggggttttcctccttccttctgttgcccatgcccctgcctgaaagtgtagggtaagaggaaaaacaagtaaaaccttagtgttgatggtaaactgagaactctgtagcttaccttggattccagagcagaagactggtttacattcagtactcatccttattgacgttaacaccaggaatctccatgtttattatttttcgtggaaactccatgtttattatttttggtggtctctattgaccaatgtatttcaaacttttttgactgcaagtcataataaaaataactttttacatcacgaaaaaaaaaatg

SEQ ID NO: 302948 - DNA, 5096 bp, Homo sapiens
gccaaaattcatcttcagcgcaggttcttcttcaaacagtggcggaggttctggaatcccacagcctcctccgggaatgagcttttatgcagccaaacgagttattggtgataacccatggacacctgaacaattggaacagtgcaaattgggaatcgtgaaattcatagaagctgaacaggtgcctgaacttgaagctgttctccacttggtgattgcctctagtgatacacgccacagtgtggcaacggcagcagacctggaattgaaaagcaaacagagcttaattgactggaataatcctgccatcattaataagatgtacaaggtgtaccttggagatataccactgaagacaaaagagggtgcagttctgaagccagagttgaaaagggaccctgtcagtacaagagtcaagttaaagattgtcccccatctcctccgctctagacaagctgctgaaacgttcccagccaacattcaggtggtgtatgatggactttttggtacaaatacaaattcaaagttaagaacattatccctgcaatttgtgcatcatatttgtataacctgtccagaaatcaagattaagccattaggtccaatgcttttgaatggcctcaccaagctaatcaatgaatacaaagaggaccctaaactactgtcaatggcatattcagctgttggaaaactctccagtcggatgccacatttattcactaaggatatagcgcttgtgcagcagctttttgaagccctttgcaaggaagagcctgagactcgacttgctattcaagaagctttatctatgatggttggagcgtatagtactttggaaggggcacagcgaactctcatggaggcacttgtggcttcgtacttaataaagcctgaagttcaagttcgacaagtggctgtgaaatttgccagtacggtgtttccctcagatcatatcccttccagatatttgctgctactggctgcaggagatccacgtgaagaagttcatggagaagcacaacgcgtattaaggtgtcttccaggtagaaacagaaaagaaagtacttctgagcagatgccttccttcccagaaatggtttattacatccaagaaaaggcttctcatcgaatgaaaactccagtcaagtacatgaccgggaccactgtccttccatttaacccagcagcctttggagagatcgttctgtacttgcgcatgtgccttgcgcacagtgcgggggtggtgcccacctctcagagtttggctgatatgcaggatcatgccccagccattgggcgctacatacggactttaatgtcaagcgggcagatggcaccctcatcatctaacaagagtggggagactaaccctgtccagatctacattggcctgcttcagcagctgttagcaggtgttggaggtttgccggttatgtactgtctattggaagctgtgtcagtgtatccagaaaagctggctaccaaatttgtagacaaaacagaatggataaagagtctgatgaataacagtaaagaagaaatgcgcgaactggcagcgttgttttattctgtagtggtatcaacagtgtcggggaatgagttgaaatcaatgatagaacagcttataaagactacaaaagacaatcacagcccggagatacagcatggatccttgcttgcattgggattcacggtgggaaggtatttggctaaaaagaaaatgagaatgtcagagcaacaagacctggagagaaatgctgacaccctccctgatcaagaggaactcattcagagtgctacagaaacaataggctcatttttggacagtacatcacccctcctggcaattgctgcctgcacagccctgggtgaaattggcagaaatggtccacttccaatccccagtgagggatctggctttaccaaattgcatcttgtagaaagcttactaagtagaataccttccagtaaagaaacaaataagatgaaagaacgagcaatccaaacactgggatattttccagttggggatggagattttcctcaccagaaactcctcttgcaaggtctgatggattctgtggaggccaagcagatagaacttcagttcactattggcgaagccattaccagtgctgcaataggaactagttctgtggctgcccgagatgcctggcaaatgactgaagaggaatatactccacctgctggagccaaagtgaatgatgtggttccatgggtgttggatgtgattttaaataaacatatcatcagccccaacccacacgtgaggcaagcagcctgcatctggctcctttcccttgtcaggaagctaagtacccacaaagaagtgaagtctcatcttaaagaaattcaaagtgcatttgtttcagttctatcagaaaatgatgaacttagccaagatgttgcatcaaagggccttgggttggtttatgaactaggcaatgaacaagatcaacaggaattggtttctacacttgtggaaacacttatgactggcaaaagagttaaacatgaagtttctggagagacagtggtatttcaagggggagctcttggcaaaacaccagatggtcagggcctttctacttacaaggaactttgttctctggcaagtgatcttagccagccagatctggtgtataaatttatgaatttagccaaccatcatgcaatgtggaactctaggaagggtgctgcttttggttttaatgtaattgctaccagagctggagagcagctggctccttttctgcctcagctagttcctcgactttatcgttaccagtttgatcccaaccttggcattcgacaggccatgacaagtatttggaatgcgttggtcactgacaaatccatggtggataaatatttgaaagaaattcttcaagatttggttaagaaccttacaagcaatatgtggcgagttcgagaatccagctgtttagctttgaatgatttattgagaggaagacccttagatgacatcattgataaacttccagaaatttgggaaacgctttttagagtacaagatgatatcaaggaatctgtacgaaaagcggcagaactagctctgaaaactctgagcaaggtctgtgtgaaaatgtgtgaccctgccaaaggagcagctggccagagaaccatcgctgcccttctgccttgccttctggacaaaggaatgatgagcaccgtgacggaagttcgagccctcagcattaacacccttgtgaagatcagcaaaagtgcaggagccatgttgaaaccgcatgcaccaaaactcattccagctctgctagagtccttaagtgtattggagccccaagttctcaattatttgagcctccgggcgacagagcaagaaaaggctgcgatggatagtgctcggcttagtgctgccaaatcttctccaatgatggaaacaatcaacatgtgcctgcaataccttgatgtgtcagtgctgggcgagctagttcctaggttgtgtgaactgatcagaagtggtgtaggtcttggaactaagggtggctgtgccagtgtcattgtgtcattaactactcagtgtcctcaggacctaacaccttactcaggtaaacttatgagtgctttgctgagtggcctgacagatcggaacagtgtgattcagaaatcttgtgcatttgctatgggccatttagttcggacctcacgggatagcagcactgaaaaactcctgcagaagctcaatgggtggtatatggagaaagaagaacctatctacaagacctcttgtgctttgactattcatgctattggacgatacagccctgatgtattaaagaatcatgcaaaagaagtcctgcctctggcatttttaggcatgcatgaaattgctgatgaggagaaatccgaaaaagaagaatgtaatttatggaccgaagtgtggcaggaaaacgtacctggatcctttggtggcattcgattatacctgcaggagttaattactattacccagaaggctttgcagtctcagtcctggaaaatgaaagcccagggtgcaattgccatggcatcaattgcaaaacagactagctctctagtacctccatatctcggaatgatactgaccgcattgctgcaaggcctggctggaagaacgtgggcaggaaaggaggagctattgaaagccattgcctgtgtggtgacagcttgcagtgcagagctggaaaagtctgtgcccaatcaacccagcacaaatgaaattcttcaagctgttctgaaggaatgtagcaaagagaatgtcaaatacaagattgtagcaatcagctgtgcagctgatatcttgaaggccaccaaagaggacagattccaggagttctctaacattgtcatacctctcatcaagaagaactcacttgaaagcagtggggtccggacaaccaaaaatgaagaggagaatgaaaaggaaaaggagctccagctggaatatctgctgggtgcctttgaaagcctgggcaaagcctggccgcgaaacgcggagacccaacgttgttatcgtcaggagctgtgcaaactgatgtgtgaacggctaaaactcagcacgtggaaagtgcagctaggagtcctgcaatcaatgaatgccttttttcaggggttaatgcttttggaagaagaacatgccgatcctgaggctttggctgaaattctgcttgaaacttgtaaatcaatcacatattctttagaaaataagacctactcatctgtgagaacagaagctttatctgtgatagaattgctgcttaaaaaacttgaagaatctaaacagtgggaatgtttgacatctgaatgcagagtgctcctaattgagtctttagctactatggagccagacagcagacctgaactgcaggagaaagcagcgttactgaagaaaacacttgaaaatctggaataaattagaaggggaagaaacaaacaagtgccatgttcattgggggttgaagtggtggtgttctttgaaaaaccaagtgggaaaaagtaaagattaatctgtagcatgcatcattccttggctgaaataaaaagaaaaagcctta

SEQ ID NO: 302949 - DNA, 4197 bp, Homo sapiens
  misc_feature (51)..(51): n is a, c, g, or t
  misc_feature (54)..(54): n is a, c, g, or t
gacaagagtggggagactaaccctgtccagatctacattggcctgcttcanacntgtttagcaggtgttggaggtttgccggttatgtactgtctattggaagctgtgtcagtgtatccagaaaagctggctaccaaatttgtagacaaaacagaatggataaagattctgagcagatgccttccttcccagaaatggtttattacatccaagaaaaggcttctcatcgaatgaaaactccagtcaagtacatgaccgggaccactgtccttccatttaacccagcagcctttggagagatcgttctgtacttgcgcatgtgccttgcgcacagtgcgggggtggtgcccacctctcagagtttggctgatatgcaggatcatgccccagccattgggcgctacatacggactttaatgtcaagcgggcagatggcaccctcatcatctaacaagagtggggagactaaccctgtccagatctacattggcctgcttcagcagctgttagcaggtgttggaggtttgccggttatgtactgtctattggaagctgtgtcagtgtatccagaaaagctggctaccaaatttgtagacaaaacagaatggataaagagtctgatgaataacagtaaagaagaaatgcgcgaactggcagcgttgttttattctgtagtggtatcaacagtgtcggggaatgagttgaaatcaatgatagaacagcttataaagactacaaaagacaatcacagcccggagatacagcatggatccttgcttgcattgggattcacggtgggaaggtatttggctaaaaagaaaatgagaatgtcagagcaacaagacctggagagaaatgctgacaccctccctgatcaagaggaactcattcagagtgctacagaaacaataggctcatttttggacagtacatcacccctcctggcaattgctgcctgcacagccctgggtgaaattggcagaaatggtccacttccaatccccagtgagggatctggctttaccaaattgcatcttgtagaaagcttactaagtagaataccttccagtaaagaaacaaataagatgaaagaacgagcaatccaaacactgggatattttccagttggggatggagattttcctcaccagaaactcctcttgcaaggtctgatggattctgtggaggccaagcagatagaacttcagttcactattggcgaagccattaccagtgctgcaataggaactagttctgtggctgcccgagatgcctggcaaatgactgaagaggaatatactccacctgctggagccaaagtgaatgatgtggttccatgggtgttggatgtgattttaaataaacatatcatcagccccaacccacacgtgaggcaagcagcctgcatctggctcctttcccttgtcaggaagctaagtacccacaaagaagtgaagtctcatcttaaagaaattcaaagtgcatttgtttcagttctatcagaaaatgatgaacttagccaagatgttgcatcaaagggccttgggttggtttatgaactaggcaatgaacaagatcaacaggaattggtttctacacttgtggaaacacttatgactggcaaaagagttaaacatgaagtttctggagagacagtggtatttcaagggggagctcttggcaaaacaccagatggtcagggcctttctacttacaaggaactttgttctctggcaagtgatcttagccagccagatctggtgtataaatttatgaatttagccaaccatcatgcaatgtggaactctaggaagggtgctgcttttggttttaatgtaattgctaccagagctggagagcagctggctccttttctgcctcagctagttcctcgactttatcgttaccagtttgatcccaaccttggcattcgacaggccatgacaagtatttggaatgcgttggtcactgacaaatccatggtggataaatatttgaaagaaattcttcaagatttggttaagaaccttacaagcaatatgtggcgagttcgagaatccagctgtttagctttgaatgatttattgagaggaagacccttagatgacatcattgataaacttccagaaatttgggaaacgctttttagagtacaagatgatatcaaggaatctgtacgaaaagcggcagaactagctctgaaaactctgagcaaggtctgtgtgaaaatgtgtgaccctgccaaaggagcagctggccagagaaccatcgctgcccttctgccttgccttctggacaaaggaatgatgagcaccgtgacggaagttcgagccctcagcattaacacccttgtgaagatcagcaaaagtgcaggagccatgttgaaaccgcatgcaccaaaactcattccagctctgctagagtccttaagtgtattggagccccaagttctcaattatttgagcctccgggcgacagagcaagaaaaggctgcgatggatagtgctcggcttagtgctgccaaatcttctccaatgatggaaacaatcaacatgtgcctgcaataccttgatgtgtcagtgctgggcgagctagttcctaggttgtgtgaactgatcagaagtggtgtaggtcttggaactaagggtggctgtgccagtgtcattgtgtcattaactactcagtgtcctcaggacctaacaccttactcaggtaaacttatgagtgctttgctgagtggcctgacagatcggaacagtgtgattcagaaatcttgtgcatttgctatgggccatttagttcggacctcacgggatagcagcactgaaaaactcctgcagaagctcaatgggtggtatatggagaaagaagaacctatctacaagacctcttgtgctttgactattcatgctattggacgatacagccctgatgtattaaagaatcatgcaaaagaagtcctgcctctggcatttttaggcatgcatgaaattgctgatgaggagaaatccgaaaaagaagaatgtaatttatggaccgaagtgtggcaggaaaacgtacctggatcctttggtggcattcgattatacctgcaggagttaattactattacccagaaggctttgcagtctcagtcctggaaaatgaaagcccagggtgcaattgccatggcatcaattgcaaaacagactagctctctagtacctccatatctcggaatgatactgaccgcattgctgcaaggcctggctggaagaacgtgggcaggaaaggaggagctattgaaagccattgcctgtgtggtgacagcttgcagtgcagagctggaaaagtctgtgcccaatcaacccagcacaaatgaaattcttcaagctgttctgaaggaatgtagcaaagagaatgtcaaatacaagattgtagcaatcagctgtgcagctgatatcttgaaggccaccaaagaggacagattccaggagttctctaacattgtcatacctctcatcaagaagaactcacttgaaagcagtggggtccggacaaccaaaaatgaagaggagaatgaaaaggaaaaggagctccagctggaatatctgctgggtgcctttgaaagcctgggcaaagcctggccgcgaaacgcggagacccaacgttgttatcgtcaggagctgtgcaaactgatgtgtgaacggctaaaactcagcacgtggaaagtgcagctaggagtcctgcaatcaatgaatgccttttttcaggggttaatgcttttggaagaagaacatgccgatcctgaggctttggctgaaattctgcttgaaacttgtaaatcaatcacatattctttagaaaataagacctactcatctgtgagaacagaagctttatctgtgatagaattgctgcttaaaaaacttgaagaatctaaacagtgggaatgtttgacatctgaatgcagagtgctcctaattgagtctttagctactatggagccagacagcagacctgaactgcaggagaaagcagcgttactgaagaaaacacttgaaaatctggaataaattagaaggggaagaaacaaacaagtgccatgttcattgggggttgaagtggtggtgttctttgaaaaaccaagtgggaaaaagtaaagattaatctgtagcatgcatcattccttggctgaaataaaaagaaaaagcctta

SEQ ID NO: 302950 - DNA, 4972 bp, Homo sapiens
gccaaaattcatcttcagcgcaggttcttcttcaaacagtggcggaggttctggaatcccacagcctcctccgggaatgagcttttatgcagccaaacgagttattggtgataacccatggacacctgaacaattggaacagtgcaaattgggaatcgtgaaattcatagaagctgaacaggtgcctgaacttgaagctgttctccacttggtgattgcctctagtgatacacgccacagtgtggcaacggcagcagacctggaattgaaaagcaaacagagcttaattgactggaataatcctgccatcattaataagatgtacaaggtgtaccttggagatataccactgaagacaaaagagggtgcagttctgaagccagagttgaaaagggaccctgtcagtacaagagtcaagttaaagattgtcccccatctcctccgctctagacaagctgctgaaacgttcccagccaacattcaggtggtgtatgatggactttttggtacaaatacaaattcaaagttaagaacattatccctgcaatttgtgcatcatatttgtataacctgtccagaaatcaagattaagccattaggtccaatgcttttgaatggcctcaccaagctaatcaatgaatacaaagaggaccctaaactactgtcaatggcatattcagctgttggaaaactctccagtcggatgccacatttattcactaaggatatagcgcttgtgcagcagctttttgaagccctttgcaaggaagagcctgagactcgacttgctattcaagaagctttatctatgatggttggagcgtatagtactttggaaggggcacagcgaactctcatggaggcacttgtggcttcgtacttaataaagcctgaagttcaagttcgacaagtggctgtgaaatttgccagtacggtgtttccctcagatcatatcccttccagatatttgctgctactggctgcaggagatccacgtgaagaagttcatggagaagcacaacgcgtattaaggtgtcttccaggtagaaacagaaaagaaagtacttctgagcagatgccttccttcccagaaatggtttattacatccaagaaaaggcttctcatcgaatgaaaactccagtcaagtacatgaccgggaccactgtccttccatttaacccagcagcctttggagagatcgttctgtacttgcgcatgtgccttgcgcacagtgcgggggtggtgcccacctctcagagtttggctgatatgcaggatcatgccccagccattgggcgctacatacggactttaatgtcaagcgggcagatggcaccctcatcatctaacaagagtggggagactaaccctgtccagatctacattggcctgcttcagcagctgttagcaggtgttggaggtttgccggttatgtactgtctattggaagctgtgtcagtgtatccagaaaagctggctaccaaatttgtagacaaaacagaatggataaagagtctgatgaataacagtaaagaagaaatgcgcgaactggcagcgttgttttattctgtagtggtatcaacagtgtcggggaatgagttgaaatcaatgatagaacagcttataaagactacaaaagacaatcacagcccggagatacagcatggatccttgcttgcattgggattcacggtgggaaggtatttggctaaaaagaaaatgagaatgtcagagcaacaagacctggagagaaatgctgacaccctccctgatcaagaggaactcattcagagtgctacagaaacaataggctcatttttggacagtacatcacccctcctggcaattgctgcctgcacagccctgggtgaaattggcagaaatggtccacttccaatccccagtgagggatctggctttaccaaattgcatcttgtagaaagcttactaagtagaataccttccagtaaagaaacaaataagatgaaagaacgagcaatccaaacactgggatattttccagttggggatggagattttcctcaccagaaactcctcttgcaaggtctgatggattctgtggaggccaagcagatagaacttcagttcactattggcgaagccattaccagtgctgcaataggaactagttctgtggctgcccgagatgcctggcaaatgactgaagaggaatatactccacctgctggagccaaagtgaatgatgtggttccatgggtgttggatgtgattttaaataaacatatcatcagccccaacccacacgtgaggcaagcagcctgcatctggctcctttcccttgtcaggaagctaagtacccacaaagaagtgaagtctcatcttaaagaaattcaaagtgcatttgtttcagttctatcagaaaatgatgaacttagccaagatgttgcatcaaagggccttgggttggtttatgaactaggcaatgaacaagatcaacaggaattggtttctacacttgtggaaacacttatgactggcaaaagagttaaacatgaagtttctggagagacagtggtatttcaagggggagctcttggcaaaacaccagatggtcagggcctttctacttacaaggaactttgttctctggcaagtgatcttagccagccagatctggtgtataaatttatgaatttagccaaccatcatgcaatgtggaactctaggaagggtgctgcttttggttttaatgtaattgctaccagagctggagagcagctggctccttttctgcctcagctagttcctcgactttatcgttaccagtttgatcccaaccttggcattcgacaggccatgacaagtatttggaatgcgttggtcactgacaaatccatggtggataaatatttgaaagaaattcttcaagatttggttaagaaccttacaagcaatatgtggcgagttcgagaatccagctgtttagctttgaatgatttattgagaggaagacccttagatgacatcattgataaacttccagaaatttgggaaacgctttttagagtacaagatgatatcaaggaatctgtacgaaaagcggcagaactagctctgaaaactctgagcaaggtctgtgtgaaaatgtgtgaccctgccaaaggagcagctggccagagaaccatcgctgcccttctgccttgccttctggacaaaggaatgatgagcaccgtgacggaagttcgagccctcagcattaacacccttgtgaagatcagcaaaagtgcaggagccatgttgaaaccgcatgcaccaaaactcattccagctctgctagagtccttaagtgtattggagccccaagttctcaattatttgagcctccgggcgacagagcaagaaaaggctgcgatggatagtgctcggcttagtgctgccaaatcttctccaatgatggaaacaatcaacatgtgcctgcaataccttgatgtgtcagtgctgggcgagctagttcctaggttgtgtgaactgatcagaagtggtgtaggtcttggaactaagggtggctgtgccagtgtcattgtgtcattaactactcagtgtcctcaggacctaacaccttactcaggtaaacttatgagtgctttgctgagtggcctgacagatcggaacagtgtgattcagaaatcttgtgcatttgctatgggccatttagttcggacctcacgggatagcagcactgaaaaactcctgcagaagctcaatgggtggtatatggagaaagaagaacctatctacaagacctcttgtgctttgactattcatgctattggacgatacagccctgatgtattaaagaatcatgcaaaagaagtcctgcctctggcatttttaggcatgcatgaaattgctgatgaggagaaatccgaaaaagaagaatgtaatttatggaccgaagtgtggcaggaaaacgtacctggatcctttggtggcattcgattatacctgcaggagttaattactattacccagaaggctttgcagtctcagtcctggaaaatgaaagcccagggtgcaattgccatggcatcaattgcaaaacagactagctctctagtacctccatatctcggaatgatactgaccgcattgctgcaaggcctggctggaagaacgtgggcaggaaaggaggagctattgaaagccattgcctgtgtggtgacagcttgcagtgcagagctggaaaagtctgtgcccaatcaacccagcacaaatgaaattcttcaagctgttctgaaggaatgtagcaaagagaatgtcaaatacaagattgtagcaatcagctgtgcagctgatatcttgaaggccaccaaagaggacagattccaggagttctctaacattgtcatacctctcatcaagaagaactcacttgaaagcagtggggtccggacaaccaaaaatgaagaggagaatgaaaaggaaaaggagctccagctggaatatctgctgggtgcctttgaaagcctgggcaaagcctggccgcgaaacgcggagacccaacgttgttatcgtcaggagctgtgcaaactgatgtgtgaacggctaaaactcagcacgtggaaagtgcagctaggagtcctgcaatcaatgaatgccttttttcaggggttaatgcttttggaagaagaacatgccgatcctgaggctttggctgaaattctgcttgaaacttgtaaatcaatcacatattctttagaaaataagacctactcatctgtgagaacagaagctttatctgtgatagaattgctgcttaaaaaacttgaagaatctaaacagtgggaatgtttgacatctgaatgcagagtgctcctaattgagtctttagctactatggagccagacagcagacctgaactgcaggagaaagcagcgttactgaagaaaacacttgaaaatctggaataaattagaaggggaagaaac

SEQ ID NO: 302951 - DNA, 7721 bp, Homo sapiens
gccaaaattcatcttcagcgcaggttcttcttcaaacagtggcggaggttctggaatcccacagcctcctccgggaatgagcttttatgcagccaaacgagttattggtgataacccatggacacctgaacaattggaacagtgcaaattgggaatcgtgaaattcatagaagctgaacaggtgcctgaacttgaagctgttctccacttggtgattgcctctagtgatacacgccacagtgtggcaacggcagcagacctggaattgaaaagcaaacagagcttaattgactggaataatcctgccatcattaataagatgtacaaggtgtaccttggagatataccactgaagacaaaagagggtgcagttctgaagccagagttgaaaagggaccctgtcagtacaagagtcaagttaaagattgtcccccatctcctccgctctagacaagctgctgaaacgttcccagccaacattcaggtggtgtatgatggactttttggtacaaatacaaattcaaagttaagaacattatccctgcaatttgtgcatcatatttgtataacctgtccagaaatcaagattaagccattaggtccaatgcttttgaatggcctcaccaagctaatcaatgaatacaaagaggaccctaaactactgtcaatggcatattcagctgttggaaaactctccagtcggatgccacatttattcactaaggatatagcgcttgtgcagcagctttttgaagccctttgcaaggaagagcctgagactcgacttgctattcaagaagctttatctatgatggttggagcgtatagtactttggaaggggcacagcgaactctcatggaggcacttgtggcttcgtacttaataaagcctgaagttcaagttcgacaagtggctgtgaaatttgccagtacggtgtttccctcagatcatatcccttccagatatttgctgctactggctgcaggagatccacgtgaagaagttcatggagaagcacaacgcgtattaaggtgtcttccaggtagaaacagaaaagaaagtacttctgagcagatgccttccttcccagaaatggtttattacatccaagaaaaggcttctcatcgaatgaaaactccagtcaagtacatgaccgggaccactgtccttccatttaacccagcagcctttggagagatcgttctgtacttgcgcatgtgccttgcgcacagtgcgggggtggtgcccacctctcagagtttggctgatatgcaggatcatgccccagccattgggcgctacatacggactttaatgtcaagcgggcagatggcaccctcatcatctaacaagagtggggagactaaccctgtccagatctacattggcctgcttcagcagctgttagcaggtgttggaggtttgccggttatgtactgtctattggaagctgtgtcagtgtatccagaaaagctggctaccaaatttgtagacaaaacagaatggataaagagtctgatgaataacagtaaagaagaaatgcgcgaactggcagcgttgttttattctgtagtggtatcaacagtgtcggggaatgagttgaaatcaatgatagaacagcttataaagactacaaaagacaatcacagcccggagatacagcatggatccttgcttgcattgggattcacggtgggaaggtatttggctaaaaagaaaatgagaatgtcagagcaacaagacctggagagaaatgctgacaccctccctgatcaagaggaactcattcagagtgctacagaaacaataggctcatttttggacagtacatcacccctcctggcaattgctgcctgcacagccctgggtgaaattggcagaaatggtccacttccaatccccagtgagggatctggctttaccaaattgcatcttgtagaaagcttactaagtagaataccttccagtaaagaaacaaataagatgaaagaacgagcaatccaaacactgggatattttccagttggggatggagattttcctcaccagaaactcctcttgcaaggtctgatggattctgtggaggccaagcagatagaacttcagttcactattggcgaagccattaccagtgctgcaataggaactagttctgtggctgcccgagatgcctggcaaatgactgaagaggaatatactccacctgctggagccaaagtgaatgatgtggttccatgggtgttggatgtgattttaaataaacatatcatcagccccaacccacacgtgaggcaagcagcctgcatctggctcctttcccttgtcaggaagctaagtacccacaaagaagtgaagtctcatcttaaagaaattcaaagtgcatttgtttcagttctatcagaaaatgatgaacttagccaagatgttgcatcaaagggccttgggttggtttatgaactaggcaatgaacaagatcaacaggaattggtttctacacttgtggaaacacttatgactggcaaaagagttaaacatgaagtttctggagagacagtggtatttcaagggggagctcttggcaaaacaccagatggtcagggcctttctacttacaaggaactttgttctctggcaagtgatcttagccagccagatctggtgtataaatttatgaatttagccaaccatcatgcaatgtggaactctaggaagggtgctgcttttggttttaatgtaattgctaccagagctggagagcagctggctccttttctgcctcagctagttcctcgactttatcgttaccagtttgatcccaaccttggcattcgacaggccatgacaagtatttggaatgcgttggtcactgacaaatccatggtggataaatatttgaaagaaattcttcaagatttggttaagaaccttacaagcaatatgtggcgagttcgagaatccagctgtttagctttgaatgatttattgagaggaagacccttagatgacatcattgataaacttccagaaatttgggaaacgctttttagagtacaagatgatatcaaggaatctgtacgaaaagcggcagaactagctctgaaaactctgagcaaggtctgtgtgaaaatgtgtgaccctgccaaaggagcagctggccagagaaccatcgctgcccttctgccttgccttctggacaaaggaatgatgagcaccgtgacggaagttcgagccctcagcattaacacccttgtgaagatcagcaaaagtgcaggagccatgttgaaaccgcatgcaccaaaactcattccagctctgctagagtccttaagtgtattggagccccaagttctcaattatttgagcctccgggcgacagagcaagaaaaggctgcgatggatagtgctcggcttagtgctgccaaatcttctccaatgatggaaacaatcaacatgtgcctgcaataccttgatgtgtcagtgctgggcgagctagttcctaggttgtgtgaactgatcagaagtggtgtaggtcttggaactaagggtggctgtgccagtgtcattgtgtcattaactactcagtgtcctcaggacctaacaccttactcaggtaaacttatgagtgctttgctgagtggcctgacagatcggaacagtgtgattcagaaatcttgtgcatttgctatgggccatttagttcggacctcacgggatagcagcactgaaaaactcctgcagaagctcaatgggtggtatatggagaaagaagaacctatctacaagacctcttgtgctttgactattcatgctattggacgatacagccctgatgtattaaagaatcatgcaaaagaagtcctgcctctggcatttttaggcatgcatgaaattgctgatgaggagaaatccgaaaaagaagaatgtaatttatggaccgaagtgtggcaggaaaacgtacctggatcctttggtggcattcgattatacctgcaggagttaattactattacccagaaggctttgcagtctcagtcctggaaaatgaaagcccagggtgcaattgccatggcatcaattgcaaaacagactagctctctagtacctccatatctcggaatgatactgaccgcattgctgcaaggcctggctggaagaacgtgggcaggaaaggaggagctattgaaagccattgcctgtgtggtgacagcttgcagtgcagagctggaaaagtctgtgcccaatcaacccagcacaaatgaaattcttcaagctgttctgaaggaatgtagcaaagagaatgtcaaatacaagattgtagcaatcagctgtgcagctgatatcttgaaggccaccaaagaggacagattccaggagttctctaacattgtcatacctctcatcaagaagaactcacttgaaagcagtggggtccggacaaccaaaaatgaagaggagaatgaaaaggaaaaggagctccagctggaatatctgctgggtgcctttgaaagcctgggcaaagcctggccgcgaaacgcggagacccaacgttgttatcgtcaggagctgtgcaaactgatgtgtgaacggctaaaactcagcacgtggaaagtgcagctaggagtcctgcaatcaatgaatgccttttttcaggggttaatgcttttggaagaagaacatgccgatcctgaggctttggctgaaattctgcttgaaacttgtaaatcaatcacatattctttagaaaataagacctactcatctgtgagaacagaagctttatctgtgatagaattgctgcttaaaaaacttgaaggtaagttgttgttagttctgactgggggaccataaagccatgtggcatatgttttagaaattttttgtttcgtttttgcttatactcttaagcatatactctgaaatacaaatcagtatgtatgcacatgcaagaagaatggacaaagccaaaactattaaattttactaaatatttaaatttgatacacttttatatatttttaatatattattaagctatagttgtcttaaagtaataaagtttttgttttcatcgtgaatcctgatttaatcttggttaattacaggaattggttgacagtggcatgtgtacatgtaaataagcagaacgacacactgaaaagtggagttggaaaaacatttttaacagttatctacctgagtcatcaaatctgacagtagcaattttcttaatcctatttcttctcccctaacctctttttcttctaatggtctatcagtgggtggggtgggggggaactgttagcattttctccagtggtgtatctgttactgacttcagaaggaggaccctcttcttttttctctctctctctcaaattgttttcacggattaagaatgtagaagatggaaacgtttttcctgcaaccttgtgtatttgctctttctacttctctatctttgcttagcaattaaaacacctctcttagggctccatcaaacagaacttttagactgagtaacgctaaacatctcctaatcccttttttccttgttgagataaaagagctaggcacttagtcgtattaccgaattctcagtttgccagatatgtactaatatagtccagatgaggaaaataaggctgaaggcaagctaaacttgcctgaagccacattgctaggaagtgacagaaccttgtaaacaagatttaagatttgatatactttcttattttctaaaaatttcaatgtgcatgtagttctcagatgctttcctcgaagaaaagggagtgtcatctatttatctgaccttgcaattatgacatttcttagaagttttttttttttaactgaccgtatcttatgaaatggtcttgcgatggtgttgttgaaatgacttttttgctgcagtgtgccttgccctgataattccttcttcctactatgcttcagtgtaattatttctcttactcccactgatactgggggaaggagaggaaactccctgatgtgcctctacgctactgtcaagaattaggttttgagacacatattgacagtatgtaatgataattatatactgatctgttatcaagaggttgctttgcatttatttgggggataggatatttttaaatttttttcttgcttgttctataaggattctttggggttttttctttttgctttgttttttgttttttttgtttttgttttttttttttcatgcagaatctaaacagtgggaatgtttgacatctgaatgcagagtgctcctaattgagtctttagctactatggagccagacagcagacctgaactgcaggagaaagcagcgttactgaagaaaacacttgaaaatctggaataaattagaaggggaagaaacaaacaagtgccatgttcattgggggttgaagtggtggtgttctttgaaaaaccaagtgggaaaaagtaaagattaatctgtagcatgcatcattccttggctgaaataaaaagaaaaagccttaaattttgttccttattagctttattttactttatgtttttaaagtatctgggctgagtgagcttaatggaaccttggatgtttgaggggtggttgtaaaggaaactggcagaaatagttactaaaagagttcaagctgttattaaaggaattaatagacagagttgcagagcaagctggataaaaatcttagaactgcattcaaattagttatttcaggaaggggccctataaataacttattttaacctccctcttacacctgaagaaataggaagctgtgtcatctcagaggctttctgaggcctgtgccaaagtcagaacccaggtgtttaatgtctggccctggatactttcttttatggccatctgccaaatcagtgctaaccccggcttacccaagaaacttccaagatgaggtacgtttagggtggcacacagcagtctttgtgccagaactaaactgacccttaccattgggtttctgaaagccagaagctaaacattgtcttgtcatgtgtttaggtggttgatttggagaaaatgattgtttagcatctttacagatggagaggacagagtcagtctccttcggataattccaatcgtcttccttttacaggtggataaagtagattaggacaagatcacacattctatctgtgtctgtggctgcatattttgcaaaaccagaaacaaaatcgcagactgccgtggtttagaccatttataatgtcaaaactgtaatgacaaatttctgttcacttttatgctaccagtatgactttataggggagaaggaaagccttttaattagccacctgggaattactcttttaaaaaatgccttttctcaaaagaacatgataccactccaagtaaatcattgccactaggggttttcctccttccttctgttgcccatgcccctgcctgaaagtgtagggtaagaggaaaaacaagtaaaaccttagtgttgatggtaaactgagaactctgtagcttaccttggattccagagcagaagactggtttacattcagtactcatccttattgacgttaacaccaggaatctccatgtttattatttttcgtggaaactccatgtttattatttttggtggtctctattgaccaatgtatttcaaacttttttgactgcaagtcataataaaaataactttttacatcacgaaaaaaaaaatg

SEQ ID NO: 302952 - DNA, 4007 bp, Homo sapiens
gtcggcccatgatgtccctaaaaatcttcttcatctcctatctagtatatagctatcctcctgtacacagcacctagaaatcctctgccgccggccggaaaggacttttatatcttgtacacagtaaatgcttgataggaagttttatcactttgtaaatgaatcgtattggctagttgaatgttggtatgaaaagcttgaagcttattgaaattattgttttggtttagagttaaacatgaagtttctggagagacagtggtatttcaagggggagctcttggcaaaacaccagatggtcagggcctttctacttacaaggaactttgttctctggcaagtgatcttagccagccagatctggtgtataaatttatgaatttagccaaccatcatgcaatgtggaactctaggaagggtgctgcttttggttttaatgtaattgctaccagagctggagagcagctggctccttttctgcctcagctagttcctcgactttatcgttaccagtttgatcccaaccttggcattcgacaggccatgacaagtatttggaatgcgttggtcactgacaaatccatggtggataaatatttgaaagaaattcttcaagatttggttaagaaccttacaagcaatatgtggcgagttcgagaatccagctgtttagctttgaatgatttattgagaggaagacccttagatgacatcattgataaacttccagaaatttgggaaacgctttttagagtacaagatgatatcaaggaatctgtacgaaaagcggcagaactagctctgaaaactctgagcaaggtctgtgtgaaaatgtgtgaccctgccaaaggagcagctggccagagaaccatcgctgcccttctgccttgccttctggacaaaggaatgatgagcaccgtgacggaagttcgagccctcagcattaacacccttgtgaagatcagcaaaagtgcaggagccatgttgaaaccgcatgcaccaaaactcattccagctctgctagagtccttaagtgtattggagccccaagttctcaattatttgagcctccgggcgacagagcaagaaaaggctgcgatggatagtgctcggcttagtgctgccaaatcttctccaatgatggaaacaatcaacatgtgcctgcaataccttgatgtgtcagtgctgggcgagctagttcctaggttgtgtgaactgatcagaagtggtgtaggtcttggaactaagggtggctgtgccagtgtcattgtgtcattaactactcagtgtcctcaggacctaacaccttactcaggtaaacttatgagtgctttgctgagtggcctgacagatcggaacagtgtgattcagaaatcttgtgcatttgctatgggccatttagttcggacctcacgggatagcagcactgaaaaactcctgcagaagctcaatgggtggtatatggagaaagaagaacctatctacaagacctcttgtgctttgactattcatgctattggacgatacagccctgatgtattaaagaatcatgcaaaagaagtcctgcctctggcatttttaggcatgcatgaaattgctgatgaggagaaatccgaaaaagaagaatgtaatttatggaccgaagtgtggcaggaaaacgtacctggatcctttggtggcattcgattatacctgcaggagttaattactattacccagaaggctttgcagtctcagtcctggaaaatgaaagcccagggtgcaattgccatggcatcaattgcaaaacagactagctctctagtacctccatatctcggaatgatactgaccgcattgctgcaaggcctggctggaagaacgtgggcaggaaaggaggagctattgaaagccattgcctgtgtggtgacagcttgcagtgcagagctggaaaagtctgtgcccaatcaacccagcacaaatgaaattcttcaagctgttctgaaggaatgtagcaaagagaatgtcaaatacaagattgtagcaatcagctgtgcagctgatatcttgaaggccaccaaagaggacagattccaggagttctctaacattgtcatacctctcatcaagaagaactcacttgaaagcagtggggtccggacaaccaaaaatgaagaggagaatgaaaaggaaaaggagctccagctggaatatctgctgggtgcctttgaaagcctgggcaaagcctggccgcgaaacgcggagacccaacgttgttatcgtcaggagctgtgcaaactgatgtgtgaacggctaaaactcagcacgtggaaagtgcagctaggagtcctgcaatcaatgaatgccttttttcaggggttaatgcttttggaagaagaacatgccgatcctgaggctttggctgaaattctgcttgaaacttgtaaatcaatcacatattctttagaaaataagacctactcatctgtgagaacagaagctttatctgtgatagaattgctgcttaaaaaacttgaagaatctaaacagtgggaatgtttgacatctgaatgcagagtgctcctaattgagtctttagctactatggagccagacagcagacctgaactgcaggagaaagcagcgttactgaagaaaacacttgaaaatctggaataaattagaaggggaagaaacaaacaagtgccatgttcattgggggttgaagtggtggtgttctttgaaaaaccaagtgggaaaaagtaaagattaatctgtagcatgcatcattccttggctgaaataaaaagaaaaagccttaaattttgttccttattagctttattttactttatgtttttaaagtatctgggctgagtgagcttaatggaaccttggatgtttgaggggtggttgtaaaggaaactggcagaaatagttactaaaagagttcaagctgttattaaaggaattaatagacagagttgcagagcaagctggataaaaatcttagaactgcattcaaattagttatttcaggaaggggccctataaataacttattttaacctccctcttacacctgaagaaataggaagctgtgtcatctcagaggctttctgaggcctgtgccaaagtcagaacccaggtgtttaatgtctggccctggatactttcttttatggccatctgccaaatcagtgctaaccccggcttacccaagaaacttccaagatgaggtacgtttagggtggcacacagcagtctttgtgccagaactaaactgacccttaccattgggtttctgaaagccagaagctaaacattgtcttgtcatgtgtttaggtggttgatttggagaaaatgattgtttagcatctttacagatggagaggacagagtcagtctccttcggataattccaatcgtcttccttttacaggtggataaagtagattaggacaagatcacacattctatctgtgtctgtggctgcatattttgcaaaaccagaaacaaaatcgcagactgccgtggtttagaccatttataatgtcaaaactgtaatgacaaatttctgttcacttttatgctaccagtatgactttataggggagaaggaaagccttttaattagccacctgggaattactcttttaaaaaatgccttttctcaaaagaacatgataccactccaagtaaatcattgccactaggggttttcctccttccttctgttgcccatgcccctgcctgaaagtgtagggtaagaggaaaaacaagtaaaaccttagtgttgatggtaaactgagaactctgtagcttaccttggattccagagcagaagactggtttacattcagtactcatccttattgacgttaacaccaggaatctccatgtttattatttttcgtggaaactccatgtttattatttttggtggtctctattgaccaatgtatttcaaacttttttgactgcaagtcataataaaaataactttttacatcacgaaaaaaaaaatg

SEQ ID NO: 302953 - DNA, 3552 bp, Homo sapiens
cgcctgcctcggcctcccaaagtgctggctttataggcgccggctactgcacccagccctaaaccttttttaaagtgctttcttacatatttcctggtttgatcatcatctgttttgttctgtatttcacaaattggaggaccagtgcttagagagtgaaatgcattaccaaattttctgtttagttcttggcagacctaggactcaatctccgatctcattcctctgtgtctctgtagtgtcagagaaagtagattcacttattcttccctgtagatatgtgaagtagaaagtcttttgtcagatgaattctttattggatgcgcggtcactttcactaacgtccatgctctttgtatgtgaggtctgtgtgaaaatgtgtgaccctgccaaaggagcagctggccagagaaccatcgctgcccttctgccttgccttctggacaaaggaatgatgagcaccgtgacggaagttcgagccctcagcattaacacccttgtgaagatcagcaaaagtgcaggagccatgttgaaaccgcatgcaccaaaactcattccagctctgctagagtccttaagtgtattggagccccaagttctcaattatttgagcctccgggcgacagagcaagaaaaggctgcgatggatagtgctcggcttagtgctgccaaatcttctccaatgatggaaacaatcaacatgtgcctgcaataccttgatgtgtcagtgctgggcgagctagttcctaggttgtgtgaactgatcagaagtggtgtaggtcttggaactaagggtggctgtgccagtgtcattgtgtcattaactactcagtgtcctcaggacctaacaccttactcaggtaaacttatgagtgctttgctgagtggcctgacagatcggaacagtgtgattcagaaatcttgtgcatttgctatgggccatttagttcggacctcacgggatagcagcactgaaaaactcctgcagaagctcaatgggtggtatatggagaaagaagaacctatctacaagacctcttgtgctttgactattcatgctattggacgatacagccctgatgtattaaagaatcatgcaaaagaagtcctgcctctggcatttttaggcatgcatgaaattgctgatgaggagaaatccgaaaaagaagaatgtaatttatggaccgaagtgtggcaggaaaacgtacctggatcctttggtggcattcgattatacctgcaggagttaattactattacccagaaggctttgcagtctcagtcctggaaaatgaaagcccagggtgcaattgccatggcatcaattgcaaaacagactagctctctagtacctccatatctcggaatgatactgaccgcattgctgcaaggcctggctggaagaacgtgggcaggaaaggaggagctattgaaagccattgcctgtgtggtgacagcttgcagtgcagagctggaaaagtctgtgcccaatcaacccagcacaaatgaaattcttcaagctgttctgaaggaatgtagcaaagagaatgtcaaatacaagattgtagcaatcagctgtgcagctgatatcttgaaggccaccaaagaggacagattccaggagttctctaacattgtcatacctctcatcaagaagaactcacttgaaagcagtggggtccggacaaccaaaaatgaagaggagaatgaaaaggaaaaggagctccagctggaatatctgctgggtgcctttgaaagcctgggcaaagcctggccgcgaaacgcggagacccaacgttgttatcgtcaggagctgtgcaaactgatgtgtgaacggctaaaactcagcacgtggaaagtgcagctaggagtcctgcaatcaatgaatgccttttttcaggggttaatgcttttggaagaagaacatgccgatcctgaggctttggctgaaattctgcttgaaacttgtaaatcaatcacatattctttagaaaataagacctactcatctgtgagaacagaagctttatctgtgatagaattgctgcttaaaaaacttgaagaatctaaacagtgggaatgtttgacatctgaatgcagagtgctcctaattgagtctttagctactatggagccagacagcagacctgaactgcaggagaaagcagcgttactgaagaaaacacttgaaaatctggaataaattagaaggggaagaaacaaacaagtgccatgttcattgggggttgaagtggtggtgttctttgaaaaaccaagtgggaaaaagtaaagattaatctgtagcatgcatcattccttggctgaaataaaaagaaaaagccttaaattttgttccttattagctttattttactttatgtttttaaagtatctgggctgagtgagcttaatggaaccttggatgtttgaggggtggttgtaaaggaaactggcagaaatagttactaaaagagttcaagctgttattaaaggaattaatagacagagttgcagagcaagctggataaaaatcttagaactgcattcaaattagttatttcaggaaggggccctataaataacttattttaacctccctcttacacctgaagaaataggaagctgtgtcatctcagaggctttctgaggcctgtgccaaagtcagaacccaggtgtttaatgtctggccctggatactttcttttatggccatctgccaaatcagtgctaaccccggcttacccaagaaacttccaagatgaggtacgtttagggtggcacacagcagtctttgtgccagaactaaactgacccttaccattgggtttctgaaagccagaagctaaacattgtcttgtcatgtgtttaggtggttgatttggagaaaatgattgtttagcatctttacagatggagaggacagagtcagtctccttcggataattccaatcgtcttccttttacaggtggataaagtagattaggacaagatcacacattctatctgtgtctgtggctgcatattttgcaaaaccagaaacaaaatcgcagactgccgtggtttagaccatttataatgtcaaaactgtaatgacaaatttctgttcacttttatgctaccagtatgactttataggggagaaggaaagccttttaattagccacctgggaattactcttttaaaaaatgccttttctcaaaagaacatgataccactccaagtaaatcattgccactaggggttttcctccttccttctgttgcccatgcccctgcctgaaagtgtagggtaagaggaaaaacaagtaaaaccttagtgttgatggtaaactgagaactctgtagcttaccttggattccagagcagaagactggtttacattcagtactcatccttattgacgttaacaccaggaatctccatgtttattatttttcgtggaaactccatgtttattatttttggtggtctctattgaccaatgtatttcaaacttttttgactgcaagtcataataaaaataactttttacatcacgaaaaaaaaaatg

SEQ ID NO: 302954 - DNA, 5781 bp, Homo sapiens
gccaaaattcatcttcagcgcaggttcttcttcaaacagtggcggaggttctggaatcccacagcctcctccgggaatgagcttttatgcagccaaacgagttattggtgataacccatggacacctgaacaattggaacagtgcaaattgggaatcgtgaaattcatagaagctgaacaggtgcctgaacttgaagctgttctccacttggtgattgcctctagtgatacacgccacagtgtggcaacggcagcagacctggaattgaaaagcaaacagagcttaattgactggaataatcctgccatcattaataagatgtacaaggtgtaccttggagatataccactgaagacaaaagagggtgcagttctgaagccagagttgaaaagggaccctgtcagtacaagagtcaagttaaagattgtcccccatctcctccgctctagacaagctgctgaaacgttcccagccaacattcaggtggtgtatgatggactttttggtacaaatacaaattcaaagttaagaacattatccctgcaatttgtgcatcatatttgtataacctgtccagaaatcaagattaagccattaggtccaatgcttttgaatggcctcaccaagctaatcaatgaatacaaagaggaccctaaactactgtcaatggcatattcagctgttggaaaactctccagtcggatgccacatttattcactaaggatatagcgcttgtgcagcagctttttgaagccctttgcaaggaagagcctgagactcgacttgctattcaagaagctttatctatgatggttggagcgtatagtactttggaaggggcacagcgaactctcatggaggcacttgtggcttcgtacttaataaagcctgaagttcaagttcgacaagtggctgtgaaatttgccagtacggtgtttccctcagatcatatcccttccagatatttgctgctactggctgcaggagatccacgtgaagaagttcatggagaagcacaacgcgtattaaggtgtcttccaggtagaaacagaaaagaaagtacttctgagcagatgccttccttcccagaaatggtttattacatccaagaaaaggcttctcatcgaatgaaaactccagtcaagtacatgaccgggaccactgtccttccatttaacccagcagcctttggagagatcgttctgtacttgcgcatgtgccttgcgcacagtgcgggggtggtgcccacctctcagagtttggctgatatgcaggatcatgccccagccattgggcgctacatacggactttaatgtcaagcgggcagatggcaccctcatcatctaacaagagtggggagactaaccctgtccagatctacattggcctgcttcagcagctgttagcaggtgttggaggtttgccggttatgtactgtctattggaagctgtgtcagtgtatccagaaaagctggctaccaaatttgtagacaaaacagaatggataaagagtctgatgaataacagtaaagaagaaatgcgcgaactggcagcgttgttttattctgtagtggtatcaacagtgtcggggaatgagttgaaatcaatgatagaacagcttataaagactacaaaagacaatcacagcccggagatacagcatggatccttgcttgcattgggattcacggtgggaaggtatttggctaaaaagaaaatgagaatgtcagagcaacaagacctggagagaaatgctgacaccctccctgatcaagaggaactcattcagagtgctacagaaacaataggctcatttttggacagtacatcacccctcctggcaattgctgcctgcacagccctgggtgaaattggcagaaatggtccacttccaatccccagtgagggatctggctttaccaaattgcatcttgtagaaagcttactaagtagaataccttccagtaaagaaacaaataagatgaaagaacgagcaatccaaacactgggatattttccagttggggatggagattttcctcaccagaaactcctcttgcaaggtctgatggattctgtggaggccaagcagatagaacttcagttcactattggcgaagccattaccagtgctgcaataggaactagttctgtggctgcccgagatgcctggcaaatgactgaagaggaatatactccacctgctggagccaaagtgaatgatgtggttccatgggtgttggatgtgattttaaataaacatatcatcagccccaacccacacgtgaggcaagcagcctgcatctggctcctttcccttgtcaggaagctaagtacccacaaagaagtgaagtctcatcttaaagaaattcaaagtgcatttgtttcagttctatcagaaaatgatgaacttagccaagatgttgcatcaaagggccttgggttggtttatgaactaggcaatgaacaagatcaacaggaattggtttctacacttgtggaaacacttatgactggcaaaagagttaaacatgaagtttctggagagacagtggtatttcaagggggagctcttggcaaaacaccagatggtcagggcctttctacttacaaggaactttgttctctggcaagtgatcttagccagccagatctggtgtataaatttatgaatttagccaaccatcatgcaatgtggaactctaggaagggtgctgcttttggttttaatgtaattgctaccagagctggagagcagctggctccttttctgcctcagctagttcctcgactttatcgttaccagtttgatcccaaccttggcattcgacaggccatgacaagtatttggaatgcgttggtcactgacaaatccatggtggataaatatttgaaagaaattcttcaagatttggttaagaaccttacaagcaatatgtggcgagttcgagaatccagctgtttagctttgaatgatttattgagaggaagacccttagatgacatcattgataaacttccagaaatttgggaaacgctttttagagtacaagatgatatcaaggaatctgtacgaaaagcggcagaactagctctgaaaactctgagcaaggtctgtgtgaaaatgtgtgaccctgccaaaggagcagctggccagagaaccatcgctgcccttctgccttgccttctggacaaaggaatgatgagcaccgtgacggaagttcgagccctcagcattaacacccttgtgaagatcagcaaaagtgcaggagccatgttgaaaccgcatgcaccaaaactcattccagctctgctagagtccttaagtgtattggagccccaagttctcaattatttgagcctccgggcgacagagcaagaaaaggctgcgatggatagtgctcggcttagtgctgccaaatcttctccaatgatggaaacaatcaacatgtgcctgcaataccttgatgtgtcagtgctgggcgagctagttcctaggttgtgtgaactgatcagaagtggtgtaggtcttggaactaagggtggctgtgccagtgtcattgtgtcattaactactcagtgtcctcaggacctaacaccttactcaggtaaacttatgagtgctttgctgagtggcctgacagatcggaacagtgtgattcagaaatcttgtgcatttgctatgggccatttagttcggacctcacgggatagcagcactgaaaaactcctgcagaagctcaatgggtggtatatggagaaagaagaacctatctacaagacctcttgtgctttgactattcatgctattggacgatacagccctgatgtattaaagaatcatgcaaaagaagtcctgcctctggcatttttaggcatgcatgaaattgctgatgaggagaaatccgaaaaagaagaatgtaatttatggaccgaagtgtggcaggaaaacgtacctggatcctttggtggcattcgattatacctgcaggagttaattactattacccagaaggctttgcagtctcagtcctggaaaatgaaagcccagggtgcaattgccatggcatcaattgcaaaacagactagctctctagtacctccatatctcggaatgatactgaccgcattgctgcaaggcctggctggaagaacgtgggcaggaaaggaggagctattgaaagccattgcctgtgtggtgacagcttgcagtgcagagctggaaaagtctgtgcccaatcaacccagcacaaatgaaattcttcaagctgttctgaaggaatgtagcaaagagaatgtcaaatacaagattgtagcaatcagctgtgcagctgatatcttgaaggccaccaaagaggacagattccaggagttctctaacattgtcatacctctcatcaagaagaaaacacttgaaaatctggaataaattagaaggggaagaaacaaacaagtgccatgttcattgggggttgaagtggtggtgttctttgaaaaaccaagtgggaaaaagtaaagattaatctgtagcatgcatcattccttggctgaaataaaaagaaaaagccttaaattttgttccttattagctttattttactttatgtttttaaagtatctgggctgagtgagcttaatggaaccttggatgtttgaggggtggttgtaaaggaaactggcagaaatagttactaaaagagttcaagctgttattaaaggaattaatagacagagttgcagagcaagctggataaaaatcttagaactgcattcaaattagttatttcaggaaggggccctataaataacttattttaacctccctcttacacctgaagaaataggaagctgtgtcatctcagaggctttctgaggcctgtgccaaagtcagaacccaggtgtttaatgtctggccctggatactttcttttatggccatctgccaaatcagtgctaaccccggcttacccaagaaacttccaagatgaggtacgtttagggtggcacacagcagtctttgtgccagaactaaactgacccttaccattgggtttctgaaagccagaagctaaacattgtcttgtcatgtgtttaggtggttgatttggagaaaatgattgtttagcatctttacagatggagaggacagagtcagtctccttcggataattccaatcgtcttccttttacaggtggataaagtagattaggacaagatcacacattctatctgtgtctgtggctgcatattttgcaaaaccagaaacaaaatcgcagactgccgtggtttagaccatttataatgtcaaaactgtaatgacaaatttctgttcacttttatgctaccagtatgactttataggggagaaggaaagccttttaattagccacctgggaattactcttttaaaaaatgccttttctcaaaagaacatgataccactccaagtaaatcattgccactaggggttttcctccttccttctgttgcccatgcccctgcctgaaagtgtagggtaagaggaaaaacaagtaaaaccttagtgttgatggtaaactgagaactctgtagcttaccttggattccagagcagaagactggtttacattcagtactcatccttattgacgttaacaccaggaatctccatgtttattatttttcgtggaaactccatgtttattatttttggtggtctctattgaccaatgtatttcaaacttttttgactgcaagtcataataaaaataactttttacatcacgaaaaaaaaaatg

SEQ ID NO: 302955 - DNA, 6514 bp, Homo sapiens
gccaaaattcatcttcagcgcaggttcttcttcaaacagtggcggaggttctggaatcccacagcctcctccgggaatgagcttttatgcagccaaacgagttattggtgataacccatggacacctgaacaattggaacagtgcaaattgggaatcgtgaaattcatagaagctgaacaggtgcctgaacttgaagctgttctccacttggtgattgcctctagtgatacacgccacagtgtggcaacggcagcagacctggaattgaaaagcaaacagagcttaattgactggaataatcctgccatcattaataagatgtacaaggtgtaccttggagatataccactgaagacaaaagagggtgcagttctgaagccagagttgaaaagggaccctgtcagtacaagagtcaagttaaagattgtcccccatctcctccgctctagacaagctgctgaaacgttcccagccaacattcaggtggtgtatgatggactttttggtacaaatacaaattcaaagttaagaacattatccctgcaatttgtgcatcatatttgtataacctgtccagaaatcaagattaagccattaggtccaatgcttttgaatggcctcaccaagctaatcaatgaatacaaagaggaccctaaactactgtcaatggcatattcagctgttggaaaactctccagtcggatgccacatttattcactaaggatatagcgcttgtgcagcagctttttgaagccctttgcaaggaagagcctgagactcgacttgctattcaagaagctttatctatgatggttggagcgtatagtactttggaaggggcacagcgaactctcatggaggcacttgtggcttcgtacttaataaagcctgaagttcaagttcgacaagtggctgtgaaatttgccagtacggtgtttccctcagatcatatcccttccagatatttgctgctactggctgcaggagatccacgtgaagaagttcatggagaagcacaacgcgtattaaggtgtcttccaggtagaaacagaaaagaaagtacttctgagcagatgccttccttcccagaaatggtttattacatccaagaaaaggcttctcatcgaatgaaaactccagtcaagtacatgaccgggaccactgtccttccatttaacccagcagcctttggagagatcgttctgtacttgcgcatgtgccttgcgcacagtgcgggggtggtgcccacctctcagagtttggctgatatgcaggatcatgccccagccattgggcgctacatacggactttaatgtcaagcgggcagatggcaccctcatcatctaacaagagtggggagactaaccctgtccagatctacattggcctgcttcagcagctgttagcaggtgttggaggtttgccggttatgtactgtctattggaagctgtgtcagtgtatccagaaaagctggctaccaaatttgtagacaaaacagaatggataaagagtctgatgaataacagtaaagaagaaatgcgcgaactggcagcgttgttttattctgtagtggtatcaacagtgtcggggaatgagttgaaatcaatgatagaacagcttataaagactacaaaagacaatcacagcccggagatacagcatggatccttgcttgcattgggattcacggtgggaaggtatttggctaaaaagaaaatgagaatgtcagagcaacaagacctggagagaaatgctgacaccctccctgatcaagaggaactcattcagagtgctacagaaacaataggctcatttttggacagtacatcacccctcctggcaattgctgcctgcacagccctgggtgaaattggcagaaatggtccacttccaatccccagtgagggatctggctttaccaaattgcatcttgtagaaagcttactaagtagaataccttccagtaaagaaacaaataagatgaaagaacgagcaatccaaacactgggatattttccagttggggatggagattttcctcaccagaaactcctcttgcaaggtctgatggattctgtggaggccaagcagatagaacttcagttcactattggcgaagccattaccagtgctgcaataggaactagttctgtggctgcccgagatgcctggcaaatgactgaagaggaatatactccacctgctggagccaaagtgaatgatgtggttccatgggtgttggatgtgattttaaataaacatatcatcagccccaacccacacgtgaggcaagcagcctgcatctggctcctttcccttgtcaggaagctaagtacccacaaagaagtgaagtctcatcttaaagaaattcaaagtgcatttgtttcagttctatcagaaaatgatgaacttagccaagatgttgcatcaaagggccttgggttggtttatgaactaggcaatgaacaagatcaacaggaattggtttctacacttgtggaaacacttatgactggcaaaagagttaaacatgaagtttctggagagacagtggtatttcaagggggagctcttggcaaaacaccagatggtcagggcctttctacttacaaggaactttgttctctggcaagtgatcttagccagccagatctggtgtataaatttatgaatttagccaaccatcatgcaatgtggaactctaggaagggtgctgcttttggttttaatgtaattgctaccagagctggagagcagctggctccttttctgcctcagctagttcctcgactttatcgttaccagtttgatcccaaccttggcattcgacaggccatgacaagtatttggaatgcgttggtcactgacaaatccatggtggataaatatttgaaagaaattcttcaagatttggttaagaaccttacaagcaatatgtggcgagttcgagaatccagctgtttagctttgaatgatttattgagaggaagacccttagatgacatcattgataaacttccagaaatttgggaaacgctttttagagtacaagatgatatcaaggaatctgtacgaaaagcggcagaactagctctgaaaactctgagcaaggtctgtgtgaaaatgtgtgaccctgccaaaggagcagctggccagagaaccatcgctgcccttctgccttgccttctggacaaaggaatgatgagcaccgtgacggaagttcgagccctcagcattaacacccttgtgaagatcagcaaaagtgcaggagccatgttgaaaccgcatgcaccaaaactcattccagctctgctagagtccttaagtgtattggagccccaagttctcaattatttgagcctccgggcgacagagcaagaaaaggctgcgatggatagtgctcggcttagtgctgccaaatcttctccaatgatggaaacaatcaacatgtgcctgcaataccttgatgtgtcagtgctgggcgagctagttcctaggttgtgtgaactgatcagaagtggtgtaggtcttggaactaagggtggctgtgccagtgtcattgtgtcattaactactcagtgtcctcaggacctaacaccttactcaggtaaacttatgagtgctttgctgagtggcctgacagatcggaacagtgtgattcagaaatcttgtgcatttgctatgggccatttagttcggacctcacgggatagcagcactgaaaaactcctgcagaagctcaatgggtggtatatggagaaagaagaacctatctacaagacctcttgtgctttgactattcatgctattggacgatacagccctgatgtattaaagaatcatgcaaaagaagtcctgcctctggcatttttaggcatgcatgaaattgctgatgaggagaaatccgaaaaagaagaatgtaatttatggaccgaagtgtggcaggaaaacgtacctggatcctttggtggcattcgattatacctgcaggagttaattactattacccagaaggctttgcagtctcagtcctggaaaatgaaagcccagggtgcaattgccatggcatcaattgcaaaacagactagctctctagtacctccatatctcggaatgatactgaccgcattgctgcaaggcctggctggaagaacgtgggcaggaaaggaggagctattgaaagccattgcctgtgtggtgacagcttgcagtgcagagctggaaaagtctgtgcccaatcaacccagcacaaatgaaattcttcaagctgttctgaaggaatgtagcaaagagaatgtcaaatacaagattgtagcaatcagctgtgcagctgatatcttgaaggccaccaaagaggacagattccaggagttctctaacattgtcatacctctcatcaagaagaactcacttgaaagcagtggggtccggacaaccaaaaatgaagaggagaatgaaaaggaaaaggagctccagctggaatatctgctgggtgcctttgaaagcctgggcaaagcctggccgcgaaacgcggagacccaacgttgttatcgtcaggagctgtgcaaactgatgtgtgaacggctaaaactcagcacgtggaaagtgcagctaggagtcctgcaatcaatgaatgccttttttcaggggttaatgcttttggaagaagaacatgccgatcctgaggctttggctgaaattctgcttgaaacttgtaaatcaatcacatattctttagaaaataagacctactcatctgtgagaacagaagctttatctgtgatagaattgctgcttaaaaaacttgaaggtaagttgttgttagttctgactgggggaccataaagccatgtggcatatgttttagaaattttttgtttcgtttttgcttatactcttaagcatatactctgaaatacaaatcagtatgtatgcacatgcaagaagaatggacaaagccaaaactattaaattttactaaatatttaaatttgatacacttttatatatttttaatatattattaagctatagttgtcttaaagtaataaagtttttgttttcatcgtgaatcctgatttaatcttggttaattacaggaattggttgacagtggcatgtgtacatgtaaataagcagaacgacacactgaaaagtggagttggaaaaacatttttaacagttatctacctgagtcatcaaatctgacagtagcaattttcttaatcctatttcttctcccctaacctctttttcttctaatggtctatcagtgggtggggtgggggggaactgttagcattttctccagtggtgtatctgttactgacttcagaaggaggaccctcttcttttttctctctctctctcaaattgttttcacggattaagaatgtagaagatggaaacgtttttcctgcaaccttgtgtatttgctctttctacttctctatctttgcttagcaattaaaacacctctcttagggctccatcaaacagaacttttagactgagtaacgctaaacatctcctaatcccttttttccttgttgagataaaagagctaggcacttagtcgtattaccgaattctcagtttgccagatatgtactaatatagtccagatgaggaaaataaggctgaaggcaagctaaacttgcctgaagccacattgctaggaagtgacagaaccttgtaaacaagatttaagatttgatatactttcttattttctaaaaatttcaatgtgcatgtagttctcagatgctttcctcgaagaaaagggagtgtcatctatttatctgaccttgcaattatgacatttcttagaagttttttttttttaactgaccgtatcttatgaaatggtcttgcgatggtgttgttgaaatgacttttttgctgcagtgtgccttgccctgataattccttcttcctactatgcttcagtgtaattatttctcttactcccactgatactgggggaaggagaggaaactccctgatgtgcctctacgctactgtcaagaattaggttttgagacacatattgacagtatgtaatgataattatatactgatctgttatcaagaggttgctttgcatttatttgggggataggatatttttaaatttttttcttgcttgttctataaggattctttggggttttttctttttgctttgttttttgttttttttgtttttgttttttttttttcatgcagaatctaaacagtgggaatgtttgacatctgaatgcagagtgctcctaattgagtctttagctactatggagccagacagcagacctgaactgcaggagaaagcagcgttactgaagaaaacacttgaaaatctggaataaattagaaggggaagaaacaaacaagtgccatgttcattgggggttgaagtggtggtgttctttgaaaaaccaagtgggaaaaagtaaagattaatctgtagcatgcatcattccttggctgaaataaaaagaaaaagcctta

SEQ ID NO: 302956 - DNA, 5292 bp, Homo sapiens
gccaaaattcatcttcagcgcaggttcttcttcaaacagtggcggaggttctggaatcccacagcctcctccgggaatgagcttttatgcagccaaacgagttattggtgataacccatggacacctgaacaattggaacagtgcaaattgggaatcgtgaaattcatagaagctgaacaggtgcctgaacttgaagctgttctccacttggtgattgcctctagtgatacacgccacagtgtggcaacggcagcagacctggaattgaaaagcaaacagagcttaattgactggaataatcctgccatcattaataagatgtacaaggtgtaccttggagatataccactgaagacaaaagagggtgcagttctgaagccagagttgaaaagggaccctgtcagtacaagagtcaagttaaagattgtcccccatctcctccgctctagacaagctgctgaaacgttcccagccaacattcaggtggtgtatgatggactttttggtacaaatacaaattcaaagttaagaacattatccctgcaatttgtgcatcatatttgtataacctgtccagaaatcaagattaagccattaggtccaatgcttttgaatggcctcaccaagctaatcaatgaatacaaagaggaccctaaactactgtcaatggcatattcagctgttggaaaactctccagtcggatgccacatttattcactaaggatatagcgcttgtgcagcagctttttgaagccctttgcaaggaagagcctgagactcgacttgctattcaagaagctttatctatgatggttggagcgtatagtactttggaaggggcacagcgaactctcatggaggcacttgtggcttcgtacttaataaagcctgaagttcaagttcgacaagtggctgtgaaatttgccagtacggtgtttccctcagatcatatcccttccagatatttgctgctactggctgcaggagatccacgtgaagaagttcatggagaagcacaacgcgtattaaggtgtcttccaggtagaaacagaaaagaaagtacttctgagcagatgccttccttcccagaaatggtttattacatccaagaaaaggcttctcatcgaatgaaaactccagtcaagtacatgaccgggaccactgtccttccatttaacccagcagcctttggagagatcgttctgtacttgcgcatgtgccttgcgcacagtgcgggggtggtgcccacctctcagagtttggctgatatgcaggatcatgccccagccattgggcgctacatacggactttaatgtcaagcgggcagatggcaccctcatcatctaacaagagtggggagactaaccctgtccagatctacattggcctgcttcagcagctgttagcaggtgttggaggtttgccggttatgtactgtctattggaagctgtgtcagtgtatccagaaaagctggctaccaaatttgtagacaaaacagaatggataaagagtctgatgaataacagtaaagaagaaatgcgcgaactggcagcgttgttttattctgtagtggtatcaacagtgtcggggaatgagttgaaatcaatgatagaacagcttataaagactacaaaagacaatcacagcccggagatacagcatggatccttgcttgcattgggattcacggtgggaaggtatttggctaaaaagaaaatgagaatgtcagagcaacaagacctggagagaaatgctgacaccctccctgatcaagaggaactcattcagagtgctacagaaacaataggctcatttttggacagtacatcacccctcctggcaattgctgcctgcacagccctgggtgaaattggcagaaatggtccacttccaatccccagtgagggatctggctttaccaaattgcatcttgtagaaagcttactaagtagaataccttccagtaaagaaacaaataagatgaaagaacgagcaatccaaacactgggatattttccagttggggatggagattttcctcaccagaaactcctcttgcaaggtctgatggattctgtggaggccaagcagatagaacttcagttcactattggcgaagccattaccagtgctgcaataggaactagttctgtggctgcccgagatgcctggcaaatgactgaagaggaatatactccacctgctggagccaaagtgaatgatgtggttccatgggtgttggatgtgattttaaataaacatatcatcagccccaacccacacgtgaggcaagcagcctgcatctggctcctttcccttgtcaggaagctaagtacccacaaagaagtgaagtctcatcttaaagaaattcaaagtgcatttgtttcagttctatcagaaaatgatgaacttagccaagatgttgcatcaaagggccttgggttggtttatgaactaggcaatgaacaagatcaacaggaattggtttctacacttgtggaaacacttatgactggcaaaagagttaaacatgaagtttctggagagacagtggtatttcaagggggagctcttggcaaaacaccagatggtcagggcctttctacttacaaggaactttgttctctggcaagtgatcttagccagccagatctggtgtataaatttatgaatttagccaaccatcatgcaatgtggaactctaggaagggtgctgcttttggttttaatgtaattgctaccagagctggagagcagctggctccttttctgcctcagctagttcctcgactttatcgttaccagtttgatcccaaccttggcattcgacaggccatgacaagtatttggaatgcgttggtcactgacaaatccatggtggataaatatttgaaagaaattcttcaagatttggttaagaaccttacaagcaatatgtggcgagttcgagaatccagctgtttagctttgaatgatttattgagaggaagacccttagatgacatcattgataaacttccagaaatttgggaaacgctttttagagtacaagatgatatcaaggaatctgtacgaaaagcggcagaactagctctgaaaactctgagcaaggtctgtgtgaaaatgtgtgaccctgccaaaggagcagctggccagagaaccatcgctgcccttctgccttgccttctggacaaaggaatgatgagcaccgtgacggaagttcgagccctcagcattaacacccttgtgaagatcagcaaaagtgcaggagccatgttgaaaccgcatgcaccaaaactcattccagctctgctagagtccttaagtgtattggagccccaagttctcaattatttgagcctccgggcgacagagcaagaaaaggctgcgatggatagtgctcggcttagtgctgccaaatcttctccaatgatggaaacaatcaacatgtgcctgcaataccttgatgtgtcagtgctgggcgagctagttcctaggttgtgtgaactgatcagaagtggtgtaggtcttggaactaagggtggctgtgccagtgtcattgtgtcattaactactcagtgtcctcaggacctaacaccttactcaggtaaacttatgagtgctttgctgagtggcctgacagatcggaacagtgtgattcagaaatcttgtgcatttgctatgggccatttagttcggacctcacgggatagcagcactgaaaaactcctgcagaagctcaatgggtggtatatggagaaagaagaacctatctacaagacctcttgtgctttgactattcatgctattggacgatacagccctgatgtattaaagaatcatgcaaaagaagtcctgcctctggcatttttaggcatgcatgaaattgctgatgaggagaaatccgaaaaagaagaatgtaatttatggaccgaagtgtggcaggaaaacgtacctggatcctttggtggcattcgattatacctgcaggagttaattactattacccagaaggctttgcagtctcagtcctggaaaatgaaagcccagggtgcaattgccatggcatcaattgcaaaacagactagctctctagtacctccatatctcggaatgatactgaccgcattgctgcaaggcctggctggaagaacgtgggcaggaaaggaggagctattgaaagccattgcctgtgtggtgacagcttgcagtgcagagctggaaaagtctgtgcccaatcaacccagcacaaatgaaattcttcaagctgttctgaaggaatgtagcaaagagaatgtcaaatacaagattgtagcaatcagctgtgcagctgatatcttgaaggccaccaaagaggacagattccaggagttctctaacattgtcatacctctcatcaagaagaactcacttgaaagcagtggggtccggacaaccaaaaatgaagaggagaatgaaaaggaaaaggagctccagctggaatatctgctgggtgcctttgaaagcctgggcaaagcctggccgcgaaacgcggagacccaacgttgttatcgtcaggagctgtgcaaactgatgtgtgaacggctaaaactcagcacgtggaaagtgcagctaggagtcctgcaatcaatgaatgccttttttcaggggttaatgcttttggaagaagaacatgccgatcctgaggctttggctgaaattctgcttgaaacttgtaaatcaatcacatattctttaggtgagtgtagtaaactaaaactgatgagggagtcctaattttaaagctaaggagctgagcttcaaatatttcctactttgtcttaggaactaaatttctgaaatagctactggactctgctacttattatactccatgtgtaccccttaactggaatatttaaatctggaactataacaggattttagcatctagtttagaaaaaccttcgtgacaagtatttttacaaaattgttacttgaaagtaatttcaaacttacagaatggttgcaacgacagtacatgtaatactctgcaatatgtatacactttatgcagaatcatttgttaacattttgtgccatttgctttgtcatttggacttctatatacatgtttttctcctgaaccatttgaaagtatgttgcttacttcaggcccccttgttcctcaattatttagtgtgccacggtacagttgtcaactttaggtagtaaacatggatgcagttttttaaatcaaatgtttatcgttcatattctagtttgttcagttgattggtgacgtcatt

SEQ ID NO: 302957 - DNA, 2486 bp, Homo sapiens
ggggacctggcaaggctggtggctgtgctgcaaggcaaacactccacctatgacactgacctcttttccccgctgctcaacgccatacagcagggctgcagggcacccccttacttgggccgagtaggggtggaaaacgtacctggatcctttggtggcattcgattatacctgcaggagttaattactattacccagaaggctttgcagtctcagtcctggaaaatgaaagcccagggtgcaattgccatggcatcaattgcaaaacagactagctctctagtacctccatatctcggaatgatactgaccgcattgctgcaaggcctggctggaagaacgtgggcaggaaaggaggagctattgaaagccattgcctgtgtggtgacagcttgcagtgcagagctggaaaagtctgtgcccaatcaacccagcacaaatgaaattcttcaagctgttctgaaggaatgtagcaaagagaatgtcaaatacaagattgtagcaatcagctgtgcagctgatatcttgaaggccaccaaagaggacagattccaggagttctctaacattgtcatacctctcatcaagaagaactcacttgaaagcagtggggtccggacaaccaaaaatgaagaggagaatgaaaaggaaaaggagctccagctggaatatctgctgggtgcctttgaaagcctgggcaaagcctggccgcgaaacgcggagacccaacgttgttatcgtcaggagctgtgcaaactgatgtgtgaacggctaaaactcagcacgtggaaagtgcagctaggagtcctgcaatcaatgaatgccttttttcaggggttaatgcttttggaagaagaacatgccgatcctgaggctttggctgaaattctgcttgaaacttgtaaatcaatcacatattctttagaaaataagacctactcatctgtgagaacagaagctttatctgtgatagaattgctgcttaaaaaacttgaagaatctaaacagtgggaatgtttgacatctgaatgcagagtgctcctaattgagtctttagctactatggagccagacagcagacctgaactgcaggagaaagcagcgttactgaagaaaacacttgaaaatctggaataaattagaaggggaagaaacaaacaagtgccatgttcattgggggttgaagtggtggtgttctttgaaaaaccaagtgggaaaaagtaaagattaatctgtagcatgcatcattccttggctgaaataaaaagaaaaagccttaaattttgttccttattagctttattttactttatgtttttaaagtatctgggctgagtgagcttaatggaaccttggatgtttgaggggtggttgtaaaggaaactggcagaaatagttactaaaagagttcaagctgttattaaaggaattaatagacagagttgcagagcaagctggataaaaatcttagaactgcattcaaattagttatttcaggaaggggccctataaataacttattttaacctccctcttacacctgaagaaataggaagctgtgtcatctcagaggctttctgaggcctgtgccaaagtcagaacccaggtgtttaatgtctggccctggatactttcttttatggccatctgccaaatcagtgctaaccccggcttacccaagaaacttccaagatgaggtacgtttagggtggcacacagcagtctttgtgccagaactaaactgacccttaccattgggtttctgaaagccagaagctaaacattgtcttgtcatgtgtttaggtggttgatttggagaaaatgattgtttagcatctttacagatggagaggacagagtcagtctccttcggataattccaatcgtcttccttttacaggtggataaagtagattaggacaagatcacacattctatctgtgtctgtggctgcatattttgcaaaaccagaaacaaaatcgcagactgccgtggtttagaccatttataatgtcaaaactgtaatgacaaatttctgttcacttttatgctaccagtatgactttataggggagaaggaaagccttttaattagccacctgggaattactcttttaaaaaatgccttttctcaaaagaacatgataccactccaagtaaatcattgccactaggggttttcctccttccttctgttgcccatgcccctgcctgaaagtgtagggtaagaggaaaaacaagtaaaaccttagtgttgatggtaaactgagaactctgtagcttaccttggattccagagcagaagactggtttacattcagtactcatccttattgacgttaacaccaggaatctccatgtttattatttttcgtggaaactccatgtttattatttttggtggtctctattgaccaatgtatttcaaacttttttgactgcaagtcataataaaaataactttttacatcacgaaaaaaaaaatg

SEQ ID NO: 302958 - DNA, 1992 bp, Homo sapiens
tccctctctcacgatccttccctctctcccggtcttgttgctctgacattctcattttctttttagccaaataccttcccaccgtgaatcccaatgcaagcaaggatccatgctgtatctccggacaaccaaaaatgaagaggagaatgaaaaggaaaaggagctccagctggaatatctgctgggtgcctttgaaagcctgggcaaagcctggccgcgaaacgcggagacccaacgttgttatcgtcaggagctgtgcaaactgatgtgtgaacggctaaaactcagcacgtggaaagtgcagctaggagtcctgcaatcaatgaatgccttttttcaggggttaatgcttttggaagaagaacatgccgatcctgaggctttggctgaaattctgcttgaaacttgtaaatcaatcacatattctttagaaaataagacctactcatctgtgagaacagaagctttatctgtgatagaattgctgcttaaaaaacttgaagaatctaaacagtgggaatgtttgacatctgaatgcagagtgctcctaattgagtctttagctactatggagccagacagcagacctgaactgcaggagaaagcagcgttactgaagaaaacacttgaaaatctggaataaattagaaggggaagaaacaaacaagtgccatgttcattgggggttgaagtggtggtgttctttgaaaaaccaagtgggaaaaagtaaagattaatctgtagcatgcatcattccttggctgaaataaaaagaaaaagccttaaattttgttccttattagctttattttactttatgtttttaaagtatctgggctgagtgagcttaatggaaccttggatgtttgaggggtggttgtaaaggaaactggcagaaatagttactaaaagagttcaagctgttattaaaggaattaatagacagagttgcagagcaagctggataaaaatcttagaactgcattcaaattagttatttcaggaaggggccctataaataacttattttaacctccctcttacacctgaagaaataggaagctgtgtcatctcagaggctttctgaggcctgtgccaaagtcagaacccaggtgtttaatgtctggccctggatactttcttttatggccatctgccaaatcagtgctaaccccggcttacccaagaaacttccaagatgaggtacgtttagggtggcacacagcagtctttgtgccagaactaaactgacccttaccattgggtttctgaaagccagaagctaaacattgtcttgtcatgtgtttaggtggttgatttggagaaaatgattgtttagcatctttacagatggagaggacagagtcagtctccttcggataattccaatcgtcttccttttacaggtggataaagtagattaggacaagatcacacattctatctgtgtctgtggctgcatattttgcaaaaccagaaacaaaatcgcagactgccgtggtttagaccatttataatgtcaaaactgtaatgacaaatttctgttcacttttatgctaccagtatgactttataggggagaaggaaagccttttaattagccacctgggaattactcttttaaaaaatgccttttctcaaaagaacatgataccactccaagtaaatcattgccactaggggttttcctccttccttctgttgcccatgcccctgcctgaaagtgtagggtaagaggaaaaacaagtaaaaccttagtgttgatggtaaactgagaactctgtagcttaccttggattccagagcagaagactggtttacattcagtactcatccttattgacgttaacaccaggaatctccatgtttattatttttcgtggaaactccatgtttattatttttggtggtctctattgaccaatgtatttcaaacttttttgactgcaagtcataataaaaataactttttacatcacgaaaaaaaaaatg

SEQ ID NO: 302959 - DNA, 3812 bp, Homo sapiens
  misc_feature (3790)..(3790): n is a, c, g, or t
gccaaaattcatcttcagcgcaggttcttcttcaaacagtggcggaggttctggaatcccacagcctcctccgggaatgagcttttatgcagccaaacgagttattggtgataacccatggacacctgaacaattggaacagtgcaaattgggaatcgtgaaattcatagaagctgaacaggtgcctgaacttgaagctgttctccacttggtgattgcctctagtgatacacgccacagtgtggcaacggcagcagacctggaattgaaaagcaaacagagcttaattgactggaataatcctgccatcattaataagatgtacaaggtgtaccttggagatataccactgaagacaaaagagggtgcagttctgaagccagagttgaaaagggaccctgtcagtacaagagtcaagttaaagattgtcccccatctcctccgctctagacaagctgctgaaacgttcccagccaacattcaggtggtgtatgatggactttttggtacaaatacaaattcaaagttaagaacattatccctgcaatttgtgcatcatatttgtataacctgtccagaaatcaagattaagccattaggtccaatgcttttgaatggcctcaccaagctaatcaatgaatacaaagaggaccctaaactactgtcaatggcatattcagctgttggaaaactctccagtcggatgccacatttattcactaaggatatagcgcttgtgcagcagctttttgaagccctttgcaaggaagagcctgagactcgacttgctattcaagaagctttatctatgatggttggagcgtatagtactttggaaggggcacagcgaactctcatggaggcacttgtggcttcgtacttaataaagcctgaagttcaagttcgacaagtggctgtgaaatttgccagtacggtgtttccctcagatcatatcccttccagatatttgctgctactggctgcaggagatccacgtgaagaagttcatggagaagcacaacgcgtattaaggtgtcttccaggtagaaacagaaaagaaagtacttctgagcagatgccttccttcccagaaatggtttattacatccaagaaaaggcttctcatcgaatgaaaactccagtcaagtacatgaccgggaccactgtccttccatttaacccagcagcctttggagagatcgttctgtacttgcgcatgtgccttgcgcacagtgcgggggtggtgcccacctctcagagtttggctgatatgcaggatcatgccccagccattgggcgctacatacggactttaatgtcaagcgggcagatggcaccctcatcatctaacaagagtggggagactaaccctgtccagatctacattggcctgcttcagcagctgttagcaggtgttggaggtttgccggttatgtactgtctattggaagctgtgtcagtgtatccagaaaagctggctaccaaatttgtagacaaaacagaatggataaagagtctgatgaataacagtaaagaagaaatgcgcgaactggcagcgttgttttattctgtagtggtatcaacagtgtcggggaatgagttgaaatcaatgatagaacagcttataaagactacaaaagacaatcacagcccggagatacagcatggatccttgcttgcattgggattcacggtgggaaggtatttggctaaaaagaaaatgagaatgtcagagcaacaagacctggagagaaatgctgacaccctccctgatcaagaggaactcattcagagtgctacagaaacaataggctcatttttggacagtacatcacccctcctggcaattgctgcctgcacagccctgggtgaaattggcagaaatggtccacttccaatccccagtgagggatctggctttaccaaattgcatcttgtagaaagcttactaagtagaataccttccagtaaagaaacaaataagatgaaagaacgagcaatccaaacactgggatattttccagttggggatggagattttcctcaccagaaactcctcttgcaaggtctgatggattctgtggaggccaagcagatagaacttcagttcactattggcgaagccattaccagtgctgcaataggaactagttctgtggctgcccgagatgcctggcaaatgactgaagaggaatatactccacctgctggagccaaagtgaatgatgtggttccatgggtgttggatgtgattttaaataaacatatcatcagccccaacccacacgtgaggcaagcagcctgcatctggctcctttcccttgtcaggaagctaagtacccacaaagaagtgaagtctcatcttaaagaaattcaaagtgcatttgtttcagttctatcagaaaatgatgaacttagccaagatgttgcatcaaagggccttgggttggtttatgaactaggcaatgaacaagatcaacaggaattggtttctacacttgtggaaacacttatgactggcaaaagagttaaacatgaagtttctggagagacagtggtatttcaagggggagctcttggcaaaacaccagatggtcagggcctttctacttacaaggaactttgttctctggcaagtgatcttagccagccagatctggtgtataaatttatgaatttagccaaccatcatgcaatgtggaactctaggaagggtgctgcttttggttttaatgtaattgctaccagagctggagagcagctggctccttttctgcctcagctagttcctcgactttatcgttaccagtttgatcccaaccttggcattcgacaggccatgacaagtatttggaatgcgttggtcactgacaaatccatggtggataaatatttgaaagaaattcttcaagatttggttaagaaccttacaagcaatatgtggcgagttcgagaatccagctgtttagctttgaatgatttattgagaggaagacccttagatgacatcattgataaacttccagaaatttgggaaacgctttttagagtacaagatgatatcaaggaatctgtacgaaaagcggcagaactagctctgaaaactctgagcaaggtctgtgtgaaaatgtgtgaccctgccaaaggagcagctggccagagaaccatcgctgcccttctgccttgccttctggacaaaggaatgatgagcaccgtgacggaagttcgagccctcagcattaacacccttgtgaagatcagcaaaagtgcaggagccatgttgaaaccgcatgcaccaaaactcattccagctctgctagagtccttaagtgtattggagccccaagttctcaattatttgagcctccgggcgacagagcaagaaaaggctgcgatggatagtgctcggcttagtgctgccaaatcttctccaatgatggaaacaatcaacatgtgcctgcaataccttgatgtgtcagtgctgggcgagctagttcctaggttgtgtgaactgatcagaagtggtgtaggtcttggaactaagggtggctgtgccagtgtcattgtgtcattaactactcagtgtcctcaggacctaacaccttactcaggtaaacttatgagtgctttgctgagtggcctgacagatcggaacagtgtgattcagaaatcttgtgcatttgctatgggccatttagttcggacctcacgggatagcagcactgaaaaactcctgcagaagctcaatgggtggtatatggagaaagaagaacctatctacaagacctcntggcttgctttcagcatggggt

SEQ ID NO: 302960 - DNA, 1964 bp, Homo sapiens
ggggacctggcaaggctggtggctgtgctgcaaggcaaacactccacctatgacactgacctcttttccccgctgctcaacgccatacagcagggctgcagggcacccccttacttgggccgagtaggggtggaaaacgtacctggatcctttggtggcattcgattatacctgcaggagttaattactattacccagaaggctttgcagtctcagtcctggaaaatgaaagcccagggtgcaattgccatggcatcaattgcaaaacagactagctctctagtacctccatatctcggaatgatactgaccgcattgctgcaaggcctggctggaagaacgtgggcaggaaaggaggagctattgaaagccattgcctgtgtggtgacagcttgcagtgcagagctggaaaagtctgtgcccaatcaacccagcacaaatgaaattcttcaagctgttctgaaggaatgtagcaaagagaatgtcaaatacaagattgtagcaatcagctgtgcagctgatatcttgaaggccaccaaagaggacagattccaggagttctctaacattgtcatacctctcatcaagaagaaaacacttgaaaatctggaataaattagaaggggaagaaacaaacaagtgccatgttcattgggggttgaagtggtggtgttctttgaaaaaccaagtgggaaaaagtaaagattaatctgtagcatgcatcattccttggctgaaataaaaagaaaaagccttaaattttgttccttattagctttattttactttatgtttttaaagtatctgggctgagtgagcttaatggaaccttggatgtttgaggggtggttgtaaaggaaactggcagaaatagttactaaaagagttcaagctgttattaaaggaattaatagacagagttgcagagcaagctggataaaaatcttagaactgcattcaaattagttatttcaggaaggggccctataaataacttattttaacctccctcttacacctgaagaaataggaagctgtgtcatctcagaggctttctgaggcctgtgccaaagtcagaacccaggtgtttaatgtctggccctggatactttcttttatggccatctgccaaatcagtgctaaccccggcttacccaagaaacttccaagatgaggtacgtttagggtggcacacagcagtctttgtgccagaactaaactgacccttaccattgggtttctgaaagccagaagctaaacattgtcttgtcatgtgtttaggtggttgatttggagaaaatgattgtttagcatctttacagatggagaggacagagtcagtctccttcggataattccaatcgtcttccttttacaggtggataaagtagattaggacaagatcacacattctatctgtgtctgtggctgcatattttgcaaaaccagaaacaaaatcgcagactgccgtggtttagaccatttataatgtcaaaactgtaatgacaaatttctgttcacttttatgctaccagtatgactttataggggagaaggaaagccttttaattagccacctgggaattactcttttaaaaaatgccttttctcaaaagaacatgataccactccaagtaaatcattgccactaggggttttcctccttccttctgttgcccatgcccctgcctgaaagtgtagggtaagaggaaaaacaagtaaaaccttagtgttgatggtaaactgagaactctgtagcttaccttggattccagagcagaagactggtttacattcagtactcatccttattgacgttaacaccaggaatctccatgtttattatttttcgtggaaactccatgtttattatttttggtggtctctattgaccaatgtatttcaaacttttttgactgcaagtcataataaaaataactttttacatcacgaaaaaaaaaatg

SEQ ID NO: 302961 - DNA, 3876 bp, Homo sapiens
gccaaaattcatcttcagcgcaggttcttcttcaaacagtggcggaggttctggaatcccacagcctcctccgggaatgagcttttatgcagccaaacgagttattggtgataacccatggacacctgaacaattggaacagtgcaaattgggaatcgtgaaattcatagaagctgaacaggtgcctgaacttgaagctgttctccacttggtgattgcctctagtgatacacgccacagtgtggcaacggcagcagacctggaattgaaaagcaaacagagcttaattgactggaataatcctgccatcattaataagatgtacaaggtgtaccttggagatataccactgaagacaaaagagggtgcagttctgaagccagagttgaaaagggaccctgtcagtacaagagtcaagttaaagattgtcccccatctcctccgctctagacaagctgctgaaacgttcccagccaacattcaggtggtgtatgatggactttttggtacaaatacaaattcaaagttaagaacattatccctgcaatttgtgcatcatatttgtataacctgtccagaaatcaagattaagccattaggtccaatgcttttgaatggcctcaccaagctaatcaatgaatacaaagaggaccctaaactactgtcaatggcatattcagctgttggaaaactctccagtcggatgccacatttattcactaaggatatagcgcttgtgcagcagctttttgaagccctttgcaaggaagagcctgagactcgacttgctattcaagaagctttatctatgatggttggagcgtatagtactttggaaggggcacagcgaactctcatggaggcacttgtggcttcgtacttaataaagcctgaagttcaagttcgacaagtggctgtgaaatttgccagtacggtgtttccctcagatcatatcccttccagatatttgctgctactggctgcaggagatccacgtgaagaagttcatggagaagcacaacgcgtattaaggtgtcttccaggtagaaacagaaaagaaagtacttctgagcagatgccttccttcccagaaatggtttattacatccaagaaaaggcttctcatcgaatgaaaactccagtcaagtacatgaccgggaccactgtccttccatttaacccagcagcctttggagagatcgttctgtacttgcgcatgtgccttgcgcacagtgcgggggtggtgcccacctctcagagtttggctgatatgcaggatcatgccccagccattgggcgctacatacggactttaatgtcaagcgggcagatggcaccctcatcatctaacaagagtggggagactaaccctgtccagatctacattggcctgcttcagcagctgttagcaggtgttggaggtttgccggttatgtactgtctattggaagctgtgtcagtgtatccagaaaagctggctaccaaatttgtagacaaaacagaatggataaagagtctgatgaataacagtaaagaagaaatgcgcgaactggcagcgttgttttattctgtagtggtatcaacagtgtcggggaatgagttgaaatcaatgatagaacagcttataaagactacaaaagacaatcacagcccggagatacagcatggatccttgcttgcattgggattcacggtgggaaggtatttggctaaaaagaaaatgagaatgtcagagcaacaagacctggagagaaatgctgacaccctccctgatcaagaggaactcattcagagtgctacagaaacaataggctcatttttggacagtacatcacccctcctggcaattgctgcctgcacagccctgggtgaaattggcagaaatggtccacttccaatccccagtgagggatctggctttaccaaattgcatcttgtagaaagcttactaagtagaataccttccagtaaagaaacaaataagatgaaagaacgagcaatccaaacactgggatattttccagttggggatggagattttcctcaccagaaactcctcttgcaaggtctgatggattctgtggaggccaagcagatagaacttcagttcactattggcgaagccattaccagtgctgcaataggaactagttctgtggctgcccgagatgcctggcaaatgactgaagaggaatatactccacctgctggagccaaagtgaatgatgtggttccatgggtgttggatgtgattttaaataaacatatcatcagccccaacccacacgtgaggcaagcagcctgcatctggctcctttcccttgtcaggaagctaagtacccacaaagaagtgaagtctcatcttaaagaaattcaaagtgcatttgtttcagttctatcagaaaatgatgaacttagccaagatgttgcatcaaagggccttgggttggtttatgaactaggcaatgaacaagatcaacaggaattggtttctacacttgtggaaacacttatgactggcaaaagagttaaacatgaagtttctggagagacagtggtatttcaagggggagctcttggcaaaacaccagatggtcagggcctttctacttacaaggaactttgttctctggcaagtgatcttagccagccagatctggtgtataaatttatgaatttagccaaccatcatgcaatgtggaactctaggaagggtgctgcttttggttttaatgtaattgctaccagagctggagagcagctggctccttttctgcctcagctagttcctcgactttatcgttaccagtttgatcccaaccttggcattcgacaggccatgacaagtatttggaatgcgttggtcactgacaaatccatggtggataaatatttgaaagaaattcttcaagatttggttaagaaccttacaagcaatatgtggcgagttcgagaatccagctgtttagctttgaatgatttattgagaggaagacccttagatgacatcattgataaacttccagaaatttgggaaacgctttttagagtacaagatgatatcaaggaatctgtacgaaaagcggcagaactagctctgaaaactctgagcaaggtctgtgtgaaaatgtgtgaccctgccaaaggagcagctggccagagaaccatcgctgcccttctgccttgccttctggacaaaggaatgatgagcaccgtgacggaagttcgagccctcagcattaacacccttgtgaagatcagcaaaagtgcaggagccatgttgaaaccgcatgcaccaaaactcattccagctctgctagagtccttaagtgtattggagccccaagttctcaattatttgagcctccgggcgacagagcaagaaaaggctgcgatggatagtgctcggcttagtgctgccaaatcttctccaatgatggaaacaatcaacatgtgcctgcaataccttgatgtgtcagtgctgggcgagctagttcctaggttgtgtgaactgatcagaagtggtgtaggtcttggaactaagggtggctgtgccagtgtcattgtgtcattaactactcagtgtcctcaggacctaacaccttactcaggtaaacttatgagtgctttgctgagtggcctgacagatcggaacagtgtgattcagaaatcttgtgcatttgctatgggccatttagttcggacctcacgggatagcagcactgaaaaactcctgcagaagctcaatgggtggtatatggagaaagaagaacctatctacaagacctcttgtgctttgactattcatgctattgaaacttctaaaactaggcctagttttagaagtttcatagcacctagttttagaagtcccca

SEQ ID NO: 302962 - DNA, 1736 bp, Homo sapiens
ataatatattacatactgtcaatatgtgtctcaaaacctaattcttgacagtagcgtagaggcacatattgacagtatgtaatgataattatatactgatctgttatcaagaggttgctttgcatttatttgggggataggatatttttaaatttttttcttgcttgttctataaggattctttggggttttttctttttgctttgttttttgttttttttgtttttgttttttttttttcatgcagaatctaaacagtgggaatgtttgacatctgaatgcagagtgctcctaattgagtctttagctactatggagccagacagcagacctgaactgcaggagaaagcagcgttactgaagaaaacacttgaaaatctggaataaattagaaggggaagaaacaaacaagtgccatgttcattgggggttgaagtggtggtgttctttgaaaaaccaagtgggaaaaagtaaagattaatctgtagcatgcatcattccttggctgaaataaaaagaaaaagccttaaattttgttccttattagctttattttactttatgtttttaaagtatctgggctgagtgagcttaatggaaccttggatgtttgaggggtggttgtaaaggaaactggcagaaatagttactaaaagagttcaagctgttattaaaggaattaatagacagagttgcagagcaagctggataaaaatcttagaactgcattcaaattagttatttcaggaaggggccctataaataacttattttaacctccctcttacacctgaagaaataggaagctgtgtcatctcagaggctttctgaggcctgtgccaaagtcagaacccaggtgtttaatgtctggccctggatactttcttttatggccatctgccaaatcagtgctaaccccggcttacccaagaaacttccaagatgaggtacgtttagggtggcacacagcagtctttgtgccagaactaaactgacccttaccattgggtttctgaaagccagaagctaaacattgtcttgtcatgtgtttaggtggttgatttggagaaaatgattgtttagcatctttacagatggagaggacagagtcagtctccttcggataattccaatcgtcttccttttacaggtggataaagtagattaggacaagatcacacattctatctgtgtctgtggctgcatattttgcaaaaccagaaacaaaatcgcagactgccgtggtttagaccatttataatgtcaaaactgtaatgacaaatttctgttcacttttatgctaccagtatgactttataggggagaaggaaagccttttaattagccacctgggaattactcttttaaaaaatgccttttctcaaaagaacatgataccactccaagtaaatcattgccactaggggttttcctccttccttctgttgcccatgcccctgcctgaaagtgtagggtaagaggaaaaacaagtaaaaccttagtgttgatggtaaactgagaactctgtagcttaccttggattccagagcagaagactggtttacattcagtactcatccttattgacgttaacaccaggaatctccatgtttattatttttcgtggaaactccatgtttattatttttggtggtctctattgaccaatgtatttcaaacttttttgactgcaagtcataataaaaataactttttacatcacgaaaaaaaaaatg

SEQ ID NO: 302963 - DNA, 3746 bp, Homo sapiens
gccaaaattcatcttcagcgcaggttcttcttcaaacagtggcggaggttctggaatcccacagcctcctccgggaatgagcttttatgcagccaaacgagttattggtgataacccatggacacctgaacaattggaacagtgcaaattgggaatcgtgaaattcatagaagctgaacaggtgcctgaacttgaagctgttctccacttggtgattgcctctagtgatacacgccacagtgtggcaacggcagcagacctggaattgaaaagcaaacagagcttaattgactggaataatcctgccatcattaataagatgtacaaggtgtaccttggagatataccactgaagacaaaagagggtgcagttctgaagccagagttgaaaagggaccctgtcagtacaagagtcaagttaaagattgtcccccatctcctccgctctagacaagctgctgaaacgttcccagccaacattcaggtggtgtatgatggactttttggtacaaatacaaattcaaagttaagaacattatccctgcaatttgtgcatcatatttgtataacctgtccagaaatcaagattaagccattaggtccaatgcttttgaatggcctcaccaagctaatcaatgaatacaaagaggaccctaaactactgtcaatggcatattcagctgttggaaaactctccagtcggatgccacatttattcactaaggatatagcgcttgtgcagcagctttttgaagccctttgcaaggaagagcctgagactcgacttgctattcaagaagctttatctatgatggttggagcgtatagtactttggaaggggcacagcgaactctcatggaggcacttgtggcttcgtacttaataaagcctgaagttcaagttcgacaagtggctgtgaaatttgccagtacggtgtttccctcagatcatatcccttccagatatttgctgctactggctgcaggagatccacgtgaagaagttcatggagaagcacaacgcgtattaaggtgtcttccaggtagaaacagaaaagaaagtacttctgagcagatgccttccttcccagaaatggtttattacatccaagaaaaggcttctcatcgaatgaaaactccagtcaagtacatgaccgggaccactgtccttccatttaacccagcagcctttggagagatcgttctgtacttgcgcatgtgccttgcgcacagtgcgggggtggtgcccacctctcagagtttggctgatatgcaggatcatgccccagccattgggcgctacatacggactttaatgtcaagcgggcagatggcaccctcatcatctaacaagagtggggagactaaccctgtccagatctacattggcctgcttcagcagctgttagcaggtgttggaggtttgccggttatgtactgtctattggaagctgtgtcagtgtatccagaaaagctggctaccaaatttgtagacaaaacagaatggataaagagtctgatgaataacagtaaagaagaaatgcgcgaactggcagcgttgttttattctgtagtggtatcaacagtgtcggggaatgagttgaaatcaatgatagaacagcttataaagactacaaaagacaatcacagcccggagatacagcatggatccttgcttgcattgggattcacggtgggaaggtatttggctaaaaagaaaatgagaatgtcagagcaacaagacctggagagaaatgctgacaccctccctgatcaagaggaactcattcagagtgctacagaaacaataggctcatttttggacagtacatcacccctcctggcaattgctgcctgcacagccctgggtgaaattggcagaaatggtccacttccaatccccagtgagggatctggctttaccaaattgcatcttgtagaaagcttactaagtagaataccttccagtaaagaaacaaataagatgaaagaacgagcaatccaaacactgggatattttccagttggggatggagattttcctcaccagaaactcctcttgcaaggtctgatggattctgtggaggccaagcagatagaacttcagttcactattggcgaagccattaccagtgctgcaataggaactagttctgtggctgcccgagatgcctggcaaatgactgaagaggaatatactccacctgctggagccaaagtgaatgatgtggttccatgggtgttggatgtgattttaaataaacatatcatcagccccaacccacacgtgaggcaagcagcctgcatctggctcctttcccttgtcaggaagctaagtacccacaaagaagtgaagtctcatcttaaagaaattcaaagtgcatttgtttcagttctatcagaaaatgatgaacttagccaagatgttgcatcaaagggccttgggttggtttatgaactaggcaatgaacaagatcaacaggaattggtttctacacttgtggaaacacttatgactggcaaaagagttaaacatgaagtttctggagagacagtggtatttcaagggggagctcttggcaaaacaccagatggtcagggcctttctacttacaaggaactttgttctctggcaagtgatcttagccagccagatctggtgtataaatttatgaatttagccaaccatcatgcaatgtggaactctaggaagggtgctgcttttggttttaatgtaattgctaccagagctggagagcagctggctccttttctgcctcagctagttcctcgactttatcgttaccagtttgatcccaaccttggcattcgacaggccatgacaagtatttggaatgcgttggtcactgacaaatccatggtggataaatatttgaaagaaattcttcaagatttggttaagaaccttacaagcaatatgtggcgagttcgagaatccagctgtttagctttgaatgatttattgagaggaagacccttagatgacatcattgataaacttccagaaatttgggaaacgctttttagagtacaagatgatatcaaggaatctgtacgaaaagcggcagaactagctctgaaaactctgagcaaggtctgtgtgaaaatgtgtgaccctgccaaaggagcagctggccagagaaccatcgctgcccttctgccttgccttctggacaaaggaatgatgagcaccgtgacggaagttcgagccctcagcattaacacccttgtgaagatcagcaaaagtgcaggagccatgttgaaaccgcatgcaccaaaactcattccagctctgctagagtccttaagtgtattggagccccaagttctcaattatttgagcctccgggcgacagagcaagaaaaggctgcgatggatagtgctcggcttagtgctgccaaatcttctccaatgatggaaacaatcaacatgtgcctgcaataccttgatgtgtcagtgctgggcgagctagttcctaggttgtgtgaactgatcagaagtggtgtaggtcttggaactaaggtaagtgtactttccacaagaggaaatgtgcatcttcattagttctggccataaggatataacagccatcatgtttgaaattcatgttttaccacaaaatctaatattatacactaaccattttatttctgtggttgcactgataactgaaaacatgtaactggttcaagaaataaaacatctaactgttccagtaaaaaaa

SEQ ID NO: 302964 - DNA, 3672 bp, Homo sapiens
gccaaaattcatcttcagcgcaggttcttcttcaaacagtggcggaggttctggaatcccacagcctcctccgggaatgagcttttatgcagccaaacgagttattggtgataacccatggacacctgaacaattggaacagtgcaaattgggaatcgtgaaattcatagaagctgaacaggtgcctgaacttgaagctgttctccacttggtgattgcctctagtgatacacgccacagtgtggcaacggcagcagacctggaattgaaaagcaaacagagcttaattgactggaataatcctgccatcattaataagatgtacaaggtgtaccttggagatataccactgaagacaaaagagggtgcagttctgaagccagagttgaaaagggaccctgtcagtacaagagtcaagttaaagattgtcccccatctcctccgctctagacaagctgctgaaacgttcccagccaacattcaggtggtgtatgatggactttttggtacaaatacaaattcaaagttaagaacattatccctgcaatttgtgcatcatatttgtataacctgtccagaaatcaagattaagccattaggtccaatgcttttgaatggcctcaccaagctaatcaatgaatacaaagaggaccctaaactactgtcaatggcatattcagctgttggaaaactctccagtcggatgccacatttattcactaaggatatagcgcttgtgcagcagctttttgaagccctttgcaaggaagagcctgagactcgacttgctattcaagaagctttatctatgatggttggagcgtatagtactttggaaggggcacagcgaactctcatggaggcacttgtggcttcgtacttaataaagcctgaagttcaagttcgacaagtggctgtgaaatttgccagtacggtgtttccctcagatcatatcccttccagatatttgctgctactggctgcaggagatccacgtgaagaagttcatggagaagcacaacgcgtattaaggtgtcttccaggtagaaacagaaaagaaagtacttctgagcagatgccttccttcccagaaatggtttattacatccaagaaaaggcttctcatcgaatgaaaactccagtcaagtacatgaccgggaccactgtccttccatttaacccagcagcctttggagagatcgttctgtacttgcgcatgtgccttgcgcacagtgcgggggtggtgcccacctctcagagtttggctgatatgcaggatcatgccccagccattgggcgctacatacggactttaatgtcaagcgggcagatggcaccctcatcatctaacaagagtggggagactaaccctgtccagatctacattggcctgcttcagcagctgttagcaggtgttggaggtttgccggttatgtactgtctattggaagctgtgtcagtgtatccagaaaagctggctaccaaatttgtagacaaaacagaatggataaagagtctgatgaataacagtaaagaagaaatgcgcgaactggcagcgttgttttattctgtagtggtatcaacagtgtcggggaatgagttgaaatcaatgatagaacagcttataaagactacaaaagacaatcacagcccggagatacagcatggatccttgcttgcattgggattcacggtgggaaggtatttggctaaaaagaaaatgagaatgtcagagcaacaagacctggagagaaatgctgacaccctccctgatcaagaggaactcattcagagtgctacagaaacaataggctcatttttggacagtacatcacccctcctggcaattgctgcctgcacagccctgggtgaaattggcagaaatggtccacttccaatccccagtgagggatctggctttaccaaattgcatcttgtagaaagcttactaagtagaataccttccagtaaagaaacaaataagatgaaagaacgagcaatccaaacactgggatattttccagttggggatggagattttcctcaccagaaactcctcttgcaaggtctgatggattctgtggaggccaagcagatagaacttcagttcactattggcgaagccattaccagtgctgcaataggaactagttctgtggctgcccgagatgcctggcaaatgactgaagaggaatatactccacctgctggagccaaagtgaatgatgtggttccatgggtgttggatgtgattttaaataaacatatcatcagccccaacccacacgtgaggcaagcagcctgcatctggctcctttcccttgtcaggaagctaagtacccacaaagaagtgaagtctcatcttaaagaaattcaaagtgcatttgtttcagttctatcagaaaatgatgaacttagccaagatgttgcatcaaagggccttgggttggtttatgaactaggcaatgaacaagatcaacaggaattggtttctacacttgtggaaacacttatgactggcaaaagagttaaacatgaagtttctggagagacagtggtatttcaagggggagctcttggcaaaacaccagatggtcagggcctttctacttacaaggaactttgttctctggcaagtgatcttagccagccagatctggtgtataaatttatgaatttagccaaccatcatgcaatgtggaactctaggaagggtgctgcttttggttttaatgtaattgctaccagagctggagagcagctggctccttttctgcctcagctagttcctcgactttatcgttaccagtttgatcccaaccttggcattcgacaggccatgacaagtatttggaatgcgttggtcactgacaaatccatggtggataaatatttgaaagaaattcttcaagatttggttaagaaccttacaagcaatatgtggcgagttcgagaatccagctgtttagctttgaatgatttattgagaggaagacccttagatgacatcattgataaacttccagaaatttgggaaacgctttttagagtacaagatgatatcaaggaatctgtacgaaaagcggcagaactagctctgaaaactctgagcaaggtctgtgtgaaaatgtgtgaccctgccaaaggagcagctggccagagaaccatcgctgcccttctgccttgccttctggacaaaggaatgatgagcaccgcatgcaccaaaactcattccagctctgctagagtccttaagtgtattggagccccaagttctcaattatttgagcctccgggcgacagagcaagaaaaggctgcgatggatagtgctcggcttagtgctgccaaatcttctccaatgatggaaacaatcaacatgtgcctgcaataccttgatgtgtcagtgctgggcgagctagttcctaggttgtgtgaactgatcagaagtggtgtaggtcttggaactaaggtaagtgtactttccacaagaggaaatgtgcatcttcattagttctggccataaggatataacagccatcatgtttgaaattcatgttttaccacaaaatctaatattatacactaaccattttatttctgtggttgcactgataactgaaaacatgtaactggttcaagaaataaaacatctaactgttccagtaaaaaaa

SEQ ID NO: 302965 - DNA, 941 bp, Homo sapiens
tacaattgcatatgtacgagtggatgaacgtaccattggtgatcccgaggatttttgtcaagattggataaaccatgtatcacattgattgtagagatcagcttgaacgggtctttttacgacttggccatgctgaaacagatgaacaattacagaatattatatctaaattccttcctcctgttttgctcaaactctctagcacccaagaaggagtacgtaaaaaggtaatggaactgctggtccatctgaataaacgtataaaaagccgccccaaaatacaacttccagtagagacactgttggttcagtaccaggaccctgctgcagtttcctttgtcacaaattttactataatttatgttaaaatgggctatcctcgcctaccagtggaaaaacaatgtgaactggcccctacgcttcttactgccatggaagggaagcctcagccacagcaggatagcttaatgcatcttttaataccaaccctttttcacatgaaataccctgttgaatcatcaaaatcagcttctccatttaatcttgctgagaaaccaaagactgtgcagctgcttttggacttcatgctagatgtccttctgatgccttatgggtgagttaaaaaataaaagcaaccttgttcttgactgcttttactacggggagttaagtactattttaaatgattaaactctcactagtaaatgaatgcatctcaacatccatttacgtttacaaagatttttttcttctaaacttcagctccactgcttatcggctttacaaatgctgagttgccattgtgattttagactctacctgcctaagatgaaatcagtctttccccataaaaatagttcctgttaggccaaggtgggacgattactgggggctaggagtttcagaccagcctgggtaacagagcgagactctctctcaaa

SEQ ID NO: 302966 - DNA, 668 bp, Homo sapiens
gccaaaattcatcttcagcgcaggttcttcttcaaacagtggcggaggttctggaatcccacagcctcctccgggaatgagcttttatgcagccaaacgagttattggtgataacccatggacacctgaacaattggaacagtgcaaattgggaatcgtgaaattcatagaagctgaacaggtgcctgaacttgaagctgttctccacttggtgattgcctctagtgatacacgccacagtgtggcaacggcagcagacctggaattgaaaagcaaacagagcttaattgactggaataatcctgccatcattaataagatgtacaaggtgtaccttggagatataccactgaagacaaaagagggtgcagttctgaagccagagttgaaaagggaccctgtcagtacaagagtcaagttaaagattgtcccccatctcctccgctctagacaagctgctgaaacgttcccagccaacattcaggtggtgtatgatggactttttggtacaaatacaaattcaaagttaagaacattatccctgcaatttgtgcatcatatttgtataacctgtccagaaatcaagattaagccattaggtccaatgcttttgaatggcctcaccaagaccagctgcatggtacagagctcgattgtatcatgtaact

SEQ ID NO: 302967 - DNA, 434 bp, Homo sapiens
tggtttagacagtgtaaatgacatgtttgggcttaatagtatttcctcatctttcaaccccttaggaggagctattgaaagccattgcctgtgtggtgacagcttgcaggtaaatgttctttcaatgaagatgccatttcttaaactggacccgaaaactgcagcctttattaacttctgatgcttttgtatggaccctgtagtgcagagctggaaaagtctgtgcccaatcaacccagcacaaatgaaattcttcaagctgttctgaaggaatgtagcaaagagaatgtcaaatacaagattgtagcaatcagctgtgcagctgatatcttgaaggccaccaaagaggacagattccaggagttctctaacattgtcatacctctcatcaagaaggtaataccacctgtatcctcagttctggtttatacttt

SEQ ID NO: 302968 - DNA, 517 bp, Homo sapiens
agttagacttgatgtttgcctttgttatagctacggattatttttttttaaagttctttagcttggaagtgaaagtcttttatgggtgtttgtgcggattattcctaattaattgaatgtgccgggtgactttaatttctcttctttaggctgcgatggatagtgctcggcttagtgctgccaaatcttctccaatgatggaaacaatcaacatggtgagtgtcttaaataataatgagagggtttgtttgcttacctgaaagtgtaattcttcaaagtcttcaggctatgttaaatgaagcagagacttatgggatgagtcaagcagctgttgtgactccagttttttcttagtatatttctcttttcttctctgttactaagtggaataaataattccccaaataccagaaacagttggtccaaatttgtattacaagagacaacaacatatcaagagctctctataaatttacatctgtagtcttttgatctgcctatttagaaaggttcagag

SEQ ID NO: 302969 - DNA, 4427 bp, Homo sapiens
ggcggaggcggggctggagtggtggaaggggggtggcaggtctgcattgccgcttccctggtgccgggagcagtcgccgctgccgcctccgcccgcggccgggacccccgtcctcgcccgggactccttacccggggaacctagaccaggtctccagaggcttgtggaagagaagcaggcgacccttcctgagttatcctggcttagcctcccaatctggctccccttccccttcccattcccctgctccccctgtcccttccccatccacccaactgaactgggtataggtcaaagctcctctccttccttttccttcctaggcactcattggctaggacctgtttgctcttttttttgtgcccagagatactggaacacgcttcatctaagtaactgtggggaggggtctttttgactctacaagtccttgagcaaaaagctgaaaaagaagcaggaggtggagaagacccagtgaagtgccccaagccccatcatggaagagggcttccgagaccgggcagctttcatccgtggggccaaagacattgctaaggaagtcaaaaagcatgcggccaagaaggtggtgaagggcctggacagagtccaggacgaatattcccgaagatcgtactcccgctttgaggaggaggatgatgatgatgacttccctgctcccagtgatggttattaccgaggagaagggacccaggatgaggaggaaggtggtgcatccagtgatgctactgagggccatgacgaggatgatgagatctatgaaggggaatatcagggcattccccgggcagagtctgggggcaaaggcgagcggatggcagatggggcgcccctggctggagtaagggggggcttgagtgatggggagggtccccctgggggccggggggaggcacaacgacggaaagaacgagaagaactggcccaacagtatgaagccatcctacgggagtgtggccacggccgcttccagtggacactgtattttgtgcttggtctggcgctgatggctgacggtgtggaggtctttgtggtgggcttcgtgctgcccagcgctgagaaagacatgtgcctgtccgactccaacaaaggcatgctaggcctcatcgtctacctgggcatgatggtgggagccttcctctggggaggtctggctgaccggctgggtcggaggcagtgtctgctcatctcgctctcagtcaacagcgtcttcgccttcttctcatcttttgtccagggttacggcactttcctcttctgccgcctactttctggggttgggattggagggtccatccccattgtcttctcctatttctccgagtttctggcccaggagaaacgaggggagcatttgagctggctctgcatgttttggatgattggtggcgtgtacgcagctgctatggcctgggccatcatcccccactatgggtggagttttcagatgggttctgcctaccagttccatagctggagggtcttcgtcctcgtctgcgcctttccttctgtgtttgccattggggctctgaccacgcagcctgagagcccccgtttcttcctagagaatggaaagcatgatgaggcctggatggtgctgaagcaggtccatgataccaacatgcgagccaaaggacatcctgagcgagtgttctcagtaacccacattaagacgattcatcaggaggatgaattgattgagatccagtcggacacagggacctggtaccagcgctggggggtccgggccttgagcctaggggggcaggtttgggggaattttctctcctgttttggtcccgaatatcggcgcatcactctgatgatgatgggtgtgtggttcaccatgtcattcagctactatggcctgaccgtctggtttcctgacatgatccgccatctccaggcagtggactacgcatcccgcaccaaagtgttccccggggagcgcgtagagcatgtaacttttaacttcacgttggagaatcagatccaccgaggcgggcagtacttcaatgacaagttcattgggctgcggctcaagtcagtgtcctttgaggattccctgtttgaagagtgttattttgaggatgtcacatccagcaacacgtttttccgcaactgcacattcatcaacactgtgttctataacactgacctgttcgagtacaagtttgtgaacagccgtctgataaacagtacattcctgcacaacaaggagggctgcccgctagacgtgacagggacgggcgaaggtgcctacatggtatactttgtgagcttcctggggacactggcagtgcttcctgggaatatcgtgtctgccctgctcatggacaagatcggcaggctcagaatgcttgctggctccagcgtgatgtcctgtgtctcctgcttcttcctgtcttttgggaacagtgagtcggccatgatcgctctgctctgcctttttggcggggtcagcattgcatcctggaatgcgctggacgtgttgactgttgaactctacccctcagacaagaggaccacagcttttggcttcctgaatgccctgtgtaagctggcagctgtgctggggatcagcatcttcacatccttcgtgggaatcaccaaggctgcacccatcctctttgcctcagctgcccttgcccttggcagctctctggccctgaagctgcctgagacccgggggcaggtgctgcagtgaaggggtctctagggctttgggattggcaggcacactgtgagaccaacaactccttccttcccctccctgccctgccatcctgacctccagagccctcactccccactccccgtgtttggtgtcttagctgtgtgtgcgtgtgcgtgtgcatgtgtgtaaaccccgtgggcagggactacagggaaggctccttcatcccagttttgagatgaagctgtactccccatttcccactgcccttgactttgcacaagagaaggctgagccccatccttctccccctgttagagaggggcccttgcttccctgttccaggggttccagaataggcttcctgccttccccatcattccctctgcctaggccctggtgaaaccacaggtatgcaattatgctaggggctggggctctggtgtagaccatggaccaaaagaacttcttagagtctgaagagtgggcctcgggtgccctctcacatctcctgttggatgctgggggagaagcaataaacctcagccctctggcctccactttcctctcaatttgggctgcaaatatgaagcctgaattttatgaaattagctttctgattcttatttattaatagattaagttctgaggcagctccgcaggactgtgtgtgaatgtgtatgtatacttacatatgtgtgtgcatgtgccatggggcggggggtatcactatactgtcctcaaatataagccaagggtaatttcagcggatgcacacacaaccctgcctcccacagttcctcccctaatctggtttctgtgttgagcctgggatggaggagccctaggccagcctgggataagagtcccacagtctagggagatctgagggcatccgacaaggcccatctccttccctcctcaagaagcagaggcctcctctggagtgagaggctccacccactacagcacaggcgggaatagcacagctgccctcccatgctccctacctgtcccctcacagggaggggagcaggggagggaaagaaaccaggcatctggtcaaaccagcagatcaaaaagcacaaagagctggggcagaggcaggaagcaggggccctcctggcagctcctctgagtggggagaggttgggcagtgagtgagggacccctaatgcagggactagaagcctcagtttccccattttacccttccacacaatagcctctgtaggttaggctgccccatcccaccctactctgtgtggctgctttctttggtgccctcccctcaccccactgtagctgtgacgtgttgtagtttttagatgtttgtaaaatgtttaaaaaaatgttaaaaggaaaaaagtgaaaataacaaaaaagaaaatcaaaattcaccttcgtcatgctgcgtccagtgccccaaccctgtggtcactctccccattttgtaacactgtaccaggtggtgactgtttaactctttggtgtctgtgctcaaaagactgccttctccagtgcccagtgtatgagtgtgtgccctgtgcccttgtccctcactccccacatgctggacgtagccctcttcctcgcacccctgggagggacccatccatctcccttgctctcctggggaaccctaaacccaactctgttgatgtgaaaaatgcagtgaaaaatattgacgaaaaataaaacggaaacaaatcctcaaaataaaaaaaaaaaa

SEQ ID NO: 302970 - DNA, 2300 bp, Homo sapiens
gaacttacggctaggtacgaggctgggttgtaaatcggccgaggctgacctgttcgagtacaagtttgtgaacagccgtctgataaacagtacattcctgcacaacaaggagggctgcccgctagacgtgacagggacgggcgaaggtgcctacatggtatactttgtgagcttcctggggacactggcagtgcttcctgggaatatcgtgtctgccctgctcatggacaagatcggcaggctcagaatgcttgctggctccagcgtgatgtcctgtgtctcctgcttcttcctgtcttttgggaacagtgagtcggccatgatcgctctgctctgcctttttggcggggtcagcattgcatcctggaatgcgctggacgtgttgactgttgaactctacccctcagacaagaggaccacagcttttggcttcctgaatgccctgtgtaagctggcagctgtgctggggatcagcatcttcacatccttcgtgggaatcaccaaggctgcacccatcctctttgcctcagctgcccttgcccttggcagctctctggccctgaagctgcctgagacccgggggcaggtgctgcagtgaaggggtctctagggctttgggattggcaggcacactgtgagaccaacaactccttccttcccctccctgccctgccatcctgacctccagagccctcactccccactccccgtgtttggtgtcttagctgtgtgtgcgtgtgcgtgtgcatgtgtgtaaaccccgtgggcagggactacagggaaggctccttcatcccagttttgagatgaagctgtactccccatttcccactgcccttgactttgcacaagagaaggctgagccccatccttctccccctgttagagaggggcccttgcttccctgttccaggggttccagaataggcttcctgccttccccatcattccctctgcctaggccctggtgaaaccacaggtatgcaattatgctaggggctggggctctggtgtagaccatggaccaaaagaacttcttagagtctgaagagtgggcctcgggtgccctctcacatctcctgttggatgctgggggagaagcaataaacctcagccctctggcctccactttcctctcaatttgggctgcaaatatgaagcctgaattttatgaaattagctttctgattcttatttattaatagattaagttctgaggcagctccgcaggactgtgtgtgaatgtgtatgtatacttacatatgtgtgtgcatgtgccatggggcggggggtatcactatactgtcctcaaatataagccaagggtaatttcagcggatgcacacacaaccctgcctcccacagttcctcccctaatctggtttctgtgttgagcctgggatggaggagccctaggccagcctgggataagagtcccacagtctagggagatctgagggcatccgacaaggcccatctccttccctcctcaagaagcagaggcctcctctggagtgagaggctccacccactacagcacaggcgggaatagcacagctgccctcccatgctccctacctgtcccctcacagggaggggagcaggggagggaaagaaaccaggcatctggtcaaaccagcagatcaaaaagcacaaagagctggggcagaggcaggaagcaggggccctcctggcagctcctctgagtggggagaggttgggcagtgagtgagggacccctaatgcagggactagaagcctcagtttccccattttacccttccacacaatagcctctgtaggttaggctgccccatcccaccctactctgtgtggctgctttctttggtgccctcccctcaccccactgtagctgtgacgtgttgtagtttttagatgtttgtaaaatgtttaaaaaaatgttaaaaggaaaaaagtgaaaataacaaaaaagaaaatcaaaattcaccttcgtcatgctgcgtccagtgccccaaccctgtggtcactctccccattttgtaacactgtaccaggtggtgactgtttaactctttggtgtctgtgctcaaaagactgccttctccagtgcccagtgtatgagtgtgtgccctgtgcccttgtccctcactccccacatgctggacgtagccctcttcctcgcacccctgggagggacccatccatctcccttgctctcctggggaaccctaaacccaactctgttgatgtgaaaaatgcagtgaaaaatattgacgaaaaataaaacggaaacaaatcctcaaaataaaaaaaaaaaa

SEQ ID NO: 302971 - DNA, 2754 bp, Homo sapiens
gtgcggatcattgcatgaatccactcctttttaatagtgattctcaaacttcagtatatgcacacgaaatgctggttttgtgagctagactgaaatttcccacctcatactgggcgagctttttccatgttgcaggaaaacaacaatggataggactttttattattttaaatgtttttctcagaaaaatttcctaagtccacggcatcgctactgcttatagtcagctagcacggacagaaagaatgaataagcagctaagactattaatgggagaacttggacaaagtcacactgttggacagatgatggtcattttctgctctaaagatccctagttcccatggtgatgttatttgatgttttgtgattagcactgtgaataattttgagagcccctcctactaactttcatacatgcagagccctgagccataagccgtaacagcctccctctcccatctgctatgactgcctgcttatcttggcctttgcccacagacctgttcgagtacaagtttgtgaacagccgtctgataaacagtacattcctgcacaacaaggagggctgcccgctagacgtgacagggacgggcgaaggtgcctacatggtatactttgtgagcttcctggggacactggcagtgcttcctgggaatatcgtgtctgccctgctcatggacaagatcggcaggctcagaatgcttgctggctccagcgtgatgtcctgtgtctcctgcttcttcctgtcttttgggaacagtgagtcggccatgatcgctctgctctgcctttttggcggggtcagcattgcatcctggaatgcgctggacgtgttgactgttgaactctacccctcagacaagaggaccacagcttttggcttcctgaatgccctgtgtaagctggcagctgtgctggggatcagcatcttcacatccttcgtgggaatcaccaaggctgcacccatcctctttgcctcagctgcccttgcccttggcagctctctggccctgaagctgcctgagacccgggggcaggtgctgcagtgaaggggtctctagggctttgggattggcaggcacactgtgagaccaacaactccttccttcccctccctgccctgccatcctgacctccagagccctcactccccactccccgtgtttggtgtcttagctgtgtgtgcgtgtgcgtgtgcatgtgtgtaaaccccgtgggcagggactacagggaaggctccttcatcccagttttgagatgaagctgtactccccatttcccactgcccttgactttgcacaagagaaggctgagccccatccttctccccctgttagagaggggcccttgcttccctgttccaggggttccagaataggcttcctgccttccccatcattccctctgcctaggccctggtgaaaccacaggtatgcaattatgctaggggctggggctctggtgtagaccatggaccaaaagaacttcttagagtctgaagagtgggcctcgggtgccctctcacatctcctgttggatgctgggggagaagcaataaacctcagccctctggcctccactttcctctcaatttgggctgcaaatatgaagcctgaattttatgaaattagctttctgattcttatttattaatagattaagttctgaggcagctccgcaggactgtgtgtgaatgtgtatgtatacttacatatgtgtgtgcatgtgccatggggcggggggtatcactatactgtcctcaaatataagccaagggtaatttcagcggatgcacacacaaccctgcctcccacagttcctcccctaatctggtttctgtgttgagcctgggatggaggagccctaggccagcctgggataagagtcccacagtctagggagatctgagggcatccgacaaggcccatctccttccctcctcaagaagcagaggcctcctctggagtgagaggctccacccactacagcacaggcgggaatagcacagctgccctcccatgctccctacctgtcccctcacagggaggggagcaggggagggaaagaaaccaggcatctggtcaaaccagcagatcaaaaagcacaaagagctggggcagaggcaggaagcaggggccctcctggcagctcctctgagtggggagaggttgggcagtgagtgagggacccctaatgcagggactagaagcctcagtttccccattttacccttccacacaatagcctctgtaggttaggctgccccatcccaccctactctgtgtggctgctttctttggtgccctcccctcaccccactgtagctgtgacgtgttgtagtttttagatgtttgtaaaatgtttaaaaaaatgttaaaaggaaaaaagtgaaaataacaaaaaagaaaatcaaaattcaccttcgtcatgctgcgtccagtgccccaaccctgtggtcactctccccattttgtaacactgtaccaggtggtgactgtttaactctttggtgtctgtgctcaaaagactgccttctccagtgcccagtgtatgagtgtgtgccctgtgcccttgtccctcactccccacatgctggacgtagccctcttcctcgcacccctgggagggacccatccatctcccttgctctcctggggaaccctaaacccaactctgttgatgtgaaaaatgcagtgaaaaatattgacgaaaaataaaacggaaacaaatcctcaaaataaaaaaaaaaaa

SEQ ID NO: 302972 - DNA, 4770 bp, Homo sapiens
ggcggaggcggggctggagtggtggaaggggggtggcaggtctgcattgccgcttccctggtgccgggagcagtcgccgctgccgcctccgcccgcggccgggacccccgtcctcgcccgggactccttacccggggaacctagaccaggtctccagaggcttgtggaagagaagcaggcgacccttcctgagttatcctggcttagcctcccaatctggctccccttccccttcccattcccctgctccccctgtcccttccccatccacccaactgaactgggtataggtcaaagctcctctccttccttttccttcctaggcactcattggctaggacctgtttgctcttttttttgtgcccagagatactggaacacgcttcatctaagtaactgtggggaggggtctttttgactctacaagtccttgagcaaaaagctgaaaaagaagcaggaggtggagaagacccagtgaagtgccccaagccccatcatggaagagggcttccgagaccgggcagctttcatccgtggggccaaagacattgctaaggaagtcaaaaagcatgcggccaagaaggtggtgaagggcctggacagagtccaggacgaatattcccgaagatcgtactcccgctttgaggaggaggatgatgatgatgacttccctgctcccagtgatggttattaccgaggagaagggacccaggatgaggaggaaggtggtgcatccagtgatgctactgagggccatgacgaggatgatgagatctatgaaggggaatatcagggcattccccgggcagagtctgggggcaaaggcgagcggatggcagatggggcgcccctggctggagtaagggggggcttgagtgatggggagggtccccctgggggccggggggaggcacaacgacggaaagaacgagaagaactggcccaacagtatgaagccatcctacgggagtgtggccacggccgcttccagtggacactgtattttgtgcttggtctggcgctgatggctgacggtgtggaggtctttgtggtgggcttcgtgctgcccagcgctgagaaagacatgtgcctgtccgactccaacaaaggcatgctaggcctcatcgtctacctgggcatgatggtgggagccttcctctggggaggtctggctgaccggctgggtcggaggcagtgtctgctcatctcgctctcagtcaacagcgtcttcgccttcttctcatcttttgtccagggttacggcactttcctcttctgccgcctactttctggggttgggattggagggtccatccccattgtcttctcctatttctccgagtttctggcccaggagaaacgaggggagcatttgagctggctctgcatgttttggatgattggtggcgtgtacgcagctgctatggcctgggccatcatcccccactatgggtggagttttcagatgggttctgcctaccagttccatagctggagggtcttcgtcctcgtctgcgcctttccttctgtgtttgccattggggctctgaccacgcagcctgagagcccccgtttcttcctagagaatggaaagcatgatgaggcctggatggtgctgaagcaggtccatgataccaacatgcgagccaaaggacatcctgagcgagtgttctcagtaacccacattaagacgattcatcaggaggatgaattgattgagatccagtcggacacagggacctggtaccagcgctggggggtccgggccttgagcctaggggggcaggtttgggggaattttctctcctgttttggtcccgaatatcggcgcatcactctgatgatgatgggtgtgtggttcaccatgtcattcagctactatggcctgaccgtctggtttcctgacatgatccgccatctccaggcagtggactacgcatcccgcaccaaagtgttccccggggagcgcgtagagcatgtaacttttaacttcacgttggagaatcagatccaccgaggcgggcagtacttcaatgacaagttcattgggctgcggctcaagtcagtgtcctttgaggattccctgtttgaagagtgttattttgaggatgtcacatccagcaacacgtttttccgcaactgcacattcatcaacactgtgttctataacactgacctgttcgagtacaagtttgtgaacagccgtctgataaacagtacattcctgcacaacaaggagggctgcccgctagacgtgacagggacgggcgaaggtgcctacatggtatactttgtgagcttcctggggacactggcagtgcttcctgggaatatcgtgtctgccctgctcatggacaagatcggcaggctcagaatgcttgctggctccagcgtgatgtcctgtgtctcctgcttcttcctgtcttttgggaacagtgagtcggccatgatcgctctgctctgcctttttggcggggtcagcattgcatcctggaatgcgctggacgtgttgactgttgaactctacccctcagacaagaggaccacagcttttggcttcctgaatgccctgtgtaagctggcagctgtgctggggatcagcatcttcacatccttcgtgggaatcaccaaggctgcacccatcctctttgcctcagctgcccttgcccttggcagctctctggccctgaagctgcctgagacccgggggcaggtgctgcagtgaaggggtctctagggctttgggattggcaggcacactgtgagaccaacaactccttccttcccctccctgccctgccatcctgacctccagagccctcactccccactccccgtgtttggtgtcttagctgtgtgtgcgtgtgcgtgtgcatgtgtgtaaaccccgtgggcagggactacagggaaggctccttcatcccagttttgagatgaagctgtactccccatttcccactgcccttgactttgcacaagagaaggctgagccccatccttctccccctgttagagaggggcccttgcttccctgttccaggggttccagaataggcttcctgccttccccatcattccctctgcctaggccctggtgaaaccacaggtatgcaattatgctaggggctggggctctggtgtagaccatggaccaaaagaacttcttagagtctgaagagtgggcctcgggtgccctctcacatctcctgttggatgctgggggagaagcaataaacctcagccctctggcctccactttcctctcaatttgggctgcaaatatgaagcctgaattttatgaaattagctttctgattcttatttattaatagattaagttctgaggcagctccgcaggactgtgtgtgaatgtgtatgtatacttacatatgtgtgtgcatgtgccatggggcggggggtatcactatactgtcctcaaatataagccaagggtaatttcagcggatgcacacacaaccctgcctcccacagttcctcccctaatctggtttctgtgttgagcctgggatggaggagccctaggccagcctgggataagagtcccacagtctagggagatctgagggcatccgacaaggcccatctccttccctcctcaagaagcagaggcctcctctggagtgagaggctccacccactacagcacaggcgggaatagcacagctgccctcccatgctccctacctgtcccctcacagggaggggagcaggggagggaaagaaaccaggcatctggtcaaaccagcagatcaaaaagcacaaagagctggggcagaggcaggaagcaggggccctcctggcagctcctctgagtggggagaggttgggcagtgagtgagggacccctaatgcagggactagaagcctcagtttccccattttacccttccacacaatagcctctgtaggttaggctgccccatcccaccctactctgtgtggctgctttctttggtgccctcccctcacccccttgactttgcacaagagaaggctgagccccatccttctccccctgttagagaggggcccttgcttccctgttccaggggttccagaataggcttcctgccttccccatcattccctctgcctaggccctggtgaaaccacaggtatgcaattatgctaggggctggggctctggtgtagaccatggaccaaaagaacttcttagagtctgaagagtgggcctcgggtgccctctcacatctcctgttggatgctgggggagaagcaataaacctcagccctctggcctccactttcctctcaatttgggctgcaaatatgaagcctgaattttatgaaatccactgtagctgtgacgtgttgtagtttttagatgtttgtaaaatgtttaaaaaaatgttaaaaggaaaaaagtgaaaataacaaaaaagaaaatcaaaattcaccttcgtcatgctgcgtccagtgccccaaccctgtggtcactctccccattttgtaacactgtaccaggtggtgactgtttaactctttggtgtctgtgctcaaaagactgccttctccagtgcccagtgtatgagtgtgtgccctgtgcccttgtccctcactccccacatgctggacgtagccctcttcctcgcacccctgggagggacccatccatctcccttgctctcctggggaaccctaaacccaactctgttgatgtgaaaaatgcagtgaaaaatattgacgaaaaataaaacggaaacaaatcctcaaaataaaaaaaaaaaa

SEQ ID NO: 302973 - DNA, 4146 bp, Homo sapiens
  misc_feature (4039)..(4039): n is a, c, g, or t
  misc_feature (4070)..(4070): n is a, c, g, or t
  misc_feature (4091)..(4091): n is a, c, g, or t
ggcggaggcggggctggagtggtggaaggggggtggcaggtctgcattgccgcttccctggtgccgggagcagtcgccgctgccgcctccgcccgcggccgggacccccgtcctcgcccgggactccttacccggggaacctagaccaggtctccagaggcttgtggaagagaagcaggcgacccttcctgagttatcctggcttagcctcccaatctggctccccttccccttcccattcccctgctccccctgtcccttccccatccacccaactgaactgggtataggtcaaagctcctctccttccttttccttcctaggcactcattggctaggacctgtttgctcttttttttgtgcccagagatactggaacacgcttcatctaagtaactgtggggaggggtctttttgactctacaagtccttgagcaaaaagctgaaaaagaagcaggaggtggagaagacccagtgaagtgccccaagccccatcatggaagagggcttccgagaccgggcagctttcatccgtggggccaaagacattgctaaggaagtcaaaaagcatgcggccaagaaggtggtgaagggcctggacagagtccaggacgaatattcccgaagatcgtactcccgctttgaggaggaggatgatgatgatgacttccctgctcccagtgatggttattaccgaggagaagggacccaggatgaggaggaaggtggtgcatccagtgatgctactgagggccatgacgaggatgatgagatctatgaaggggaatatcagggcattccccgggcagagtctgggggcaaaggcgagcggatggcagatggggcgcccctggctggagtaagggggggcttgagtgatggggagggtccccctgggggccggggggaggcacaacgacggaaagaacgagaagaactggcccaacagtatgaagccatcctacgggagtgtggccacggccgcttccagtggacactgtattttgtgcttggtctggcgctgatggctgacggtgtggaggtctttgtggtgggcttcgtgctgcccagcgctgagaaagacatgtgcctgtccgactccaacaaaggcatgctaggcctcatcgtctacctgggcatgatggtgggagccttcctctggggaggtctggctgaccggctgggtcggaggcagtgtctgctcatctcgctctcagtcaacagcgtcttcgccttcttctcatcttttgtccagggttacggcactttcctcttctgccgcctactttctggggttgggattggagggtccatccccattgtcttctcctatttctccgagtttctggcccaggagaaacgaggggagcatttgagctggctctgcatgttttggatgattggtggcgtgtacgcagctgctatggcctgggccatcatcccccactatgggtggagttttcagatgggttctgcctaccagttccatagctggagggtcttcgtcctcgtctgcgcctttccttctgtgtttgccattggggctctgaccacgcagcctgagagcccccgtttcttcctagagaatggaaagcatgatgaggcctggatggtgctgaagcaggtccatgataccaacatgcgagccaaaggacatcctgagcgagtgttctcagtaacccacattaagacgattcatcaggaggatgaattgattgagatccagtcggacacagggacctggtaccagcgctggggggtccgggccttgagcctaggggggcaggtttgggggaattttctctcctgttttggtcccgaatatcggcgcatcactctgatgatgatgggtgtgtggttcaccatgtcattcagctactatggcctgaccgtctggtttcctgacatgatccgccatctccaggcagtggactacgcatcccgcaccaaagtgttccccggggagcgcgtagagcatgtaacttttaacttcacgttggagaatcagatccaccgaggcgggcagtacttcaatgacaagttcattgggctgcggctcaagtcagtgtcctttgaggattccctgtttgaagagtgttattttgaggatgtcacatccagcaacacgtttttccgcaactgcacattcatcaacactgtgttctataacactgacctgttcgagtacaagtttgtgaacagccgtctgataaacagtacattcctgcacaacaaggagggctgcccgctagacgtgacagggacgggcgaaggtgcctacatggtatactttgtgagcttcctggggacactggcagtgcttcctgggaatatcgtgtctgccctgctcatggacaagatcggcaggctcagaatgcttgctggctccagcgtgatgtcctgtgtctcctgcttcttcctgtcttttgggaacagtgagtcggccatgatcgctctgctctgcctttttggcggggtcagcattgcatcctggaatgcgctggacgtgttgactgttgaactctacccctcagacaagaggaccacagcttttggcttcctgaatgccctgtgtaagctggcagctgtgctggggatcagcatcttcacatccttcgtgggaatcaccaaggctgcacccatcctctttgcctcagctgcccttgcccttggcagctctctggccctgaagctgcctgagacccgggggcaggtgctgcagtgaaggggtctctagggctttgggattggcaggcacactgtgagaccaacaactccttccttcccctccctgccctgccatcctgacctccagagccctcactccccactccccgtgtttggtgtcttagctgtgtgtgcgtgtgcgtgtgcatgtgtgtaaaccccgtgggcagggactacagggaaggctccttcatcccagttttgagatgaagctgtactccccatttcccactgcccttgactttgcacaagagaaggctgagccccatccttctccccctgttagagaggggcccttgcttccctgttccaggggttccagaataggcttcctgccttccccatcattccctctgcctaggccctggtgaaaccacaggtatgcaattatgctaggggctggggctctggtgtagaccatggaccaaaagaacttcttagagtctgaagagtgggcctcgggtgccctctcacatctcctgttggatgctgggggagaagcaataaacctcagccctctggcctccactttcctctcaatttgggctgcaaatatgaagcctgaattttatgaaattagctttctgattcttatttattaatagattaagttctgaggcagctccgcaggactgtgtgtgaatgtgtatgtatacttacatatgtgtgtgcatgtgccatggggcggggggtatcactatactgtcctcaaatataagccaagggtaatttcagcggatgcacacacaaccctgcctcccacagttcctcccctaatctggtttctgtgttgagcctgggatggaggagccctaggccagcctgggataagagtcccacagtctagggagatctgagggcatccgacaaggcccatctccttccctcctcaagaagcagaggcctcctctggagtgagaggctccacccactacagcacaggcgggaatagcacagctgccctcccatgctccctacctgtcccctcacagggaggggagcaggggagggaaagaaaccaggcatctggtcaaaccagcagatcaaaaagcacaaagagctggggcagaggcaggaagcaggggccctcctggcagctcctctgagtggggagaggttgggcagtgagtgagggacccctaatgcagggactagaagcctcagtttccccattttacccttccacacaatagcctctgtaggttaggctgccccatcccaccctactctgtgtggctgctttctttggtgccctcccctcaccccactgtagctgtgacgtgttgtagttctagctatatatccaaaaganttgaaagcaggtattcagaaatttgtacatncatgttcatagcaacattatncaaaatagcttaaaggttatttgaggaaacaacccaaaatgtcccatcaaatagg

SEQ ID NO: 302974 - DNA, 4634 bp, Homo sapiens
ggcggaggcggggctggagtggtggaaggggggtggcaggtctgcattgccgcttccctggtgccgggagcagtcgccgctgccgcctccgcccgcggccgggacccccgtcctcgcccgggactccttacccggggaacctagaccaggtctccagaggcttgtggaagagaagcaggcgacccttcctgagttatcctggcttagcctcccaatctggctccccttccccttcccattcccctgctccccctgtcccttccccatccacccaactgaactgggtataggtcaaagctcctctccttccttttccttcctaggcactcattggctaggacctgtttgctcttttttttgtgcccagagatactggaacacgcttcatctaagtaactgtggggaggggtctttttgactctacaagtccttgagcaaaaagctgaaaaagaagcaggaggtggagaagacccagtgaagtgccccaagccccatcatggaagagggcttccgagaccgggcagctttcatccgtggggccaaagacattgctaaggaagtcaaaaagcatgcggccaagaaggtggtgaagggcctggacagagtccaggacgaatattcccgaagatcgtactcccgctttgaggaggaggatgatgatgatgacttccctgctcccagtgatggttattaccgaggagaagggacccaggatgaggaggaaggtggtgcatccagtgatgctactgagggccatgacgaggatgatgagatctatgaaggggaatatcagggcattccccgggcagagtctgggggcaaaggcgagcggatggcagatggggcgcccctggctggagtaagggggggcttgagtgatggggagggtccccctgggggccggggggaggcacaacgacggaaagaacgagaagaactggcccaacagtatgaagccatcctacgggagtgtggccacggccgcttccagtggacactgtattttgtgcttggtctggcgctgatggctgacggtgtggaggtctttgtggtgggcttcgtgctgcccagcgctgagaaagacatgtgcctgtccgactccaacaaaggcatgctaggcctcatcgtctacctgggcatgatggtgggagccttcctctggggaggtctggctgaccggctgggtcggaggcagtgtctgctcatctcgctctcagtcaacagcgtcttcgccttcttctcatcttttgtccagggttacggcactttcctcttctgccgcctactttctggggttgggattggagggtccatccccattgtcttctcctatttctccgagtttctggcccaggagaaacgaggggagcatttgagctggctctgcatgttttggatgattggtggcgtgtacgcagctgctatggcctgggccatcatcccccactatgggtggagttttcagatgggttctgcctaccagttccatagctggagggtcttcgtcctcgtctgcgcctttccttctgtgtttgccattggggctctgaccacgcagcctgagagcccccgtttcttcctagagaatggaaagcatgatgaggcctggatggtgctgaagcaggtccatgataccaacatgcgagccaaaggacatcctgagcgagtgttctcagtaacccacattaagacgattcatcaggaggatgaattgattgagatccagtcggacacagggacctggtaccagcgctggggggtccgggccttgagcctaggggggcaggtttgggggaattttctctcctgttttggtcccgaatatcggcgcatcactctgatgatgatgggtgtgtggttcaccatgtcattcagctactatggcctgaccgtctggtttcctgacatgatccgccatctccaggcagtggactacgcatcccgcaccaaagtgttccccggggagcgcgtagagcatgtaacttttaacttcacgttggagaatcagatccaccgaggcgggcagtacttcaatgacaagttcattgggctgcggctcaagtcagtgtcctttgaggattccctgtttgaagagtgttattttgaggatgtcacatccagcaacacgtttttccgcaactgcacattcatcaacactgtgttctataacactgacctgttcgagtacaagtttgtgaacagccgtctgataaacagtacattcctgcacaacaaggagggctgcccgctagacgtgacagggacgggcgaaggtgcctacatggtatactttgtgagcttcctggggacactggcagtgcttcctgggaatatcgtgtctgccctgctcatggacaagatcggcaggctcagaatgcttgctggctccagcgtgatgtcctgtgtctcctgcttcttcctgtcttttgggaacagtgagtcggccatgatcgctctgctctgcctttttggcggggtcagcattgcatcctggaatgcgctggacgtgttgactgttgaactctacccctcagacaagaggaccacagcttttggcttcctgaatgccctgtgtaagctggcagctgtgctggggatcagcatcttcacatccttcgtgggaatcaccaaggctgcacccatcctctttgcctcagctgcccttgcccttggcagctctctggccctgaagctgcctgagacccgggggcaggtgctgcagtgaaggggtctctagggctttgggattggcaggcacactgtgagaccaacaactccttccttcccctccctgccctgccatcctgacctccagagccctcactccccactccccgtgtttggtgtcttagctgtgtgtgcgtgtgcgtgtgcatgtgtgtaaaccccgtgggcagggactacagggaaggctccttcatcccagttttgagatgaagctgtactccccatttcccactgcccttgactttgcacaagagaaggctgagccccatccttctccccctgttagagaggggcccttgcttccctgttccaggggttccagaataggcttcctgccttccccatcattccctctgcctaggccctggtgaaaccacaggtatgcaattatgctaggggctggggctctggtgtagaccatggaccaaaagaacttcttagagtctgaagagtgggcctcgggtgccctctcacatctcctgttggatgctgggggagaagcaataaacctcagccctctggcctccactttcctctcaatttgggctgcaaatatgaagcctgaattttatgaaattagctttctgattcttatttattaatagattaagttctgaggcagctccgcaggactgtgtgtgaatgtgtatgtatacttacatatgtgtgtgcatgtgccatggggcggggggtatcactatactgtcctcaaatataagccaagggtaatttcagcggatgcacacacaaccctgcctcccacagttcctcctctggagtgagaggctccacccactacagcacaggcgggaatagcacagctgccctcccatgctccctacctgtcccctcacagggaggggagcaggggagggaaagaaaccaggcatctggtcaaaccagcagatcaaaaagcacaaagagctggggcagaggcaggaagcaggggccctcctggcagctcctctgagtggggagaggttgggcagtgagtgagggacccctaatgcagggactagaagcctcagtttccccattttacccttccacacaatagcctctgtaggttaggctgccccatcccaccctactctgtgtggctgctttctttggtgccctcccctcacccccttgactttgcacaagagaaggctgagccccatccttctccccctgttagagaggggcccttgcttccctgttccaggggttccagaataggcttcctgccttccccatcattccctctgcctaggccctggtgaaaccacaggtatgcaattatgctaggggctggggctctggtgtagaccatggaccaaaagaacttcttagagtctgaagagtgggcctcgggtgccctctcacatctcctgttggatgctgggggagaagcaataaacctcagccctctggcctccactttcctctcaatttgggctgcaaatatgaagcctgaattttatgaaatccactgtagctgtgacgtgttgtagtttttagatgtttgtaaaatgtttaaaaaaatgttaaaaggaaaaaagtgaaaataacaaaaaagaaaatcaaaattcaccttcgtcatgctgcgtccagtgccccaaccctgtggtcactctccccattttgtaacactgtaccaggtggtgactgtttaactctttggtgtctgtgctcaaaagactgccttctccagtgcccagtgtatgagtgtgtgccctgtgcccttgtccctcactccccacatgctggacgtagccctcttcctcgcacccctgggagggacccatccatctcccttgctctcctggggaaccctaaacccaactctgttgatgtgaaaaatgcagtgaaaaatattgacgaaaaataaaacggaaacaaatcctcaaaataaaaaaaaaaaa

SEQ ID NO: 302975 - DNA, 3255 bp, Homo sapiens
ggcggaggcggggctggagtggtggaaggggggtggcaggtctgcattgccgcttccctggtgccgggagcagtcgccgctgccgcctccgcccgcggccgggacccccgtcctcgcccgggactccttacccggggaacctagaccaggtctccagaggcttgtggaagagaagcaggcgacccttcctgagttatcctggcttagcctcccaatctggctccccttccccttcccattcccctgctccccctgtcccttccccatccacccaactgaactgggtataggtcaaagctcctctccttccttttccttcctaggcactcattggctaggacctgtttgctcttttttttgtgcccagagatactggaacacgcttcatctaagtaactgtggggaggggtctttttgactctacaagtccttgagcaaaaagctgaaaaagaagcaggaggtggagaagacccagtgaagtgccccaagccccatcatggaagagggcttccgagaccgggcagctttcatccgtggggccaaagacattgctaaggaagtcaaaaagcatgcggccaagaaggtggtgaagggcctggacagagtccaggacgaatattcccgaagatcgtactcccgctttgaggaggaggatgatgatgatgacttccctgctcccagtgatggttattaccgaggagaagggacccaggatgaggaggaaggtggtgcatccagtgatgctactgagggccatgacgaggatgatgagatctatgaaggggaatatcagggcattccccgggcagagtctgggggcaaaggcgagcggatggcagatggggcgcccctggctggagtaagggggggcttgagtgatggggagggtccccctgggggccggggggaggcacaacgacggaaagaacgagaagaactggcccaacagtatgaagccatcctacgggagtgtggccacggccgcttccagtggacactgtattttgtgcttggtctggcgctgatggctgacggtgtggaggtctttgtggtgggcttcgtgctgcccagcgctgagaaagacatgtgcctgtccgactccaacaaaggcatgctaggcctcatcgtctacctgggcatgatggtgggagccttcctctggggaggtctggctgaccggctgggtcggaggcagtgtctgctcatctcgctctcagtcaacagcgtcttcgccttcttctcatcttttgtccagggttacggcactttcctcttctgccgcctactttctggggttgggattggagggtccatccccattgtcttctcctatttctccgagtttctggcccaggagaaacgaggggagcatttgagctggctctgcatgttttggatgattggtggcgtgtacgcagctgctatggcctgggccatcatcccccactatgggtggagttttcagatgggttctgcctaccagttccatagctggagggtcttcgtcctcgtctgcgcctttccttctgtgtttgccattggggctctgaccacgcagcctgagagcccccgtttcttcctagagaatggaaagcatgatgaggcctggatggtgctgaagcaggtccatgataccaacatgcgagccaaaggacatcctgagcgagtgttctcagtaacccacattaagacgattcatcaggaggatgaattgattgagatccagtcggacacagggacctggtaccagcgctggggggtccgggccttgagcctaggggggcaggtttgggggaattttctctcctgttttggtcccgaatatcggcgcatcactctgatgatgatgggtgtgtggttcaccatgtcattcagctactatggcctgaccgtctggtttcctgacatgatccgccatctccaggcagtggactacgcatcccgcaccaaagtgttccccggggagcgcgtagagcatgtaacttttaacttcacgttggagaatcagatccaccgaggcgggcagtacttcaatgacaagttcattgggctgcggctcaagtcagtgtcctttgaggattccctgtttgaagagtgttattttgaggatgtcacatccagcaacacgtttttccgcaactgcacattcatcaacactgtgttctataacactgacctgttcgagtacaagtttgtgaacagccgtctgataaacagtacattcctgcacaacaaggagggctgcccgctagacgtgacagggacgggcgaaggtgcctacatggtatactttgtgagcttcctggggacactggcagtgcttcctgggaatatcgtgtctgccctgctcatggacaagatcggcaggctcagaatgcttgctggctccagcgtgatgtcctgtgtctcctgcttcttcctgtcttttgggaacagtgagtcggccatgatcgctctgctctgcctttttggcggggtcagcattgcatcctggaatgcgctggacgtgttgactgttgaactctacccctcagacaagaggaccacagcttttggcttcctgaatgccctgtgtaagctggcagctgtgctggggatcagcatcttcacatccttcgtgggaatcaccaaggctgcacccatcctctttgcctcagctgcccttgcccttggcagctctctggccctgaagctgcctgagacccgggggcaggtgctgcagtgaaggggtctctagggctttgggattggcaggcacactgtgagaccaacaactccttccttcccctccctgccctgccatcctgacctccagagccccactgtagctgtgacgtgttgtagtttttagatgtttgtaaaatgtttaaaaaaatgttaaaaggaaaaaagtgaaaataacaaaaaagaaaatcaaaattcaccttcgtcatgctgcgtccagtgccccaaccctgtggtcactctccccattttgtaacactgtaccaggtggtgactgtttaactctttggtgtctgtgctcaaaagactgccttctccagtgcccagtgtatgagtgtgtgccctgtgcccttgtccctcactccccacatgctggacgtagccctcttcctcgcacccctgggagggacccatccatctcccttgctctcctggggaaccctaaacccaactctgttgatgtgaaaaatgcagtgaaaaatattgacgaaaaataaaacggaaacaaatcctcaaaataaaaaaaaaaaa

SEQ ID NO: 302976 - DNA, 2419 bp, Homo sapiens
ggcggaggcggggctggagtggtggaaggggggtggcaggtctgcattgccgcttccctggtgccgggagcagtcgccgctgccgcctccgcccgcggccgggacccccgtcctcgcccgggactccttacccggggaacctagaccaggtctccagaggcttgtggaagagaagcaggcgacccttcctgagttatcctggcttagcctcccaatctggctccccttccccttcccattcccctgctccccctgtcccttccccatccacccaactgaactgggtataggtcaaagctcctctccttccttttccttcctaggcactcattggctaggacctgtttgctcttttttttgtgcccagagatactggaacacgcttcatctaagtaactgtggggaggggtctttttgactctacaagtccttgagcaaaaagctgaaaaagaagcaggaggtggagaagacccagtgaagtgccccaagccccatcatggaagagggcttccgagaccgggcagctttcatccgtggggccaaagacattgctaaggaagtcaaaaagcatgcggccaagaaggtggtgaagggcctggacagagtccaggacgaatattcccgaagatcgtactcccgctttgaggaggaggatgatgatgatgacttccctgctcccagtgatggttattaccgaggagaagggacccaggatgaggaggaaggtggtgcatccagtgatgctactgagggccatgacgaggatgatgagatctatgaaggggaatatcagggcattccccgggcagagtctgggggcaaaggcgagcggatggcagatggggcgcccctggctggagtaagggggggcttgagtgatggggagggtccccctgggggccggggggaggcacaacgacggaaagaacgagaagaactggcccaacagtatgaagccatcctacgggagtgtggccacggccgcttccagtggacactgtattttgtgcttggtctggcgctgatggctgacggtgtggaggtctttgtggtgggcttcgtgctgcccagcgctgagaaagacatgtgcctgtccgactccaacaaaggcatgctaggcctcatcgtctacctgggcatgatggtgggagccttcctctggggaggtctggctgaccggctgggtcggaggcagtgtctgctcatctcgctctcagtcaacagcgtcttcgccttcttctcatcttttgtccagggttacggcactttcctcttctgccgcctactttctggggttgggattggagggtccatccccattgtcttctcctatttctccgagtttctggcccaggagaaacgaggggagcatttgagctggctctgcatgttttggatgattggtggcgtgtacgcagctgctatggcctgggccatcatcccccactatgggtggagttttcagatgggttctgcctaccagttccatagctggagggtcttcgtcctcgtctgcgcctttccttctgtgtttgccattggggctctgaccacgcagcctgagagcccccgtttcttcctagagaatggaaagcatgatgaggcctggatggtgctgaagcaggtccatgataccaacatgcgagccaaaggacatcctgagcgagtgttctcagtaacccacattaagacgattcatcaggaggatgaattgattgagatccagtcggacacagggacctggtaccagcgctggggggtccgggccttgagcctaggggggcaggtttgggggaattttctctcctgttttggtcccgaatatcggcgcatcactctgatgatgatgggtgtgtggttcaccatgtcattcagctactatggcctgaccgtctggtttcctgacatgatccgccatctccaggcagtggactacgcatcccgcaccaaagtgttccccggggagcgcgtagagcatgtaacttttaacttcacgttggagaatcagatccaccgaggcgggcagtacttcaatgacaagttcattgggctgcggctcaagtcagtgtcctttgaggattccctgtttgaagagtgttattttgaggatgtcacatccagcaacacgtttttccgcaactgcacattcatcaacactgtgttctataacactgacctgttcgagtacaagtttgtgaacagccgtctgataaacagtacattcctgcacaacaaggagggctgcccgctagacgtgacagggacgggcgaaggtgcctacatggtatactttgtgagcttcctggggacactggcagtgcttcctgggaatatcgtgtctgccctgctcatggacaagatcggcaggctcagaatgcttggtaagggggagaggctgagtcagatctgatagtagggg

SEQ ID NO: 302977 - DNA, 1951 bp, Homo sapiens
ggcggaggcggggctggagtggtggaaggggggtggcaggtctgcattgccgcttccctggtgccgggagcagtcgccgctgccgcctccgcccgcggccgggacccccgtcctcgcccgggactccttacccggggaacctagaccaggtctccagaggcttgtggaagagaagcaggcgacccttcctgagttatcctggcttagcctcccaatctggctccccttccccttcccattcccctgctccccctgtcccttccccatccacccaactgaactgggtataggtcaaagctcctctccttccttttccttcctaggcactcattggctaggacctgtttgctcttttttttgtgcccagagatactggaacacgcttcatctaagtaactgtggggaggggtctttttgactctacaagtccttgagcaaaaagctgaaaaagaagcaggaggtggagaagacccagtgaagtgccccaagccccatcatggaagagggcttccgagaccgggcagctttcatccgtggggccaaagacattgctaaggaagtcaaaaagcatgcggccaagaaggtggtgaagggcctggacagagtccaggacgaatattcccgaagatcgtactcccgctttgaggaggaggatgatgatgatgacttccctgctcccagtgatggttattaccgaggagaagggacccaggatgaggaggaaggtggtgcatccagtgatgctactgagggccatgacgaggatgatgagatctatgaaggggaatatcagggcattccccgggcagagtctgggggcaaaggcgagcggatggcagatggggcgcccctggctggagtaagggggggcttgagtgatggggagggtccccctgggggccggggggaggcacaacgacggaaagaacgagaagaactggcccaacagtatgaagccatcctacgggagtgtggccacggccgcttccagtggacactgtattttgtgcttggtctggcgctgatggctgacggtgtggaggtctttgtggtgggcttcgtgctgcccagcgctgagaaagacatgtgcctgtccgactccaacaaaggcatgctaggcctcatcgtctacctgggcatgatggtgggagccttcctctggggaggtctggctgaccggctgggtcggaggcagtgtctgctcatctcgctctcagtcaacagcgtcttcgccttcttctcatcttttgtccagggttacggcactttcctcttctgccgcctactttctggggttgggattggagggtccatccccattgtcttctcctatttctccgagtttctggcccaggagaaacgaggggagcatttgagctggctctgcatgttttggatgattggtggcgtgtacgcagctgctatggcctgggccatcatcccccactatgggtggagttttcagatgggttctgcctaccagttccatagctggagggtcttcgtcctcgtctgcgcctttccttctgtgtttgccattggggctctgaccacgcagcctgagagcccccgtttcttcctagagaatggaaagcatgatgaggcctggatggtgctgaagcaggtccatgataccaacatgcgagccaaaggacatcctgagcgagtgttctcagtaacccacattaagacgattcatcaggaggatgaattgattgagatccagtcggacacagggacctggtaccagcgctggggggtccgggccttgagcctaggggggcaggtttgggggaattttctctcctgttttggtcccgaatatcggcgcatcactctgatgatgatgggtgtgtggttcaccatgtcattcagctactatggcctgaccgtctggtttcctgacacaagcgttctatcagtaaccactgtagttaaacatcgcccagca

SEQ ID NO: 302978 - DNA, 1367 bp, Homo sapiens
aggatcgaggccgggttgaatcggccgaggatgaaattagctttctgattcttatttattaatagattaagttctgaggcagctccgcaggactgtgtgtgaatgtgtatgtatacttacatatgtgtgtgcatgtgccatggggcggggggtatcactatactgtcctcaaatataagccaagggtaatttcagcggatgcacacacaaccctgcctcccacagttcctcctctggagtgagaggctccacccactacagcacaggcgggaatagcacagctgccctcccatgctccctacctgtcccctcacagggaggggagcaggggagggaaagaaaccaggcatctggtcaaaccagcagatcaaaaagcacaaagagctggggcagaggcaggaagcaggggccctcctggcagctcctctgagtggggagaggttgggcagtgagtgagggacccctaatgcagggactagaagcctcagtttccccattttacccttccacacaatagcctctgtaggttaggctgccccatcccaccctactctgtgtggctgctttctttggtgccctcccctcacccccttgactttgcacaagagaaggctgagccccatccttctccccctgttagagaggggcccttgcttccctgttccaggggttccagaataggcttcctgccttccccatcattccctctgcctaggccctggtgaaaccacaggtatgcaattatgctaggggctggggctctggtgtagaccatggaccaaaagaacttcttagagtctgaagagtgggcctcgggtgccctctcacatctcctgttggatgctgggggagaagcaataaacctcagccctctggcctccactttcctctcaatttgggctgcaaatatgaagcctgaattttatgaaatccactgtagctgtgacgtgttgtagtttttagatgtttgtaaaatgtttaaaaaaatgttaaaaggaaaaaagtgaaaataacaaaaaagaaaatcaaaattcaccttcgtcatgctgcgtccagtgccccaaccctgtggtcactctccccattttgtaacactgtaccaggtggtgactgtttaactctttggtgtctgtgctcaaaagactgccttctccagtgcccagtgtatgagtgtgtgccctgtgcccttgtccctcactccccacatgctggacgtagccctcttcctcgcacccctgggagggacccatccatctcccttgctctcctggggaaccctaaacccaactctgttgatgtgaaaaatgcagtgaaaaatattgacgaaaaataaaacggaaacaaatcctcaaaataaaaaaaaaaaa

SEQ ID NO: 302979 - DNA, 648 bp, Homo sapiens
gcggccgccgagggagacggtgcgcctggagctggtgcttaaggaccccaccgacgagagctgcgtggagttcagttacccggagctgctgctgtgcggagaacaacggaagaagctcattcacacagaagacccatttaatgatgaacatcaggagaggcaagaggtggaaatgttggctaagaagtttgaaatgaaatatggtgggaaaccccgtaaacaccggaaggatcggctacaagatttaattgatataggctttggctatgatgagacagatccatttattgataactcagaggcttatgatgaattagttcccgcttctctaacaacaaaatatggaggcttttatatcaacactggcactctacagtttcgccaagcttcagatactgaagaagatgatattacagacaaccaaaagcacaagccacccaaggtccccaaaataaaagaagatgatattgagatgaagaagcggaagcggaaagaggaaggggaaaaggagaagaagccaaggaaaaaagttcccaaacaactgggagttgtggctctaaattcacacaagtctgaaaataataaataaaaccttttgccgaattcttggccctgaagggccaaattgcctaatagtgagtcgtatta

SEQ ID NO: 302980 - DNA, 630 bp, Homo sapiens
attccatcagaaattcttctaggtgtttttactcaaaggaaatctattttttattcacattaggctttggtaagtactatatgcatcatgaagagattataacttaatttgcagtttgatactttttatgacctgtgatgattattgaatctaaaaatagtactaatttattattcacattactttttaaaaaatactgtttttgccttcaccaaatcatcagttaagtgaccttttaaaaaaatcgtttatttcaacagttgtactatcaattccgtattactttacttattcactacatgtttggctttttaacttcctcttagagattaccaactctactgattttttgttgttgttgactatatctatggttatttttttcccccaaaatatactgcctccagccacacatttcaggctgccaaactttttgatgaagaaggaaggaaaaaattctttacacaggatatgaataatattcttctggagtaagtaattttctttaaaaaaaaaaaccttaagaatgatacattaaaaaatgtaataggcctttgagatactgagtggttggcaagtcttgggcatgagttcttccccttaagccttacagcatgtatgattcacatt

SEQ ID NO: 302981 - DNA, 2057 bp, Homo sapiens
gcggccgccgagggagacggtgcgcctggagctggtgcttaaggaccccaccgacgagagctgcgtggagttcagttacccggagctgctgctgtgcggagaacaacggaagaagctcattcacacagaagacccatttaatgatgaacatcaggagaggcaagaggtggaaatgttggctaagaagtttgaaatgaaatatggtgggaaaccccgtaaacaccggaaggatcggctacaagatttaattgatataggctttggctatgatgagacagatccatttattgataactcagaggcttatgatgaattagttcccgcttctctaacaacaaaatatggaggcttttatatcaacactggcactctacagtttcgccaagcttcagatactgaagaagatgatattacagacaaccaaaagcacaagccacccaaggtccccaaaataaaagaagatgatattgagatgaagaagcggaagcggaaagaggaaggggaaaaggagaagaagccaaggaaaaaagttcccaaacaactgggagttgtggctctaaattcacacaagtctgaaaaaaagaagaaacgttataaagattctctttctctagctgccatgattagaaaattccagaaagagaaggatgcattaaagaaggagtctaaccccaaagtcccagtgaccttgtcaaccccttctctgaataaacccccatgtgctgctgcagcactggggaatgacgtcccggacttaaatctgagcagcggtgatccagaccttcccatttttgttagcacaaatgaacatgagctgtttcaggaagctgaaaatgccctagagatgctagatgattttgacttcgacagattactggatgctgcttctgatggtagccccctatctgagtcggggggtgaaaatggaaccaccacccagccaacctacacttctcaggttatgcccaaagtggtacctacactcccagagggtctacctgtacttcttgaaaaacgtatcgaagaccttcgtgtagctgccaaactttttgatgaagaaggaaggaaaaaattctttacacaggatatgaataatattcttctggacattgagttacagctacaagaactaggccctgtcattcgcagtggtgtctactcccaccttgaagcttttgtgccatgcaataaagaaacactagtaaaacgtctgaagaagttacatctcaatgtccaggatgatcgtttaagagaacctctgcaaaaactgaaactggctgttagcaatgtcatgcctgaacagctatttaaataccaggaggactgccaggctcgtagtcaagctaagtgtgccaaattgcagacagatgaagaacgagaaaaaaatggatctgaagaggatgatgatgagaaaccaggaaaacgtgtcataggaccaagaaagaaattccactgggatgacactatcagaactttgttatgtaaccttgttgagatcaaattgggatgctatgagttagaaccaaataaaagccagtctgctgaagattatcttaagtcttttatggagacagaagtgaagcccctgtggcctaagggctggatgcaggcaagaatgctttttaaggaaagccggagtgttcataatcatcttacttctgctccggcaaagaaaaaggtgattcctgcacctaaacccaaagtaaaggaggtgatggtaaagacccttcctctccattctttccccactatgcttaaggagtgtagtccaaaaaaggaccagaaaactccaacatccctggtggcttcggttagcggtcctccaacgagctccagcacagctgccattgctgcagctagctctagctctgcaccagcccaagaaaccatctgcctcgacgactcactagatgaagacctttctttccattcaccttcactggatcttgtttctgaagctttagcggttatcaacaatgggaacaagggccctccagttggctcaaggataagcatgccaaccacaaagcctcgtccaggactgagagaagaaaaat

SEQ ID NO: 302982 - DNA, 1902 bp, Homo sapiens
atcacacagaagtgtagttttgcttcccttaaaatcttctgtgctctgcctattcattcctccttccctcctaatcactggcacctactggtcttaactgtcttcagagttctaccttttccagaatgtcttatagagaaaatcatatatatgatgaattagttcccgcttctctaacaacaaaatatggaggcttttatatcaacactggcactctacagtttcgccaagcttcagatactgaagaagatgatattacagacaaccaaaagcacaagccacccaaggtccccaaaataaaagaagatgatattgagatgaagaagcggaagcggaaagaggaaggggaaaaggagaagaagccaaggaaaaaagttcccaaacaactgggagttgtggctctaaattcacacaagtctgaaaaaaagaagaaacgttataaagattctctttctctagctgccatgattagaaaattccagaaagagaaggatgcattaaagaaggagtctaaccccaaagtcccagtgaccttgtcaaccccttctctgaataaacccccatgtgctgctgcagcactggggaatgacgtcccggacttaaatctgagcagcggtgatccagaccttcccatttttgttagcacaaatgaacatgagctgtttcaggaagctgaaaatgccctagagatgctagatgattttgacttcgacagattactggatgctgcttctgatggtagccccctatctgagtcggggggtgaaaatggaaccaccacccagccaacctacacttctcaggttatgcccaaagtggtacctacactcccagagggtctacctgtacttcttgaaaaacgtatcgaagaccttcgtgtagctgccaaactttttgatgaagaaggaaggaaaaaattctttacacaggatatgaataatattcttctggacattgagttacagctacaagaactaggccctgtcattcgcagtggtgtctactcccaccttgaagcttttgtgccatgcaataaagaaacactagtaaaacgtctgaagaagttacatctcaatgtccaggatgatcgtttaagagaacctctgcaaaaactgaaactggctgttagcaatgtcatgcctgaacagctatttaaataccaggaggactgccaggctcgtagtcaagctaagtgtgccaaattgcagacagatgaagaacgagaaaaaaatggatctgaagaggatgatgatgagaaaccaggaaaacgtgtcataggaccaagaaagaaattccactgggatgacactatcagaactttgttatgtaaccttgttgagatcaaattgggatgctatgagttagaaccaaataaaagccagtctgctgaagattatcttaagtcttttatggagacagaagtgaagcccctgtggcctaagggctggatgcaggcaagaatgctttttaaggaaagccggagtgttcataatcatcttacttctgctccggcaaagaaaaaggtgattcctgcacctaaacccaaagtaaaggaggtgatggtaaagacccttcctctccattctttccccactatgcttaaggagtgtagtccaaaaaaggaccagaaaactccaacatccctggtggcttcggttagcggtcctccaacgagctccagcacagctgccattgctgcagctagctctagctctgcaccagcccaagaaaccatctgcctcgacgactcactagatgaagacctttctttccattcaccttcactggatcttgtttctgaagctttagcggttatcaacaatgggaacaagggccctccagttggctcaaggataagcatgccaaccacaaagcctcgtccaggactgagagaagaaaaat

SEQ ID NO: 302983 - DNA, 1081 bp, Homo sapiens
attcaagttagatatgacaccagattcttttgtctgctcgtagaagtctgcaacttcaatgctgccaaactttttgatgaagaaggaaggaaaaaattctttacacaggatatgaataatattcttctggacattgagttacagctacaagaactaggccctgtcattcgcagtggtgtctactcccaccttgaagcttttgtgccatgcaataaagaaacactagtaaaacgtctgaagaagttacatctcaatgtccaggatgatcgtttaagagaacctctgcaaaaactgaaactggctgttagcaatgtcatgcctgaacagctatttaaataccaggaggactgccaggctcgtagtcaagctaagtgtgccaaattgcagacagatgaagaacgagaaaaaaatggatctgaagaggatgatgatgagaaaccaggaaaacgtgtcataggaccaagaaagaaattccactgggatgacactatcagaactttgttatgtaaccttgttgagatcaaattgggatgctatgagttagaaccaaataaaagccagtctgctgaagattatcttaagtcttttatggagacagaagtgaagcccctgtggcctaagggctggatgcaggcaagaatgctttttaaggaaagccggagtgttcataatcatcttacttctgctccggcaaagaaaaaggtgattcctgcacctaaacccaaagtaaaggaggtgatggtaaagacccttcctctccattctttccccactatgcttaaggagtgtagtccaaaaaaggaccagaaaactccaacatccctggtggcttcggttagcggtcctccaacgagctccagcacagctgccattgctgcagctagctctagctctgcaccagcccaagaaaccatctgcctcgacgactcactagatgaagacctttctttccattcaccttcactggatcttgtttctgaagctttagcggttatcaacaatgggaacaagggccctccagttggctcaaggataagcatgccaaccacaaagcctcgtccaggactgagagaagaaaaat

SEQ ID NO: 302984 - DNA, 452 bp, Homo sapiens
ggcaaagaaaaaggtgattcctgcacctaaacccaaagtaaaggtaagtactgaaacaaaatatttaattagttatagttggtgaatgttgaaatacattcctaagatgaaaaagatgtatggtatttagcagaggtcagtaggcactataagatagatgttttcaacttcataataatcttagtacttttgtatttgggagaatagattcctgtgtagcagtggggaatatgcatacaccaattgtgaagcttaactttattaatacttggaaatgctaggtaaaatacaacaaatattctttcatagcataggtgagattgaaaaatatgtaagaaaaattcataagaccagaaacaaaaaaggagctgacagtgttaatctgtcgcttacactttggttgcccttggaggcatttggcactttctacccatcactttatggtttctttt

SEQ ID NO: 302985 - DNA, 374 bp, Homo sapiens
tactgtaccattataacttttacttggtaaataagccagtaatagtctactgaaaattaaattactttaaaaaataaaacaattatgttactatctgctataaagaaaataataattgtgttctttaaatttttccagaatgctttttaaggaaagccggagtgttcataatcatcttacttctgctccgtgagtaaatgcagactccagattgcttcatttattcacattatgtgctttagtgaacaaaagtatcatttattaaatgctagttggaataggacttaaaaagatcattttgaccattgactatttagacttcagaacacatttatctattgaaataattgtcagggtactctctaaacacctac

SEQ ID NO: 302986 - DNA, 398 bp, Homo sapiens
tgttttctgacctaaaaggtgaatgttggtgcctttacattataatctgaagtccttatttaccaaactactttataactcctttcaaatttgaagtattatgtggaaaggtagattccgtctttaccctctcttttaacattccattaagcaattcagcaagtatttatggagcatattatataggcagtgttgggttaaaagtttgttttgtaaagtgtttttcatttttagattgcagacagatgaagaacgagaaaaaaatggatctgaagaggatgatgatgagaaaccaggaaaacgtgtcataggaccaagaaagaaattccactgggatgacactatcaggtaagatttaattagttttcacttttaatatataatgcagaagtaagatt

SEQ ID NO: 302987 - DNA, 624 bp, Homo sapiens
ttaaattatgtagatattggaaaattggtatttacatcatagaattatattttcttataaaaacttctctctacaaatgtgggctaataatttactgtttctgggagaaggttatatttctcggataggttaatattaatagctgttacctttcctaagatgtcatttttaacaaaatctatagaatttgtatacattgtctttgggaaagatatagtgtccttggataagtgtttcttgaagtgtggcccaaagacttacttacaccagaatcaccagaatgcttgtttaaaatgcaaattataaggttctaactcagataactgaatcgaaaccggaggtgagagtgctcttgaaccccaaggatctgcagttataacaaacgattgtaatgcacactgacatttgagaaaaaccactgctgatgctggattgctaacatcaaagagtaaagcattgttacttacataaatgatcattcttttatcattttgcaggtccccaaaataaaagaagatgatattgagatgaagaagcggaagcggaaagaggaaggggaaaaggagaagaagccaaggaaaaaagttcccaaacaactggggtacgttaaattaaacctaagaa

SEQ ID NO: 302988 - DNA, 612 bp, Homo sapiens
actggagggacgcactgagcatgtgcagatcagctcggtggtggctgccgcggccggaggcgagggcccggtgctgatgcgaaccgccggctcggcctcagcccgcgcgtggtcggccccccaggccggggcgacagggaaggagccgtagcctccccgtggcccgaggagccggcgcggcggcgcgcactccccggcggccgcggcgccctcggggcccacgatgatggcggagcaggtgaaatgcgcctcggcaggggtcagctctggagcgggctccgggccggtggtgaacgcggagctggaggtgaagaagctgcaggagctggtgcgcaagctggagaagcagaacgagcagctgcggagtcgagcggccagcgcggccgccgccccgcacctgctgctgctgccgccgccgccgcccgccgcgccgccccccgctggcctgcagcctttgggtcctcggagccccccggccgccacggccaccgccgcggcctcagggggcctggggctcgggctggcgctgggcgcggggggcggtggcggcagcggtagtggcagcggcggtggctccagccccgcgttcccgggcaccttctgcctgcctag

SEQ ID NO: 302989 - DNA, 2230 bp, Homo sapiens
agatagcagtcacaaagaactattggtcttttaaaatatagaatttttaatgagaaactttgaataatagagattgaacatgtgagaacagctacctagtgtgtgttgcattattaacccctagtttgtagtgtattctggagtcaagttgacctacatagaagagaaggaactggaagtgcatgtctgtgttctggctccgattgggaaaagctgcttaaccactgttacacttccaggggctccccactcagtccccagtcatctatcgacagtgagctgagtacttcagaattggaggatgattctatctccatgggatataaattacaggacctcactgatgttcagatcatggctcgtctgcaagaagaaagtctcaggcaagattatgcttctacttcagcatctgtatcaagacatagttccagtgtgtcattgagttcaggaaaaaaagggacatgtagtgatcaagaatatgaccaatacagtctggaggatgaagaggaatttgatcatttgccaccacctcagcctcgtcttccaagatgttcccctttccaaagaggaattccccattcacagactttctccagcattcgggagtgtaggaggagccccagttcccagtattttccttcaaataattaccagcagcaacagtattattcacctcaagcccaaactccagatcagcaaccaaataggaccaatggagataagctccgaagaagtatgcctaacctagcccggatgccaagtacaactgccattagtagcaacattagttctccggtcaccgtgcgaaatagtcagagttttgactcaagcttgcatggagctggaaatggaatttcaagaatacaatcttgtattccatcaccgggacagcttcaacacagggtccacagcgtggggcatttcccagtgtctatccgacagcctcttaaagccacagcctatgtgagtccaaccgttcaaggcagcagtaacatgcctttatcaaacggcttacagctgtattccaacacaggaatccccacaccgaacaaagctgcagcttctgggataatgggtcgcagtgcactcccaagaccttcgttggcaataaatgggagtaacctgcctcgaagcaaaattgcacaacctgttagaagttttcttcagcctccaaagcctctgtcttcactcagcactctgagggatggaaattggagagatggttgctactaatgcagttttatgtacccttgaaaaatgggaaagaagtaaaaatgagggttgtgttacctagctggctgggtagcagtggatgttgggatattctttcccttttgtgttttaatatatttactgcattgtttctcaatggaccagtcaccagagactaattattgcacttaaatatttgcctgagatactgcaacattctcaaacccatggttgcagtattgtgacacttagatctaggaagtttttgtagaactgctctgtacctgaatactttttgagagaattaagatgtatcaataatgctttgccatatgagttttttaaagtaacttgttcaatttactcacgtgttctaaacatctttccattacatgttctgtattttaatacattgcatattgacaactaggttctataatgtatgctttgaaatttacttttttatagtttacaggaattttattttttgtgcctatttctttttacacctatgtgaaccactatggaacaacttaaattttgtgccataaaaatatttttgtggtaaggtactatttttttagctctagggatatatcagcaaaaacacatcatgcaatttgagacacataattttgtgttgaatgagcacaacataatttgaagcattgcaaggagataaccagacagcagaattaaatggtcctgtctttttcatttttaatttattgtcatacatgggtttcatatttataacggcatcatgagctcattgcacttaatacctgcaatgtttgctactgtaccacaattgattttcaatactttattacgaaggatgaaactgtaatgttttattaacaatgcttctggaaatgaatgcattttaaagcaaataaatctttttgatagaccttttacaaaatccatttgcactaatgaatgctttcttatggcatataacttaatatttgttactgtgtacactgctgttttggaatgttcagaaataaagact

SEQ ID NO: 302990 - DNA, 2630 bp, Homo sapiens
agcggcgtggtgctcttttccccagtgttttcggagggatgacgggggatggtaggggttggcctctgtctgcgactgttactgttctttcgttttaaacgaacgctggacaggatttgcgtgctcttcctcctcgggtggcatcggaagccgcgcagtgatggatctctctttatagagaggttcgttcttgctgtttgaattttgcagtcgtgtgcccttttgcgttgcattttcattgaaatcttattttcagagactgacttgctttttaaaatggggtgacctcactggctttcccatgaatagtgccaataaagaggacttttcttggagtggaatgaacaggttatacattggctcttcaaagacgttcacctcatcagagaaatccctgactcctttgcagtggtgtagacatgtcctagataacccaactcctgagatggaagcagcgagacgttccctgtgctttagactggagcaagtatacattggctcttcaaagacgttcacctcatcagagaaatccctgactcctttgcagtggtgtagacatgtcctagataacccaactcctgagatggaagcagcgagacgttccctgtgctttagactggagcaaggttacacttccaggggctccccactcagtccccagtcatctatcgacagtgagctgagtacttcagaattggaggatgattctatctccatgggatataaattacaggacctcactgatgttcagatcatggctcgtctgcaagaagaaagtctcaggcaagattatgcttctacttcagcatctgtatcaagacatagttccagtgtgtcattgagttcaggaaaaaaagggacatgtagtgatcaagaatatgaccaatacagtctggaggatgaagaggaatttgatcatttgccaccacctcagcctcgtcttccaagatgttcccctttccaaagaggaattccccattcacagactttctccagcattcgggagtgtaggaggagccccagttcccagtattttccttcaaataattaccagcagcaacagtattattcacctcaagcccaaactccagatcagcaaccaaataggaccaatggagataagctccgaagaagtatgcctaacctagcccggatgccaagtacaactgccattagtagcaacattagttctccggtcaccgtgcgaaatagtcagagttttgactcaagcttgcatggagctggaaatggaatttcaagaatacaatcttgtattccatcaccgggacagcttcaacacagggtccacagcgtggggcatttcccagtgtctatccgacagcctcttaaagccacagcctatgtgagtccaaccgttcaaggcagcagtaacatgcctttatcaaacggcttacagctgtattccaacacaggaatccccacaccgaacaaagctgcagcttctgggataatgggtcgcagtgcactcccaagaccttcgttggcaataaatgggagtaacctgcctcgaagcaaaattgcacaacctgttagaagttttcttcagcctccaaagcctctgtcttcactcagcactctgagggatggaaattggagagatggttgctactaatgcagttttatgtacccttgaaaaatgggaaagaagtaaaaatgagggttgtgttacctagctggctgggtagcagtggatgttgggatattctttcccttttgtgttttaatatatttactgcattgtttctcaatggaccagtcaccagagactaattattgcacttaaatatttgcctgagatactgcaacattctcaaacccatggttgcagtattgtgacacttagatctaggaagtttttgtagaactgctctgtacctgaatactttttgagagaattaagatgtatcaataatgctttgccatatgagttttttaaagtaacttgttcaatttactcacgtgttctaaacatctttccattacatgttctgtattttaatacattgcatattgacaactaggttctataatgtatgctttgaaatttacttttttatagtttacaggaattttattttttgtgcctatttctttttacacctatgtgaaccactatggaacaacttaaattttgtgccataaaaatatttttgtggtaaggtactatttttttagctctagggatatatcagcaaaaacacatcatgcaatttgagacacataattttgtgttgaatgagcacaacataatttgaagcattgcaaggagataaccagacagcagaattaaatggtcctgtctttttcatttttaatttattgtcatacatgggtttcatatttataacggcatcatgagctcattgcacttaatacctgcaatgtttgctactgtaccacaattgattttcaatactttattacgaaggatgaaactgtaatgttttattaacaatgcttctggaaatgaatgcattttaaagcaaataaatctttttgatagaccttttacaaaatccatttgcactaatgaatgctttcttatggcatataacttaatatttgttactgtgtacactgctgttttggaatgttcagaaataaagact

SEQ ID NO: 302991 - DNA, 2349 bp, Homo sapiens
agccacccgaggcgcccttcgtctacttcaagccggcagcaggcttcttcggcgcgggcggtggcgggccggagccggggggcgcggggacgccgccaggggcagctgcagcgccgccctcgccgccccccacgctgctggacgaggtggaattgctggatctggagagcgtagccgcctggcgggacgaggacgactacacctggttatacattggctcttcaaagacgttcacctcatcagagaaatccctgactcctttgcagtggtgtagacatgtcctagataacccaactcctgagatggaagcagcgagacgttccctgtgctttagactggagcaaggttacacttccaggggctccccactcagtccccagtcatctatcgacagtgagctgagtacttcagaattggaggatgattctatctccatgggatataaattacaggacctcactgatgttcagatcatggctcgtctgcaagaagaaagtctcaggcaagattatgcttctacttcagcatctgtatcaagacatagttccagtgtgtcattgagttcaggaaaaaaagggacatgtagtgatcaagaatatgaccaatacagtctggaggatgaagaggaatttgatcatttgccaccacctcagcctcgtcttccaagatgttcccctttccaaagaggaattccccattcacagactttctccagcattcgggagtgtaggaggagccccagttcccagtattttccttcaaataattaccagcagcaacagtattattcacctcaagcccaaactccagatcagcaaccaaataggaccaatggagataagctccgaagaagtatgcctaacctagcccggatgccaagtacaactgccattagtagcaacattagttctccggtcaccgtgcgaaatagtcagagttttgactcaagcttgcatggagctggaaatggaatttcaagaatacaatcttgtattccatcaccgggacagcttcaacacagggtccacagcgtggggcatttcccagtgtctatccgacagcctcttaaagccacagcctatgtgagtccaaccgttcaaggcagcagtaacatgcctttatcaaacggcttacagctgtattccaacacaggaatccccacaccgaacaaagctgcagcttctgggataatgggtcgcagtgcactcccaagaccttcgttggcaataaatgggagtaacctgcctcgaagcaaaattgcacaacctgttagaagttttcttcagcctccaaagcctctgtcttcactcagcactctgagggatggaaattggagagatggttgctactaatgcagttttatgtacccttgaaaaatgggaaagaagtaaaaatgagggttgtgttacctagctggctgggtagcagtggatgttgggatattctttcccttttgtgttttaatatatttactgcattgtttctcaatggaccagtcaccagagactaattattgcacttaaatatttgcctgagatactgcaacattctcaaacccatggttgcagtattgtgacacttagatctaggaagtttttgtagaactgctctgtacctgaatactttttgagagaattaagatgtatcaataatgctttgccatatgagttttttaaagtaacttgttcaatttactcacgtgttctaaacatctttccattacatgttctgtattttaatacattgcatattgacaactaggttctataatgtatgctttgaaatttacttttttatagtttacaggaattttattttttgtgcctatttctttttacacctatgtgaaccactatggaacaacttaaattttgtgccataaaaatatttttgtggtaaggtactatttttttagctctagggatatatcagcaaaaacacatcatgcaatttgagacacataattttgtgttgaatgagcacaacataatttgaagcattgcaaggagataaccagacagcagaattaaatggtcctgtctttttcatttttaatttattgtcatacatgggtttcatatttataacggcatcatgagctcattgcacttaatacctgcaatgtttgctactgtaccacaattgattttcaatactttattacgaaggatgaaactgtaatgttttattaacaatgcttctggaaatgaatgcattttaaagcaaataaatctttttgatagaccttttacaaaatccatttgcactaatgaatgctttcttatggcatataacttaatatttgttactgtgtacactgctgttttggaatgttcagaaataaagact

SEQ ID NO: 302992 - DNA, 2130 bp, Homo sapiens
agatagcagtcacaaagaactattggtcttttaaaatatagaatttttaatgagaaactttgaataatagagattgaacatgtgagaacagctacctagtgtgtgttgcattattaacccctagtttgtagtgtattctggagtcaagttgacctacatagaagagaaggaactggaagtgcatgtctgtgttctggctccgattgggaaaagctgcttaaccactgttacacttccaggggctccccactcagtccccagtcatctatcgacagtgagctgagtacttcagaattggaggatgattctatctccatgggatataaattacaggacctcactgatgttcagatcatggctcgtctgcaagaagaaagtctcaggcaagattatgcttctacttcagcatctgtatcaagacatagttccagtgtgtcattgagttcaggaaaaaaagggacatgtagtgatcaagaatatgaccaatacagtctggaggatgaagaggaatttgatcatttgccaccacctcagcctcgtcttccaagatgttcccctttccaaagaggaattccccattcacagactttctccagcattcgggagtgtaggaggagccccagttcccagtattttccttcaaataattaccagcagcaacagtattattcacctcaagcccaaactccagatcagcaaccaaataggaccaatggagataagctccgaagaagtatgcctaacctagcccggatgccaagtacaactgccattagtagcaacattagttctccggtcaccgtgcgaaatagtcagagttttgactcaagcttgcatggagctggaaatggaatttcaagaatacaatcttgtattccatcaccgggacagcttcaacacagggtccacagcgtggggcatttcccagtgtctatccgacagcctcttaaagccacagcctatgtgagtccaaccgttcaaggcagcagtaacatgcctttatcaaacggcttacagctgtattccaacacaggaatccccacaccgaacaaagctgcagcttctgggataatgggtcgcagtgcactcccaagaccttcgttggcaataaatgggagtaacctgcctcgaagcaaaattgcacaacctgttagaagttttcttcagcctccaaagcctctgtcttcactcagcactctgagggatggaaattggagagatggttgctactaatgcagttttatgtacccttgaaaaatgggaaagaagtaaaaatgagggttgtgttacctagctggctgggtagcagtggatgttgggatattctttcccttttgtgttttaatatatttactgcattgtttctcaatggaccagtcaccagagactaattattgcacttaaatatttgcctgagatactgcaacattctcaaacccatggttgcagtattgtgacacttagatctaggaagtttttgtagaactgctctgtacctgaatactttttgagagaattaagatgtatcaataatgctttgccatatgagttttttaaagtaacttgttcaatttactcacgtgttctaaacatctttccattacatgttctgtattttaatacattgcatattgacaactaggttctataatgtatgctttgaaatttacttttttatagtttacaggaattttattttttgtgcctatttctttttacacctatgtgaaccactatggaacaacttaaattttgtgccataaaaatatttttgtggtaaggtactatttttttagctctagggatatatcagcaaaaacacatcatgcaatttgagacacataattttgtgttgaatgagcacaacataatttgaagcattgcaaggagataaccagacagcagaattaaatggtcctgtctttttcatttttaatttattgtcatacatgggtttcatatttataacggcatcatgagctcattgcacttaatacctgcaatgtttgctactgtaccacaattgattttcaatactttattacgaaggatgaaactgtaatgttttattaacaatgcttctggaaatgaatgcattttaaagcaaataaatctttttgatagaccttt

SEQ ID NO: 302993 - DNA, 2499 bp, Homo sapiens
agccacccgaggcgcccttcgtctacttcaagccggcagcaggcttcttcggcgcgggcggtggcgggccggagccggggggcgcggggacgccgccaggggcagctgcagcgccgccctcgccgccccccacgctgctggacgaggtggaattgctggatctggagagcgtagccgcctggcgggacgaggacgactacacctggttatacattggctcttcaaagacgttcacctcatcagagaaatccctgactcctttgcagtggtgtagacatgtcctagataacccaactcctgagatggaagcagcgagacgttccctgtgctttagactggagcaagctagccgatggcggagtctcttctcttcaactgcctcactggcttttccttatagtcctgttgcaagactcagcccttatagcaatggcattaatactcccagcttctctaaaacctcaaataaagcaatactaacacctgaaaaaacaggttacacttccaggggctccccactcagtccccagtcatctatcgacagtgagctgagtacttcagaattggaggatgattctatctccatgggatataaattacaggacctcactgatgttcagatcatggctcgtctgcaagaagaaagtctcaggcaagattatgcttctacttcagcatctgtatcaagacatagttccagtgtgtcattgagttcaggaaaaaaagggacatgtagtgatcaagaatatgaccaatacagtctggaggatgaagaggaatttgatcatttgccaccacctcagcctcgtcttccaagatgttcccctttccaaagaggaattccccattcacagactttctccagcattcgggagtgtaggaggagccccagttcccagtattttccttcaaataattaccagcagcaacagtattattcacctcaagcccaaactccagatcagcaaccaaataggaccaatggagataagctccgaagaagtatgcctaacctagcccggatgccaagtacaactgccattagtagcaacattagttctccggtcaccgtgcgaaatagtcagagttttgactcaagcttgcatggagctggaaatggaatttcaagaatacaatcttgtattccatcaccgggacagcttcaacacagggtccacagcgtggggcatttcccagtgtctatccgacagcctcttaaagccacagcctatgtgagtccaaccgttcaaggcagcagtaacatgcctttatcaaacggcttacagctgtattccaacacaggaatccccacaccgaacaaagctgcagcttctgggataatgggtcgcagtgcactcccaagaccttcgttggcaataaatgggagtaacctgcctcgaagcaaaattgcacaacctgttagaagttttcttcagcctccaaagcctctgtcttcactcagcactctgagggatggaaattggagagatggttgctactaatgcagttttatgtacccttgaaaaatgggaaagaagtaaaaatgagggttgtgttacctagctggctgggtagcagtggatgttgggatattctttcccttttgtgttttaatatatttactgcattgtttctcaatggaccagtcaccagagactaattattgcacttaaatatttgcctgagatactgcaacattctcaaacccatggttgcagtattgtgacacttagatctaggaagtttttgtagaactgctctgtacctgaatactttttgagagaattaagatgtatcaataatgctttgccatatgagttttttaaagtaacttgttcaatttactcacgtgttctaaacatctttccattacatgttctgtattttaatacattgcatattgacaactaggttctataatgtatgctttgaaatttacttttttatagtttacaggaattttattttttgtgcctatttctttttacacctatgtgaaccactatggaacaacttaaattttgtgccataaaaatatttttgtggtaaggtactatttttttagctctagggatatatcagcaaaaacacatcatgcaatttgagacacataattttgtgttgaatgagcacaacataatttgaagcattgcaaggagataaccagacagcagaattaaatggtcctgtctttttcatttttaatttattgtcatacatgggtttcatatttataacggcatcatgagctcattgcacttaatacctgcaatgtttgctactgtaccacaattgattttcaatactttattacgaaggatgaaactgtaatgttttattaacaatgcttctggaaatgaatgcattttaaagcaaataaatctttttgatagaccttttacaaaatccatttgcactaatgaatgctttcttatggcatataacttaatatttgttactgtgtacactgctgttttggaatgttcagaaataaagact

SEQ ID NO: 302994 - DNA, 2205 bp, Homo sapiens
acacttgtaatcccagcacttttggaggctgaggcggatggatcacctgagctagccgatggcggagtctcttctcttcaactgcctcactggcttttccttatagtcctgttgcaagactcagcccttatagcaatggcattaatactcccagcttctctaaaacctcaaataaagcaatactaacacctgaaaaaacaggttacacttccaggggctccccactcagtccccagtcatctatcgacagtgagctgagtacttcagaattggaggatgattctatctccatgggatataaattacaggacctcactgatgttcagatcatggctcgtctgcaagaagaaagtctcaggcaagattatgcttctacttcagcatctgtatcaagacatagttccagtgtgtcattgagttcaggaaaaaaagggacatgtagtgatcaagaatatgaccaatacagtctggaggatgaagaggaatttgatcatttgccaccacctcagcctcgtcttccaagatgttcccctttccaaagaggaattccccattcacagactttctccagcattcgggagtgtaggaggagccccagttcccagtattttccttcaaataattaccagcagcaacagtattattcacctcaagcccaaactccagatcagcaaccaaataggaccaatggagataagctccgaagaagtatgcctaacctagcccggatgccaagtacaactgccattagtagcaacattagttctccggtcaccgtgcgaaatagtcagagttttgactcaagcttgcatggagctggaaatggaatttcaagaatacaatcttgtattccatcaccgggacagcttcaacacagggtccacagcgtggggcatttcccagtgtctatccgacagcctcttaaagccacagcctatgtgagtccaaccgttcaaggcagcagtaacatgcctttatcaaacggcttacagctgtattccaacacaggaatccccacaccgaacaaagctgcagcttctgggataatgggtcgcagtgcactcccaagaccttcgttggcaataaatgggagtaacctgcctcgaagcaaaattgcacaacctgttagaagttttcttcagcctccaaagcctctgtcttcactcagcactctgagggatggaaattggagagatggttgctactaatgcagttttatgtacccttgaaaaatgggaaagaagtaaaaatgagggttgtgttacctagctggctgggtagcagtggatgttgggatattctttcccttttgtgttttaatatatttactgcattgtttctcaatggaccagtcaccagagactaattattgcacttaaatatttgcctgagatactgcaacattctcaaacccatggttgcagtattgtgacacttagatctaggaagtttttgtagaactgctctgtacctgaatactttttgagagaattaagatgtatcaataatgctttgccatatgagttttttaaagtaacttgttcaatttactcacgtgttctaaacatctttccattacatgttctgtattttaatacattgcatattgacaactaggttctataatgtatgctttgaaatttacttttttatagtttacaggaattttattttttgtgcctatttctttttacacctatgtgaaccactatggaacaacttaaattttgtgccataaaaatatttttgtggtaaggtactatttttttagctctagggatatatcagcaaaaacacatcatgcaatttgagacacataattttgtgttgaatgagcacaacataatttgaagcattgcaaggagataaccagacagcagaattaaatggtcctgtctttttcatttttaatttattgtcatacatgggtttcatatttataacggcatcatgagctcattgcacttaatacctgcaatgtttgctactgtaccacaattgattttcaatactttattacgaaggatgaaactgtaatgttttattaacaatgcttctggaaatgaatgcattttaaagcaaataaatctttttgatagaccttttacaaaatccatttgcactaatgaatgctttcttatggcatataacttaatatttgttactgtgtacactgctgttttggaatgttcagaaataaagact

SEQ ID NO: 302995 - DNA, 2382 bp, Homo sapiens
actggagggacgcactgagcatgtgcagatcagctcggtggtggctgccgcggccggaggcgagggcccggtgctgatgcgaaccgccggctcggcctcagcccgcgcgtggtcggccccccaggccggggcgacagggaaggagccgtagcctccccgtggcccgaggagccggcgcggcggcgcgcactccccggcggccgcggcgccctcggggcccacgatgatggcggagcaggttatacattggctcttcaaagacgttcacctcatcagagaaatccctgactcctttgcagtggtgtagacatgtcctagataacccaactcctgagatggaagcagcgagacgttccctgtgctttagactggagcaaggttacacttccaggggctccccactcagtccccagtcatctatcgacagtgagctgagtacttcagaattggaggatgattctatctccatgggatataaattacaggacctcactgatgttcagatcatggctcgtctgcaagaagaaagtctcaggcaagattatgcttctacttcagcatctgtatcaagacatagttccagtgtgtcattgagttcaggaaaaaaagggacatgtagtgatcaagaatatgaccaatacagtctggaggatgaagaggaatttgatcatttgccaccacctcagcctcgtcttccaagatgttcccctttccaaagaggaattccccattcacagactttctccagcattcgggagtgtaggaggagccccagttcccagtattttccttcaaataattaccagcagcaacagtattattcacctcaagcccaaactccagatcagcaaccaaataggaccaatggagataagctccgaagaagtatgcctaacctagcccggatgccaagtacaactgccattagtagcaacattagttctccggtcaccgtgcgaaatagtcagagttttgactcaagcttgcatggagctggaaatggaatttcaagaatacaatcttgtattccatcaccgggacagcttcaacacagggtccacagcgtggggcatttcccagtgtctatccgacagcctcttaaagccacagcctatgtgagtccaaccgttcaaggcagcagtaacatgcctttatcaaacggcttacagctgtattccaacacaggaatccccacaccgaacaaagctgcagcttctgggataatgggtcgcagtgcactcccaagaccttcgttggcaataaatgggagtaacctgcctcgaagcaaaattgcacaacctgttagaagttttcttcagcctccaaagcctctgtcttcactcagcactctgagggatggaaattggagagatggttgctactaatgcagttttatgtacccttgaaaaatgggaaagaagtaaaaatgagggttgtgttacctagctggctgggtagcagtggatgttgggatattctttcccttttgtgttttaatatatttactgcattgtttctcaatggaccagtcaccagagactaattattgcacttaaatatttgcctgagatactgcaacattctcaaacccatggttgcagtattgtgacacttagatctaggaagtttttgtagaactgctctgtacctgaatactttttgagagaattaagatgtatcaataatgctttgccatatgagttttttaaagtaacttgttcaatttactcacgtgttctaaacatctttccattacatgttctgtattttaatacattgcatattgacaactaggttctataatgtatgctttgaaatttacttttttatagtttacaggaattttattttttgtgcctatttctttttacacctatgtgaaccactatggaacaacttaaattttgtgccataaaaatatttttgtggtaaggtactatttttttagctctagggatatatcagcaaaaacacatcatgcaatttgagacacataattttgtgttgaatgagcacaacataatttgaagcattgcaaggagataaccagacagcagaattaaatggtcctgtctttttcatttttaatttattgtcatacatgggtttcatatttataacggcatcatgagctcattgcacttaatacctgcaatgtttgctactgtaccacaattgattttcaatactttattacgaaggatgaaactgtaatgttttattaacaatgcttctggaaatgaatgcattttaaagcaaataaatctttttgatagaccttttacaaaatccatttgcactaatgaatgctttcttatggcatataacttaatatttgttactgtgtacactgctgttttggaatgttcagaaataaagact

SEQ ID NO: 302996 - DNA, 2176 bp, Homo sapiens
agatagcagtcacaaagaactattggtcttttaaaatatagaatttttaatgagaaactttgaataatagagattgaacatgtgagaacagctacctagtgtgtgttgcattattaacccctagtttgtagtgtattctggagtcaagttgacctacatagaagagaaggaactggaagtgcatgtctgtgttctggctccgattgggaaaagctgcttaaccactgttacacttccaggggctccccactcagtccccagtcatctatcgacagtgagctgagtacttcagaattggaggatgattctatctccatgggatataaattacaggacctcactgatgttcagatcatggctcgtctgcaagaagaaagtctcaggcaagattatgcttctacttcagcatctgtatcaagacatagttccagtgtgtcattgagttcaggaaaaaaagggacatgtagtgatcaagaatatgaccaatacagtctggaggatgaagaggaatttgatcatttgccaccacctcagcctcgtcttccaagatgttcccctttccaaagaggaattccccattcacagactttctccagcattcgggagtgtaggaggagccccagttcccagtattttccttcaaataattaccagcagcaacagtattattcacctcaagcccaaactccagatcagcaaccaaataggaccaatggagataagctccgaagaagtatgcctaacctagcccggatgccaagtacaactgccattagtagcaacattagttctccggtcaccgtgcgaaatagtcagagttttgactcaagcttgcatggagctggaaatggaatttcaagaatacaatcttgtattccatcaccgggacagcttcaacacagggtccacagcgtggggcatttcccagtgtctatccgacagcctcttaaagccacagcctatgtgagtccaaccgttcaaggcagcagtaacatgcctttatcaaacggcttacagctgtattccaacacaggaatccccacaccgaacaaagctgcagcttctgggataatgggtcgcagtgcactcccaagaccttcgttggcaataaatgggagtaacctgcctcgaagcaaaattgcacaacctgttagaagttttcttcagcctccaaagcctctgtcttcactcagcactctgagggatggaaattggagagatggttgctactaatgcagttttatgtacccttgaaaaatgggaaagaagtactttcccttttgtgttttaatatatttactgcattgtttctcaatggaccagtcaccagagactaattattgcacttaaatatttgcctgagatactgcaacattctcaaacccatggttgcagtattgtgacacttagatctaggaagtttttgtagaactgctctgtacctgaatactttttgagagaattaagatgtatcaataatgctttgccatatgagttttttaaagtaacttgttcaatttactcacgtgttctaaacatctttccattacatgttctgtattttaatacattgcatattgacaactaggttctataatgtatgctttgaaatttacttttttatagtttacaggaattttattttttgtgcctatttctttttacacctatgtgaaccactatggaacaacttaaattttgtgccataaaaatatttttgtggtaaggtactatttttttagctctagggatatatcagcaaaaacacatcatgcaatttgagacacataattttgtgttgaatgagcacaacataatttgaagcattgcaaggagataaccagacagcagaattaaatggtcctgtctttttcatttttaatttattgtcatacatgggtttcatatttataacggcatcatgagctcattgcacttaatacctgcaatgtttgctactgtaccacaattgattttcaatactttattacgaaggatgaaactgtaatgttttattaacaatgcttctggaaatgaatgcattttaaagcaaataaatctttttgatagaccttttacaaaatccatttgcactaatgaatgctttcttatggcatataacttaatatttgttactgtgtacactgctgttttggaatgttcagaaataaagact

SEQ ID NO: 302997 - DNA, 1416 bp, Homo sapiens
gggcggtacgccccggaattacgggatctggaaatggaatttcaagaatacaatcttgtattccatcaccgggacagcttcaacacagggtccacagcgtggggcatttcccagtgtctatccgacagcctcttaaagccacagcctatgtgagtccaaccgttcaaggcagcagtaacatgcctttatcaaacggcttacagctgtattccaacacaggaatccccacaccgaacaaagctgcagcttctgggataatgggtcgcagtgcactcccaagaccttcgttggcaataaatgggagtaacctgcctcgaagcaaaattgcacaacctgttagaagttttcttcagcctccaaagcctctgtcttcactcagcactctgagggatggaaattggagagatggttgctactaatgcagttttatgtacccttgaaaaatgggaaagaagtaaaaatgagggttgtgttacctagctggctgggtagcagtggatgttgggatattctttcccttttgtgttttaatatatttactgcattgtttctcaatggaccagtcaccagagactaattattgcacttaaatatttgcctgagatactgcaacattctcaaacccatggttgcagtattgtgacacttagatctaggaagtttttgtagaactgctctgtacctgaatactttttgagagaattaagatgtatcaataatgctttgccatatgagttttttaaagtaacttgttcaatttactcacgtgttctaaacatctttccattacatgttctgtattttaatacattgcatattgacaactaggttctataatgtatgctttgaaatttacttttttatagtttacaggaattttattttttgtgcctatttctttttacacctatgtgaaccactatggaacaacttaaattttgtgccataaaaatatttttgtggtaaggtactatttttttagctctagggatatatcagcaaaaacacatcatgcaatttgagacacataattttgtgttgaatgagcacaacataatttgaagcattgcaaggagataaccagacagcagaattaaatggtcctgtctttttcatttttaatttattgtcatacatgggtttcatatttataacggcatcatgagctcattgcacttaatacctgcaatgtttgctactgtaccacaattgattttcaatactttattacgaaggatgaaactgtaatgttttattaacaatgcttctggaaatgaatgcattttaaagcaaataaatctttttgatagaccttttacaaaatccatttgcactaatgaatgctttcttatggcatataacttaatatttgttactgtgtacactgctgttttggaatgttcagaaataaagact

SEQ ID NO: 302998 - DNA, 2176 bp, Homo sapiens
agcggcgtggtgctcttttccccagtgttttcggagggatgacgggggatggtaggggttggcctctgtctgcgactgttactgttctttcgttttaaacgaacgctggacaggatttgcgtgctcttcctcctcgggtggcatcggaagccgcgcagtgatggatctctctttatagagaggttcgttcttgctgtttgaattttgcagtcgtgtgcccttttgcgttgcattttcattgaaatcttattttcagagactgacttgctttttaaaatggggtgacctcactggctttcccatgaatagtgccaataaagaggacttttcttggagtggaatgaacaggttatacattggctcttcaaagacgttcacctcatcagagaaatccctgactcctttgcagtggtgtagacatgtcctagataacccaactcctgagatggaagcagcgagacgttccctgtgctttagactggagcaagtatacattggctcttcaaagacgttcacctcatcagagaaatccctgactcctttgcagtggtgtagacatgtcctagataacccaactcctgagatggaagcagcgagacgttccctgtgctttagactggagcaaggttacacttccaggggctccccactcagtccccagtcatctatcgacagtgagctgagtacttcagaattggaggatgattctatctccatgggatataaattacaggacctcactgatgttcagatcatggctcgtctgcaagaagaaagtctcaggcaagattatgcttctacttcagcatctgtatcaagacatagttccagtgtgtcattgagttcaggaaaaaaagggacatgtagtgatcaagaatatgaccaatacagtctggaggatgaagaggaatttgatcatttgccaccacctcagcctcgtcttccaagatgttcccctttccaaagaggaattccccattcacagactttctccagcattcgggagtgtaggaggagccccagttcccagtattttccttcaaataattacaagctgcagcttctgggataatgggtcgcagtgcactcccaagaccttcgttggcaataaatgggagtaacctgcctcgaagcaaaattgcacaacctgttagaagttttcttcagcctccaaagcctctgtcttcactcagcactctgagggatggaaattggagagatggttgctactaatgcagttttatgtacccttgaaaaatgggaaagaagtactttcccttttgtgttttaatatatttactgcattgtttctcaatggaccagtcaccagagactaattattgcacttaaatatttgcctgagatactgcaacattctcaaacccatggttgcagtattgtgacacttagatctaggaagtttttgtagaactgctctgtacctgaatactttttgagagaattaagatgtatcaataatgctttgccatatgagttttttaaagtaacttgttcaatttactcacgtgttctaaacatctttccattacatgttctgtattttaatacattgcatattgacaactaggttctataatgtatgctttgaaatttacttttttatagtttacaggaattttattttttgtgcctatttctttttacacctatgtgaaccactatggaacaacttaaattttgtgccataaaaatatttttgtggtaaggtactatttttttagctctagggatatatcagcaaaaacacatcatgcaatttgagacacataattttgtgttgaatgagcacaacataatttgaagcattgcaaggagataaccagacagcagaattaaatggtcctgtctttttcatttttaatttattgtcatacatgggtttcatatttataacggcatcatgagctcattgcacttaatacctgcaatgtttgctactgtaccacaattgattttcaatactttattacgaaggatgaaactgtaatgttttattaacaatgcttctggaaatgaatgcattttaaagcaaataaatctttttgatagaccttttacaaaatccatttgcactaatgaatgctttcttatggcatataacttaatatttgttactgtgtacactgctgttttggaatgttcagaaataaagact

SEQ ID NO: 302999 - DNA, 1161 bp, Homo sapiens
agcggcgtggtgctcttttccccagtgttttcggagggatgacgggggatggtaggggttggcctctgtctgcgactgttactgttctttcgttttaaacgaacgctggacaggatttgcgtgctcttcctcctcgggtggcatcggaagccgcgcagtgatggatctctctttatagagaggttcgttcttgctgtttgaattttgcagtcgtgtgcccttttgcgttgcattttcattgaaatcttattttcagagactgacttgctttttaaaatggggtgacctcactggctttcccatgaatagtgccaataaagaggacttttcttggagtggaatgaacaggttatacattggctcttcaaagacgttcacctcatcagagaaatccctgactcctttgcagtggtgtagacatgtcctagataacccaactcctgagatggaagcagcgagacgttccctgtgctttagactggagcaagtatacattggctcttcaaagacgttcacctcatcagagaaatccctgactcctttgcagtggtgtagacatgtcctagataacccaactcctgagatggaagcagcgagacgttccctgtgctttagactggagcaaggttacacttccaggggctccccactcagtccccagtcatctatcgacagtgagctgagtacttcagaattggaggatgattctatctccatgggatataaattacaggacctcactgatgttcagatcatggctcgtctgcaagaagaaagtctcaggcaagattatgcttctacttcagcatctgtatcaagacatagttccagtgtgtcattgagttcaggaaaaaaagggacatgtagtgatcaagaatatgaccaatacagtctggaggatgaagaggaatttgatcatttgccaccacctcagcctcgtcttccaagatgttcccctttccaaagaggaattccccattcacagactttctccagcattcgggagtgtaggaggagccccagttcccagtattttccttcaaataattaccagcagcaacagtattattcacctcaagcccaaactccagatcagcaaccaaataggaccaatggagataagctccgaagaagatttcttcagcctccaaagcctctgtc

SEQ ID NO: 303000 - DNA, 483 bp, Homo sapiens
gcataacatctgtcatttttaacttagtaaaattcttttccagataagctccgaagaagtatgcctaacctagcccggatgccaagtacaactgccattagtagcaacattagttctccggtcaccgtgcgaaatagtcagagttttgactcaagcttgcatggagctggaaatggaatttcaagaatacaatcttgtagtgagtataattatttgatataattatatattgtataattgtataattttttataatttttaattgtaaggaaaatgtctgttttatttctttgtatttacttgaaagaacactaaacttttttccttgccgtgtaacttatttttttatttcaccattagagttgaatagtatttttactattcaaatagtatatttactattcaacttaccagtgcctgtggtataaattacttaccagtgcctgtggtatcaattaataatagtaaattgttatttgtata

SEQ ID NO: 303001 - DNA, 9421 bp, Homo sapiens
cttattttttatgaatgtcggatagctgcaccagcttggtggggaaagggtttgatgaatagcacaaagacactggctgttccctggaggctgtccctttaaaggagaatcttagtttattctggggggaggggatgcacacattagagtaggaaagagggcttggaataaaatgaaaacactcccccttcatagtcattgtactgaaatgcaaagactgcttcctaagctggagatgctaaccttgggtagctccttctgttctcttcaaggggaattttgtcaggctatggattcatttacaactgttagtcatgtgggcatgtgtgaggaaacagatgccagttttaatgtatttagcccgaagttccaatttgataggagccactgtcagtctctgaggttccaccaaaatatggaacttgattttggacactttgacgaaagagataagacatccaggaacatgcgaggctcccggatgaatgggttgcctagccccactcacagcgcccactgtagcttctaccgaaccagaaccttgcaggcactgagtaatgagaagaaagccaagaaggtacgtttctaccgcaatggggaccgctacttcaaggggattgtgtacgctgtgtcctctgaccgttttcgcagctttgacgccttgctggctgacctgacgcgatctctgtctgacaacatcaacctgcctcagggagtgcgttacatttacaccattgatggatccaggaagatcggaagcatggatgaactggaggaaggggaaagctatgtctgttcctcagacaacttctttaaaaaggtggagtacaccaagaatgtcaatcccaactggtctgtcaacgtaaaaacatctgccaatatgaaagccccccagtccttggctagcagcaacagtgcacaggccagggagaacaaggactttgtgcgccccaagctggttaccatcatccgcagtggggtgaagcctcggaaggctgtgcgtgtgcttctgaacaagaagacagcccactcttttgagcaagtcctcactgatatcacagaagccatcaaactggagaccggggttgtcaaaaaactctacactctggatggaaaacaggtaacttgtctccatgatttctttggtgatgatgatgtgtttattgcctgtggtcctgaaaaatttcgctatgctcaggatgatttttctctggatgaaaatgaatgccgagtcatgaagggaaacccatcagccacagctggcccaaaggcatccccaacacctcagaagacttcagccaagagccctggtcctatgcgccgaagcaagtctccagctgactcagcaaacggaacctccagcagccagctctctacccccaagtctaagcagtctcccatctctacgcccaccagtcctggcagcctccggaagcacaaggacctgtacctgcctctgtccttggatgactcggactcgcttggtgattccatgtaaaggaggggagagtgctcagagtccagagtacaaatccaagcctatcattgtagtagggtacttctgctcaagtgtccaacagggctattggtgctttcaagtttttattttgttgttgttgttattttgaaaaacacattgtaatatgttgggtttattttcctgtgatttctcctctgggccactgatccacagttaccaattatgagagatagattgataaccatcctttggggcagcattccagggatgcaaaatgtgctagtccatgacctttcaatggaaagcttaggtgcctgcgttatatttgccctgtctaattttgcccatacagtcttccttctgtagagggctgtttacatatacagcacttaaaatgtttgtgtggggaaaaaaaaaactcattggcagatccaagaatgacaaacacaagtgccccttttctctggatctcaagaatggtggaggaccctggaaggacagcaaggcagctccccagcctcactcttcactcctgattgaggcccgggtttgttgtccagcaccaattctggctgtcaatggggagaaataaaccaacaacttataattgtgacaccagatgcttaggatcctggtgctgggttagctaagagaatagacagaattggaaaatactgcagacatttccgaagagtttataaagcacagtgaattcctggtcaatctctccactgaggcaatttggaatcaataagcaattgataatagtttggagtaagggacttcatatacctgattcctctagaaggctgtctaacataccacatgattacatgaactgtatggtatccatctatctctgttctattgaatgccttgttaacagccaacactgaaaacactgtgagaatttgttttcaggtctgacacctttcagtctctttttatagcaagaaatcaatatcctttttataaaaattcatgtctgtatttcaggagcaaactcttcaggctccttttttataaactggtgatttttcttttgtctaaaaaacacatgaagaaaatttaccaaaaaaaaaaaaaaagccgaagaataatgttatttagaaattatgctgtcactgccaaacagtaacctccaggagaaaacaagatgaatagcagaggccaattcaatagaatcagttttttgatagctttttaacagttatgcttgcattaataatttcaatgtggaccagacattctaattatattttaaatgaaatgttacagcatattttaagcaactctttttatctataatcctaatatttcatactgaagacacagaaatctttcacttgtctttaacattagaaaggatttctctttactaaggactgatcatttgaaatagttttcagtcttttgagatacaggtttataacactgctttttttttcctgtaaacatagcccataatggcaaaaacaactaattttaattgaaggtcttgcttgccaatcctgtgttggcttttaccaaatataaaaattcccttattccttggtaatggtgcaaatatttggaaaggcacagcatccaaaccaagctgctgtttggctactgaatggcttgcagttgttcctccactctaaatggaatgagcttgctgtgtgtgtgtgtggtggtggtgggagggggtggtgcatgtgtgtgtgtgtgtgtgcatctgcagctgcttcaaaattaagaaatactacaagacacccctgtaatggattggtggcaactgggtggcactgctgatgtgcactgtgtaggggggaacccagtggtggtggggtatctcaaatgcccctagacaagcttcagatgtctgtagctaccaaaaacattttcggttcaagaaaagtgagatgatggtagtactggtttctggtgaaattgaaaaaccccaaatgatgaggatctctttttgccccctctcctttttttgtaaacccattcaaaaccattaataagcccattttactaagcccctatttctttctagaagctcagggttttcttagtgcctcccagaacattttgtagttaattgggaaaaagtgatacttggattagggggtgtgggcataaagaatggtgggaggcctgattttaaaattcaggccagaacccccaatgactccacccatagtctcactttaggtctcatttagtccatcacctttattttaagttgaggaagtggaggctggtaaagagcaggaccagaggaagaatccagatttccttatgcttgggcctcacactagctctctgagtatttccttgattgcggtatatgtactactagaaaataccaaatggatatattttctttaggataacctttgaaccaacaatcttcaataacaatagtacatcttccatcttacttttaatcgagtataaggaaatgtttctttatggccattttggagggagcaggggatgaggcttggcatagtccaaaatttaagtctccaataattaattgcattttaaattgttttaaattggcccactttcaaggcaattttttttgtgtgtctgtaactgagctcctccacccctgtcattcacttccaattttacccaatccaattttagcactcaagttccattgtgttaatttttgcacggtctacacacatcaagtcagcaagcatttgccaccactccctatacttctccctcttttttacacacacacacacacacacacacacaatccatctcttgcttgttcctacctccctgatttttcttccctacagaaatagaaatagggacaaagaaggggaaaatgtatatattggggctgggctgaacaactaacttcataagtagtattaactaggggtaaattgagagaaaagctccttttctcttcactgttttggaaaggatagccattagcatgactgctttgtgtccttatggactttagtattagcctagattgaattatagcgtttttctagctggaaggaaccttaagatcacatcatctactcctctactccaaatttctcattcttcaggccaggaaaccgagacacagaggtaaagtaatttccccaaggtcacacagctggctggggcaggattgggtttacaacccacatctcctggctcttattccagggccttttcccactaagtagtattgccttccattaggctcctgagagttatttctcagggtcatgttgcatcttggagccacatgctgctgccctgatctcagtgggaaatccacccagcaacctaatacagccccttttccctgcattcacctggttcccatccacatgggttgcagatgtccttgaagagagtgaggcattgagggccaataggagcaatggggtccctggccttgtccatctgattcaggagatcactgctccatcgtgaggagccctctgaatagccccccactgaatgcttgccttgcccaaatggaatggaggaagattgattttctccatcagttcaccttgtgtcatctcataatggttggtctttccaggctgagggaaatgtttcttgtttccagagtagaaaaaagaaagagtggaacaatagctttgttcatcctaactttctgagatggcttttcaacatttaaaaaaaactagtgtggtaccattcactggcatgatttcttttagaatatgggagtaagatgaggtagagaaaataacctggtctcactgtggttgccctcatccacaatgtccccaaagccatcctgctctgatgaggacaatttccaggtataagcaaggggctttgtgacaaaaatgtaccctggctgatgttaaacattggctcctgtgtttgcaccaaaatagcaagctgtgtgctctatacactcttcccatcgtcttgtgtacactgctcctgtggccttccacagcagaaaccagggcaaaagggtccaaacacatggttttccttgctgcaaggctcttcctgggaactaagggggtatttattagttcagttctaagagacctccttctgggcttaccccactcctcaggtacttctctctccttcctccttctcctccacagtcacaagtaaccaaggaacctgaaagtggatgtgtagctatttgaagaaggcaaggaaccctgagattcttctttgaatcctttagtccaagtcttagaccagtgattggtgcttaccttgaacaaaattttgtctgtgttcctaatcccttcaatactctgggtacaatgctcccaatcaccctgcacatttgattctaaatggcttttattttttaaaaatccatatccctaggacaagagaacaggatgcctatatccccaaaatgagctccaggacactgatgggaatgatcccaaagatcaccccacctcagaaaacgtctgtgccaagagacttccccagatagaaacactgggacagtggtttgaacgacttcttttatggttgtccagtttgctatggaaataaaaggcattgattttttaaaaaagatgattggaacctgtctttggccacatagggccacttggatccatttccaggccttactcatatattgccttcactgaagggctttggctttaagtcccagactggtctcccaagtgaaccataagtgttttggagctcatctggggtgaggcatgagaatgttgccccatctatcccttcaggaaaaggtgccttccctccctttctcctaaagcctggtccccaaaaattgtttttgtctccaaaagtctagtatggtctttatacacccagactcttagtgttgcgtcctgccttgtttccttgttaaggatctatgcagacctcccgctttggcttagctagcgtgacattggctatcatttgacaagactaactttttttttttttttttttgactgagtctccctctgtcacctaggctggagtgcagtggcacaatcttggctcgctgcaaccttcacccttcacctcccaggtcgaagcgattctcctgcctcagtctcccgagtagctgggattacaggcgtgcgccaccaaatctggctatttttttattattattatttttagtagagatggggtttcaccatgttggccagactggtcttgaactcttggcctcaaattatctgcccacctcggcctcccaaagtgctgggattacaggcatgagcaccatgcccagctgacaagactaattttttatcccttggtttattggcttcaacatcttctggaatcagaggtgattttttcttaccttggatgcctgagactaggggagtatagaattccaattggtaattaaggcatctttctgctcctgatcagaagggcaggttagttgggagaggtcagatggcacaacagaagtcaccttgtaagtaaggcaaagactttgaaggcattagcgtttctcattacttaggtcaataaccttgagggaatcaatggcttttttgccgctctacctctttgtgtatctctttgacttttctttctctgtctagtttcctctgttctcagtttatattctatgttatcagtctctctttccacagtacaaacatccatcctttctcctgtgcaattctgtctctccctcttattatctttatttgtactttttccttcctccctgtctaggcattgggcatgtgcctcttcttagcctgtgattttgccttgggactgatgataaattatttccagattcaatcagccctggtcctaccccagtccaatcagaagtatgttggtgggaatcaacctgatcctggccctttcttcttctccattttcattcgtaatccccctcagcagatctttacaagcagtttccttatagctcatgtatctttaggtctttgccttccaagcactgtacagaatactttgtggttcctttttagtctgacattttgtggagcagtgaagcgtgctcagagacataatcagctgaagagaaaaaatccacccatggatttatatcagctaaatactaataattgattttgtttgatgtgcccataatttttaaagctgcaatataatataatgagggaccacaggtaatttctcctgtcatttgttttggctggatgggggtgggggagtaattgcttaaagttttaccattacacattaaactctctataataatcttgtttggggcttgctaactgttgagctgttttaactaaactggtaggcaatcggagttgatttaaatgaaaagataatttaacaaatctatactataaaaagagacatttgcttaattgacatgtattttttccttctgagtcacctaaacatttactcttgacaccaactgttcatgatactgaatagacagtccatataagagaaattagtggacctaaagaagccagattgtaggtgttaatttattaaacagagtgcaaagcccttggaaatgtcactgcttggcaataccatatggaatgccaaaatttacaatgacttttctttataagttatccaaaagggatttgaacaagtaagaggttatgccaaaatgtctccaatgtatggtcctgtaatatattgcagcttgaagccaatgatcccttatgacttgtatacaactaatgcatgttttattgaattttgcatttcccacgtgtggtaagttctttaaaatgtttttgatcacctttttgtgccattaaacttgtacagaaaatgtttttatggccattttcaaagggagaaagtttaaaatggaaacagcccaccctttctgccctatagctgtagttagaattgagtacctgtagcaaaacagctgtaattggtggttgtagtgttagaggtgttagcttgctagtgactagctttggagagtaaatgcatggtattgtacatcacatttcttaactcgttttaacctctgaaaagaatatattcttctttgtagtccttcttcccacccccttgccctctccctctccctgctcccagttgtcttacagttgtaaatatctgatttgaggcccaataactcttgccaagtaaagtcagcaaacaacaaacaaaccaaaatgtggggaaaaggcatttctcaaccatctctcagcagttattgatcatttcttaaggaacagcattgtgatcaaagactcaactttacgtaaaaatcagtggtaaattggggttgtatttggccatttgattacatttcaggattgaatagttttcagaatcacatgtaatccaaagacagtaggtagtgatgtcccttatccctgcagctgttttaagatagagacctcagaagactctgcttgaccgatgaccaataattatttgaaaaaaaaagaaaaaatgagagaaataaaacagatatttaagaactttagccacctatttagaatagttatagccagaaaaaaaaacaagggcatgagttcaaatgcattactatcagtgtcctaggcaatacctaacctactctgaaattgtgattcaaaagcagtatttcaagaggcattctccttttttggtttgctgaccccacttggactggtaggtttggtgaggcccccataaaccagctggagcagacccttttcatctcctgtgcctgtaacacccctcttcccccaccccctccgcaattcaatgagggctttcttgggtcagaggacttcaaggttgtctagagaagtttgccatgtgtgtaaggtgctgtgaactgtgagtgctgaagattcgcagcattcaataccaggcagccaaagagctgctcttgcaattattttggctctcaagctctgttcttcatcgcattctcatttctgtgtacatttgcaagatgtgtgtaatgtcattttccaaaaataaaatttgatttcaata

SEQ ID NO: 303002 - DNA, 9080 bp, Homo sapiens
gagagattggttttctttctctcagcatctccacccaaccagcagaaaaccggtctctgaggttccaccaaaatatggaacttgattttggacactttgacgaaagagataagacatccaggaacatgcgaggctcccggatgaatgggttgcctagccccactcacagcgcccactgtagcttctaccgaaccagaaccttgcaggcactgagtaatgagaagaaagccaagaaggtacgtttctaccgcaatggggaccgctacttcaaggggattgtgtacgctgtgtcctctgaccgttttcgcagctttgacgccttgctggctgacctgacgcgatctctgtctgacaacatcaacctgcctcagggagtgcgttacatttacaccattgatggatccaggaagatcggaagcatggatgaactggaggaaggggaaagctatgtctgttcctcagacaacttctttaaaaaggtggagtacaccaagaatgtcaatcccaactggtctgtcaacgtaaaaacatctgccaatatgaaagccccccagtccttggctagcagcaacagtgcacaggccagggagaacaaggactttgtgcgccccaagctggttaccatcatccgcagtggggtgaagcctcggaaggctgtgcgtgtgcttctgaacaagaagacagcccactcttttgagcaagtcctcactgatatcacagaagccatcaaactggagaccggggttgtcaaaaaactctacactctggatggaaaacaggtaacttgtctccatgatttctttggtgatgatgatgtgtttattgcctgtggtcctgaaaaatttcgctatgctcaggatgatttttctctggatgaaaatgaatgccgagtcatgaagggaaacccatcagccacagctggcccaaaggcatccccaacacctcagaagacttcagccaagagccctggtcctatgcgccgaagcaagtctccagctgactcagcaaacggaacctccagcagccagctctctacccccaagtctaagcagtctcccatctctacgcccaccagtcctggcagcctccggaagcacaaggacctgtacctgcctctgtccttggatgactcggactcgcttggtgattccatgtaaaggaggggagagtgctcagagtccagagtacaaatccaagcctatcattgtagtagggtacttctgctcaagtgtccaacagggctattggtgctttcaagtttttattttgttgttgttgttattttgaaaaacacattgtaatatgttgggtttattttcctgtgatttctcctctgggccactgatccacagttaccaattatgagagatagattgataaccatcctttggggcagcattccagggatgcaaaatgtgctagtccatgacctttcaatggaaagcttaggtgcctgcgttatatttgccctgtctaattttgcccatacagtcttccttctgtagagggctgtttacatatacagcacttaaaatgtttgtgtggggaaaaaaaaaactcattggcagatccaagaatgacaaacacaagtgccccttttctctggatctcaagaatggtggaggaccctggaaggacagcaaggcagctccccagcctcactcttcactcctgattgaggcccgggtttgttgtccagcaccaattctggctgtcaatggggagaaataaaccaacaacttataattgtgacaccagatgcttaggatcctggtgctgggttagctaagagaatagacagaattggaaaatactgcagacatttccgaagagtttataaagcacagtgaattcctggtcaatctctccactgaggcaatttggaatcaataagcaattgataatagtttggagtaagggacttcatatacctgattcctctagaaggctgtctaacataccacatgattacatgaactgtatggtatccatctatctctgttctattgaatgccttgttaacagccaacactgaaaacactgtgagaatttgttttcaggtctgacacctttcagtctctttttatagcaagaaatcaatatcctttttataaaaattcatgtctgtatttcaggagcaaactcttcaggctccttttttataaactggtgatttttcttttgtctaaaaaacacatgaagaaaatttaccaaaaaaaaaaaaaaagccgaagaataatgttatttagaaattatgctgtcactgccaaacagtaacctccaggagaaaacaagatgaatagcagaggccaattcaatagaatcagttttttgatagctttttaacagttatgcttgcattaataatttcaatgtggaccagacattctaattatattttaaatgaaatgttacagcatattttaagcaactctttttatctataatcctaatatttcatactgaagacacagaaatctttcacttgtctttaacattagaaaggatttctctttactaaggactgatcatttgaaatagttttcagtcttttgagatacaggtttataacactgctttttttttcctgtaaacatagcccataatggcaaaaacaactaattttaattgaaggtcttgcttgccaatcctgtgttggcttttaccaaatataaaaattcccttattccttggtaatggtgcaaatatttggaaaggcacagcatccaaaccaagctgctgtttggctactgaatggcttgcagttgttcctccactctaaatggaatgagcttgctgtgtgtgtgtgtggtggtggtgggagggggtggtgcatgtgtgtgtgtgtgtgtgcatctgcagctgcttcaaaattaagaaatactacaagacacccctgtaatggattggtggcaactgggtggcactgctgatgtgcactgtgtaggggggaacccagtggtggtggggtatctcaaatgcccctagacaagcttcagatgtctgtagctaccaaaaacattttcggttcaagaaaagtgagatgatggtagtactggtttctggtgaaattgaaaaaccccaaatgatgaggatctctttttgccccctctcctttttttgtaaacccattcaaaaccattaataagcccattttactaagcccctatttctttctagaagctcagggttttcttagtgcctcccagaacattttgtagttaattgggaaaaagtgatacttggattagggggtgtgggcataaagaatggtgggaggcctgattttaaaattcaggccagaacccccaatgactccacccatagtctcactttaggtctcatttagtccatcacctttattttaagttgaggaagtggaggctggtaaagagcaggaccagaggaagaatccagatttccttatgcttgggcctcacactagctctctgagtatttccttgattgcggtatatgtactactagaaaataccaaatggatatattttctttaggataacctttgaaccaacaatcttcaataacaatagtacatcttccatcttacttttaatcgagtataaggaaatgtttctttatggccattttggagggagcaggggatgaggcttggcatagtccaaaatttaagtctccaataattaattgcattttaaattgttttaaattggcccactttcaaggcaattttttttgtgtgtctgtaactgagctcctccacccctgtcattcacttccaattttacccaatccaattttagcactcaagttccattgtgttaatttttgcacggtctacacacatcaagtcagcaagcatttgccaccactccctatacttctccctcttttttacacacacacacacacacacacacacaatccatctcttgcttgttcctacctccctgatttttcttccctacagaaatagaaatagggacaaagaaggggaaaatgtatatattggggctgggctgaacaactaacttcataagtagtattaactaggggtaaattgagagaaaagctccttttctcttcactgttttggaaaggatagccattagcatgactgctttgtgtccttatggactttagtattagcctagattgaattatagcgtttttctagctggaaggaaccttaagatcacatcatctactcctctactccaaatttctcattcttcaggccaggaaaccgagacacagaggtaaagtaatttccccaaggtcacacagctggctggggcaggattgggtttacaacccacatctcctggctcttattccagggccttttcccactaagtagtattgccttccattaggctcctgagagttatttctcagggtcatgttgcatcttggagccacatgctgctgccctgatctcagtgggaaatccacccagcaacctaatacagccccttttccctgcattcacctggttcccatccacatgggttgcagatgtccttgaagagagtgaggcattgagggccaataggagcaatggggtccctggccttgtccatctgattcaggagatcactgctccatcgtgaggagccctctgaatagccccccactgaatgcttgccttgcccaaatggaatggaggaagattgattttctccatcagttcaccttgtgtcatctcataatggttggtctttccaggctgagggaaatgtttcttgtttccagagtagaaaaaagaaagagtggaacaatagctttgttcatcctaactttctgagatggcttttcaacatttaaaaaaaactagtgtggtaccattcactggcatgatttcttttagaatatgggagtaagatgaggtagagaaaataacctggtctcactgtggttgccctcatccacaatgtccccaaagccatcctgctctgatgaggacaatttccaggtataagcaaggggctttgtgacaaaaatgtaccctggctgatgttaaacattggctcctgtgtttgcaccaaaatagcaagctgtgtgctctatacactcttcccatcgtcttgtgtacactgctcctgtggccttccacagcagaaaccagggcaaaagggtccaaacacatggttttccttgctgcaaggctcttcctgggaactaagggggtatttattagttcagttctaagagacctccttctgggcttaccccactcctcaggtacttctctctccttcctccttctcctccacagtcacaagtaaccaaggaacctgaaagtggatgtgtagctatttgaagaaggcaaggaaccctgagattcttctttgaatcctttagtccaagtcttagaccagtgattggtgcttaccttgaacaaaattttgtctgtgttcctaatcccttcaatactctgggtacaatgctcccaatcaccctgcacatttgattctaaatggcttttattttttaaaaatccatatccctaggacaagagaacaggatgcctatatccccaaaatgagctccaggacactgatgggaatgatcccaaagatcaccccacctcagaaaacgtctgtgccaagagacttccccagatagaaacactgggacagtggtttgaacgacttcttttatggttgtccagtttgctatggaaataaaaggcattgattttttaaaaaagatgattggaacctgtctttggccacatagggccacttggatccatttccaggccttactcatatattgccttcactgaagggctttggctttaagtcccagactggtctcccaagtgaaccataagtgttttggagctcatctggggtgaggcatgagaatgttgccccatctatcccttcaggaaaaggtgccttccctccctttctcctaaagcctggtccccaaaaattgtttttgtctccaaaagtctagtatggtctttatacacccagactcttagtgttgcgtcctgccttgtttccttgttaaggatctatgcagacctcccgctttggcttagctagcgtgacattggctatcatttgacaagactaactttttttttttttttttttgactgagtctccctctgtcacctaggctggagtgcagtggcacaatcttggctcgctgcaaccttcacccttcacctcccaggtcgaagcgattctcctgcctcagtctcccgagtagctgggattacaggcgtgcgccaccaaatctggctatttttttattattattatttttagtagagatggggtttcaccatgttggccagactggtcttgaactcttggcctcaaattatctgcccacctcggcctcccaaagtgctgggattacaggcatgagcaccatgcccagctgacaagactaattttttatcccttggtttattggcttcaacatcttctggaatcagaggtgattttttcttaccttggatgcctgagactaggggagtatagaattccaattggtaattaaggcatctttctgctcctgatcagaagggcaggttagttgggagaggtcagatggcacaacagaagtcaccttgtaagtaaggcaaagactttgaaggcattagcgtttctcattacttaggtcaataaccttgagggaatcaatggcttttttgccgctctacctctttgtgtatctctttgacttttctttctctgtctagtttcctctgttctcagtttatattctatgttatcagtctctctttccacagtacaaacatccatcctttctcctgtgcaattctgtctctccctcttattatctttatttgtactttttccttcctccctgtctaggcattgggcatgtgcctcttcttagcctgtgattttgccttgggactgatgataaattatttccagattcaatcagccctggtcctaccccagtccaatcagaagtatgttggtgggaatcaacctgatcctggccctttcttcttctccattttcattcgtaatccccctcagcagatctttacaagcagtttccttatagctcatgtatctttaggtctttgccttccaagcactgtacagaatactttgtggttcctttttagtctgacattttgtggagcagtgaagcgtgctcagagacataatcagctgaagagaaaaaatccacccatggatttatatcagctaaatactaataattgattttgtttgatgtgcccataatttttaaagctgcaatataatataatgagggaccacaggtaatttctcctgtcatttgttttggctggatgggggtgggggagtaattgcttaaagttttaccattacacattaaactctctataataatcttgtttggggcttgctaactgttgagctgttttaactaaactggtaggcaatcggagttgatttaaatgaaaagataatttaacaaatctatactataaaaagagacatttgcttaattgacatgtattttttccttctgagtcacctaaacatttactcttgacaccaactgttcatgatactgaatagacagtccatataagagaaattagtggacctaaagaagccagattgtaggtgttaatttattaaacagagtgcaaagcccttggaaatgtcactgcttggcaataccatatggaatgccaaaatttacaatgacttttctttataagttatccaaaagggatttgaacaagtaagaggttatgccaaaatgtctccaatgtatggtcctgtaatatattgcagcttgaagccaatgatcccttatgacttgtatacaactaatgcatgttttattgaattttgcatttcccacgtgtggtaagttctttaaaatgtttttgatcacctttttgtgccattaaacttgtacagaaaatgtttttatggccattttcaaagggagaaagtttaaaatggaaacagcccaccctttctgccctatagctgtagttagaattgagtacctgtagcaaaacagctgtaattggtggttgtagtgttagaggtgttagcttgctagtgactagctttggagagtaaatgcatggtattgtacatcacatttcttaactcgttttaacctctgaaaagaatatattcttctttgtagtccttcttcccacccccttgccctctccctctccctgctcccagttgtcttacagttgtaaatatctgatttgaggcccaataactcttgccaagtaaagtcagcaaacaacaaacaaaccaaaatgtggggaaaaggcatttctcaaccatctctcagcagttattgatcatttcttaaggaacagcattgtgatcaaagactcaactttacgtaaaaatcagtggtaaattggggttgtatttggccatttgattacatttcaggattgaatagttttcagaatcacatgtaatccaaagacagtaggtagtgatgtcccttatccctgcagctgttttaagatagagacctcagaagactctgcttgaccgatgaccaataattatttgaaaaaaaaagaaaaaatgagagaaataaaacagatatttaagaactttagccacctatttagaatagttatagccagaaaaaaaaacaagggcatgagttcaaatgcattactatcagtgtcctaggcaatacctaacctactctgaaattgtgattcaaaagcagtatttcaagaggcattctccttttttggtttgctgaccccacttggactggtaggtttggtgaggcccccataaaccagctggagcagacccttttcatctcctgtgcctgtaacacccctcttcccccaccccctccgcaattcaatgagggctttcttgggtcagaggacttcaaggttgtctagagaagtttgccatgtgtgtaaggtgctgtgaactgtgagtgctgaagattcgcagcattcaataccaggcagccaaagagctgctcttgcaattattttggctctcaagctctgttcttcatcgcattctcatttctgtgtacatttgcaagatgtgtgtaatgtcattttccaaaaataaaatttgatttcaata

SEQ ID NO: 303003 - DNA, 9328 bp, Homo sapiens
gagagattggttttctttctctcagcatctccacccaaccagcagaaaaccggtctctgaggttccaccaaaatatggaacttgattttggacactttgacgaaagagataagacatccaggaacatgcgaggctcccggatgaatgggttgcctagccccactcacagcgcccactgtagcttctaccgaaccagaaccttgcaggcactgagtaatgagaagaaagccaagaaggtacgtttctaccgcaatggggaccgctacttcaaggggattgtgtacgctgtgtcctctgaccgttttcgcagctttgacgccttgctggctgacctgacgcgatctctgtctgacaacatcaacctgcctcagggagtgcgttacatttacaccattgatggatccaggaagatcggaagcatggatgaactggaggaaggggaaagctatgtctgttcctcagacaacttctttaaaaaggtggagtacaccaagaatgtcaatcccaactggtctgtcaacgtaaaaacatctgccaatatgaaagccccccagtccttggctagcagcaacagtgcacaggccagggagaacaaggactttgtgcgccccaagctggttaccatcatccgcagtggggtgaagcctcggaaggctgtgcgtgtgcttctgaacaagaagacagcccactcttttgagcaagtcctcactgatatcacagaagccatcaaactggagaccggggttgtcaaaaaactctacactctggatggaaaacaggtaacttgtctccatgatttctttggtgatgatgatgtgtttattgcctgtggtcctgaaaaatttcgctatgctcaggatgatttttctctggatgaaaatgaatgccgagtcatgaagggaaacccatcagccacagctggcccaaaggcatccccaacacctcagaagacttcagccaagagccctggtcctatgcgccgaagcaagtctccagctgactcagcaaacggaacctccagcagccagctctctacccccaagtctaagcagtctcccatctctacgcccaccagtcctggcagcctccggaagcacaaggacctgtacctgcctctgtccttggatgactcggactcgcttggtgattccatgtaaaggaggggagagtgctcagagtccagagtacaaatccaagcctatcattgtagtagggtacttctgctcaagtgtccaacagggctattggtgctttcaagtttttattttgttgttgttgttattttgaaaaacacattgtaatatgttgggtttattttcctgtgatttctcctctgggccactgatccacagttaccaattatgagagatagattgataaccatcctttggggcagcattccagggatgcaaaatgtgctagtccatgacctttcaatggaaagcttaggtgcctgcgttatatttgccctgtctaattttgcccatacagtcttccttctgtagagggctgtttacatatacagcacttaaaatgtttgtgtggggaaaaaaaaaactcattggcagatccaagaatgacaaacacaagtgccccttttctctggatctcaagaatggtggaggaccctggaaggacagcaaggcagctccccagcctcactcttcactcctgattgaggcccgggtttgttgtccagcaccaattctggctgtcaatggggagaaataaaccaacaacttataattgtgacaccagatgcttaggatcctggtgctgggttagctaagagaatagacagaattggaaaatactgcagacatttccgaagagtttataaagcacagtgaattcctggtcaatctctccactgaggcaatttggaatcaataagcaattgataatagtttggagtaagggacttcatatacctgattcctctagaaggctgtctaacataccacatgattacatgaactgtatggtatccatctatctctgttctattgaatgccttgttaacagccaacactgaaaacactgtgagaatttgttttcaggtctgacacctttcagtctctttttatagcaagaaatcaatatcctttttataaaaattcatgtctgtatttcaggagcaaactcttcaggctccttttttataaactggtgatttttcttttgtctaaaaaacacatgaagaaaatttaccaaaaaaaaaaaaaaagccgaagaataatgttatttagaaattatgctgtcactgccaaacagtaacctccaggagaaaacaagatgaatagcagaggccaattcaatagaatcagttttttgatagctttttaacagttatgcttgcattaataatttcaatgtggaccagacattctaattatattttaaatgaaatgttacagcatattttaagcaactctttttatctataatcctaatatttcatactgaagacacagaaatctttcacttgtctttaacattagaaaggatttctctttactaaggactgatcatttgaaatagttttcagtcttttgagatacaggtttataacactgctttttttttcctgtaaacatagcccataatggcaaaaacaactaattttaattgaaggtcttgcttgccaatcctgtgttggcttttaccaaatataaaaattcccttattccttggtaatggtgcaaatatttggaaaggcacagcatccaaaccaagctgctgtttggctactgaatggcttgcagttgttcctccactctaaatggaatgagcttgctgtgtgtgtgtgtggtggtggtgggagggggtggtgcatgtgtgtgtgtgtgtgtgcatctgcagctgcttcaaaattaagaaatactacaagacacccctgtaatggattggtggcaactgggtggcactgctgatgtgcactgtgtaggggggaacccagtggtggtggggtatctcaaatgcccctagacaagcttcagatgtctgtagctaccaaaaacattttcggttcaagaaaagtgagatgatggtagtactggtttctggtgaaattgaaaaaccccaaatgatgaggatctctttttgccccctctcctttttttgtaaacccattcaaaaccattaataagcccattttactaagcccctatttctttctagaagctcagggttttcttagtgcctcccagaacattttgtagttaattgggaaaaagtgatacttggattagggggtgtgggcataaagaatggtgggaggcctgattttaaaattcaggccagaacccccaatgactccacccatagtctcactttaggtctcatttagtccatcacctttattttaagttgaggaagtggaggctggtaaagagcaggaccagaggaagaatccagatttccttatgcttgggcctcacactagctctctgagtatttccttgattgcggtatatgtactactagaaaataccaaatggatatattttctttaggataacctttgaaccaacaatcttcaataacaatagtacatcttccatcttacttttaatcgagtataaggaaatgtttctttatggccattttggagggagcaggggatgaggcttggcatagtccaaaatttaagtctccaataattaattgcattttaaattgttttaaattggcccactttcaaggcaattttttttgtgtgtctgtaactgagctcctccacccctgtcattcacttccaattttacccaatccaattttagcactcaagttccattgtgttaatttttgcacggtctacacacatcaagtcagcaagcatttgccaccactccctatacttctccctcttttttacacacacacacacacacacacacacaatccatctcttgcttgttcctacctccctgatttttcttccctacagaaatagaaatagggacaaagaaggggaaaatgtatatattggggctgggctgaacaactaacttcataagtagtattaactaggggtaaattgagagaaaagctccttttctcttcactgttttggaaaggatagccattagcatgactgctttgtgtccttatggactttagtattagcctagattgaattatagcgtttttctagctggaaggaaccttaagatcacatcatctactcctctactccaaatttctcattcttcaggccaggaaaccgagacacagaggtaaagtaatttccccaaggtcacacagctggctggggcaggattgggtttacaacccacatctcctggctcttattccagggccttttcccactaagtagtattgccttccattaggctcctgagagttatttctcagggtcatgttgcatcttggagccacatgctgctgccctgatctcagtgggaaatccacccagcaacctaatacagccccttttccctgcattcacctggttcccatccacatgggttgcagatgtccttgaagagagtgaggcattgagggccaataggagcaatggggtccctggccttgtccatctgattcaggagatcactgctccatcgtgaggagccctctgaatagccccccactgaatgcttgccttgcccaaatggaatggaggaagattgattttctccatcagttcaccttgtgtcatctcataatggttggtctttccaggctgagggaaatgtttcttgtttccagagtagaaaaaagaaagagtggaacaatagctttgttcatcctaactttctgagatggcttttcaacatttaaaaaaaactagtgtggtaccattcactggcatgatttcttttagaatatgggagtaagatgaggtagagaaaataacctggtctcactgtggttgccctcatccacaatgtccccaaagccatcctgctctgatgaggacaatttccaggtataagcaaggggctttgtgacaaaaatgtaccctggctgatgttaaacattggctcctgtgtttgcaccaaaatagcaagctgtgtgctctatacactcttcccatcgtcttgtgtacactgctcctgtggccttccacagcagaaaccagggcaaaagggtccaaacacatggttttccttgctgcaaggctcttcctgggaactaagggggtatttattagttcagttctaagagacctccttctgggcttaccccactcctcaggtacttctctctccttcctccttctcctccacagtcacaagtaaccaaggaacctgaaagtggatgtgtagctatttgaagaaggcaaggaaccctgagattcttctttgaatcctttagtccaagtcttagaccagtgattggtgcttaccttgaacaaaattttgtctgtgttcctaatcccttcaatactctgggtacaatgctcccaatcaccctgcacatttgattctaaatggcttttattttttaaaaatccatatccctaggacaagagaacaggatgcctatatccccaaaatgagctccaggacactgatgggaatgatcccaaagatcaccccacctcagaaaacgtctgtgccaagagacttccccagatagaaacactgggacagtggtttgaacgacttcttttatggttgtccagtttgctatggaaataaaaggcattgattttttaaaaaagatgattggaacctgtctttggccacatagggccacttggatccatttccaggccttactcatatattgccttcactgaagggctttggctttaagtcccagactggtctcccaagtgaaccataagtgttttggagctcatctggggtgaggcatgagaatgttgccccatctatcccttcaggaaaaggtgccttccctccctttctcctaaagcctggtccccaaaaattgtttttgtctccaaaagtctagtatggtctttatacacccagactcttagtgttgcgtcctgccttgtttccttgttaaggatctatgcagacctcccgctttggcttagctagcgtgacattggctatcatttgacaagactaactttttttttttttttttttgactgagtctccctctgtcacctaggctggagtgcagtggcacaatcttggctcgctgcaaccttcacccttcacctcccaggtcgaagcgattctcctgcctcagtctcccgagtagctgggattacaggcgtgcgccaccaaatctggctatttttttattattattatttttagtagagatggggtttcaccatgttggccagactggtcttgaactcttggcctcaaattatctgcccacctcggcctcccaaagtgctgggattacaggcatgagcaccatgcccagctgacaagactaattttttatcccttggtttattggcttcaacatcttctggaatcagaggtgattttttcttaccttggatgcctgagactaggggagtatagaattccaattggtaattaaggcatctttctgctcctgatcagaagggcaggttagttgggagaggtcagatggcacaacagaagtcaccttgtaagtaaggcaaagactttgaaggcattagcgtttctcattacttaggtcaataaccttgagggaatcaatggcttttttgccgctctacctctttgtgtatctctttgacttttctttctctgtctagtttcctctgttctcagtttatattctatgttatcagtctctctttccacagtacaaacatccatcctttctcctgtgcaattctgtctctccctcttattatctttatttgtactttttccttcctccctgtctaggcattgggcatgtgcctcttcttagcctgtgattttgccttgggactgatgataaattatttccagattcaatcagccctggtcctaccccagtccaatcagaagtatgttggtgggaatcaacctgatcctggccctttcttcttctccattttcattcgtaatccccctcagcagatctttacaagcagtttccttatagctcatgtatctttaggtctttgccttccaagcactgtacagaatactttgtggttcctttttagtctgacattttgtggagcagtgaagcgtgctcagagacataatcagctgaagagaaaaaatccacccatggatttatatcagctaaatactaataattgattttgtttgatgtgcccataatttttaaagctgcaatataatataatgagggaccacaggtaatttctcctgtcatttgttttggctggatgggggtgggggagtaattgcttaaagttttaccattacacattaaactctctataataatcttgtttggggcttgctaactgttgagctgttttaactaaactggtaggcaatcggagttgatttaaatgaaaagataatttaacaaatctatactataaaaagagacatttgcttaattgacatgtattttttccttctgagtcacctaaacatttactcttgacaccaactgttcatgatactgaatagacagtccatataagagaaattagtggacctaaagaagccagattgtaggtgttaatttattaaacagagtgcaaagcccttggaaatgtcactgcttggcaataccatatggaatgccaaaatttacaatgacttttctttataagttatccaaaagggatttgaacaagtaagaggttatgccaaaatgtctccaatgtatggtcctgtaatatattgcagcttgaagccaatgatcccttatgacttgtatacaactaatgcatgttttattgaattttgcatttcccacgtgtggtaagttctttaaaatgtttttgatcacctttttgtgccattaaacttgtacagaaaatgtttttatggccattttcaaagggagaaagtttaaaatggaaacagcccaccctttctgccctatagctgtagttagaattgagtacctgtagcaaaacagctgtaattggtggttgtagtgttagaggtgttagcttgctagtgactagctttggagagtaaatgcatggtattgtacatcacatttcttaactcgttttaacctctgaaaagaatatattcttctttgtagtccttcttcccacccccttgccctctccctctccctgctcccagttgtcttacagttgtaaatatctgatttgaggcccaataactcttgccaagtaaagtcagcaaacaacaaacaaaccaaaatgtggggaaaaggcatttctcaaccatctctcagcagttattgatcatttcttaaggaacagcattgtgatcaaagactcaactttacgtaaaaatcagtggtaaattggggttgtatttggccatttgattacatttcaggattgaatagttttcagaatcacatgtaatccaaagacagtaggtagtgatgtcccttatccctgcagctgttttaagatagagacctcagaagactctgcttgaccgatgaccaataattatttgaaaaaaaaagaaaaaatgagagaaataaaacagatatttaagaactttagccacctatttagaatagttatagccagaaaaaaaaacaagggcatgagttcaaatgcattactatcagtgtcctaggcaatacctaacctactctgaaattgtgattcaaaagcagtatttcaagaggcattctccttttttggtttgctgaccccacttggactggtaggtttggtgaggcccccataaaccagctggagcagacccttttcatctcctgtgcctgtaacacccctcttcccccaccccctccgcaattcaatgagggctttcttgggtcagaggacttcaaggttgtctagagaagtttgccatgtgtgtaaggtgctgtgaactgtgagtgctgaagattcgcagcattcaataccaggcagccaaagagctgctcttgcaattattttggctctcaagctctgttcttcatcgcattctcatttctgtgtacatttgcaagatgtgtgtaatgtcattttccaaaaataaaatttgatttcaataaaaaaaaaaaaaaaaaaaaaaaaaaaaaaaaaaaaaaaaaaaaaaaaaaaaaacaaaaaaaaaaaaaagcaaaaaaaaaaacaaacacaacacaaaaaaagagagagcgagaagaaacccaatgaacgtaaagaaacacggcgacgaaggcggcgggcggggcgtcgcccacgaccccgcccgccgtggcgagcgcgaactacccgcgcacacccagcggggggcacgggacgcacagcgagcgccac

SEQ ID NO: 303004 - DNA, 9089 bp, Homo sapiens
ttttgccttattctatccgattttttccctaagcttctacctgggattttcctttggaaaagtctctgaggttccaccaaaatatggaacttgattttggacactttgacgaaagagataagacatccaggaacatgcgaggctcccggatgaatgggttgcctagccccactcacagcgcccactgtagcttctaccgaaccagaaccttgcaggcactgagtaatgagaagaaagccaagaaggtacgtttctaccgcaatggggaccgctacttcaaggggattgtgtacgctgtgtcctctgaccgttttcgcagctttgacgccttgctggctgacctgacgcgatctctgtctgacaacatcaacctgcctcagggagtgcgttacatttacaccattgatggatccaggaagatcggaagcatggatgaactggaggaaggggaaagctatgtctgttcctcagacaacttctttaaaaaggtggagtacaccaagaatgtcaatcccaactggtctgtcaacgtaaaaacatctgccaatatgaaagccccccagtccttggctagcagcaacagtgcacaggccagggagaacaaggactttgtgcgccccaagctggttaccatcatccgcagtggggtgaagcctcggaaggctgtgcgtgtgcttctgaacaagaagacagcccactcttttgagcaagtcctcactgatatcacagaagccatcaaactggagaccggggttgtcaaaaaactctacactctggatggaaaacaggtaacttgtctccatgatttctttggtgatgatgatgtgtttattgcctgtggtcctgaaaaatttcgctatgctcaggatgatttttctctggatgaaaatgaatgccgagtcatgaagggaaacccatcagccacagctggcccaaaggcatccccaacacctcagaagacttcagccaagagccctggtcctatgcgccgaagcaagtctccagctgactcagcaaacggaacctccagcagccagctctctacccccaagtctaagcagtctcccatctctacgcccaccagtcctggcagcctccggaagcacaaggacctgtacctgcctctgtccttggatgactcggactcgcttggtgattccatgtaaaggaggggagagtgctcagagtccagagtacaaatccaagcctatcattgtagtagggtacttctgctcaagtgtccaacagggctattggtgctttcaagtttttattttgttgttgttgttattttgaaaaacacattgtaatatgttgggtttattttcctgtgatttctcctctgggccactgatccacagttaccaattatgagagatagattgataaccatcctttggggcagcattccagggatgcaaaatgtgctagtccatgacctttcaatggaaagcttaggtgcctgcgttatatttgccctgtctaattttgcccatacagtcttccttctgtagagggctgtttacatatacagcacttaaaatgtttgtgtggggaaaaaaaaaactcattggcagatccaagaatgacaaacacaagtgccccttttctctggatctcaagaatggtggaggaccctggaaggacagcaaggcagctccccagcctcactcttcactcctgattgaggcccgggtttgttgtccagcaccaattctggctgtcaatggggagaaataaaccaacaacttataattgtgacaccagatgcttaggatcctggtgctgggttagctaagagaatagacagaattggaaaatactgcagacatttccgaagagtttataaagcacagtgaattcctggtcaatctctccactgaggcaatttggaatcaataagcaattgataatagtttggagtaagggacttcatatacctgattcctctagaaggctgtctaacataccacatgattacatgaactgtatggtatccatctatctctgttctattgaatgccttgttaacagccaacactgaaaacactgtgagaatttgttttcaggtctgacacctttcagtctctttttatagcaagaaatcaatatcctttttataaaaattcatgtctgtatttcaggagcaaactcttcaggctccttttttataaactggtgatttttcttttgtctaaaaaacacatgaagaaaatttaccaaaaaaaaaaaaaaagccgaagaataatgttatttagaaattatgctgtcactgccaaacagtaacctccaggagaaaacaagatgaatagcagaggccaattcaatagaatcagttttttgatagctttttaacagttatgcttgcattaataatttcaatgtggaccagacattctaattatattttaaatgaaatgttacagcatattttaagcaactctttttatctataatcctaatatttcatactgaagacacagaaatctttcacttgtctttaacattagaaaggatttctctttactaaggactgatcatttgaaatagttttcagtcttttgagatacaggtttataacactgctttttttttcctgtaaacatagcccataatggcaaaaacaactaattttaattgaaggtcttgcttgccaatcctgtgttggcttttaccaaatataaaaattcccttattccttggtaatggtgcaaatatttggaaaggcacagcatccaaaccaagctgctgtttggctactgaatggcttgcagttgttcctccactctaaatggaatgagcttgctgtgtgtgtgtgtggtggtggtgggagggggtggtgcatgtgtgtgtgtgtgtgtgcatctgcagctgcttcaaaattaagaaatactacaagacacccctgtaatggattggtggcaactgggtggcactgctgatgtgcactgtgtaggggggaacccagtggtggtggggtatctcaaatgcccctagacaagcttcagatgtctgtagctaccaaaaacattttcggttcaagaaaagtgagatgatggtagtactggtttctggtgaaattgaaaaaccccaaatgatgaggatctctttttgccccctctcctttttttgtaaacccattcaaaaccattaataagcccattttactaagcccctatttctttctagaagctcagggttttcttagtgcctcccagaacattttgtagttaattgggaaaaagtgatacttggattagggggtgtgggcataaagaatggtgggaggcctgattttaaaattcaggccagaacccccaatgactccacccatagtctcactttaggtctcatttagtccatcacctttattttaagttgaggaagtggaggctggtaaagagcaggaccagaggaagaatccagatttccttatgcttgggcctcacactagctctctgagtatttccttgattgcggtatatgtactactagaaaataccaaatggatatattttctttaggataacctttgaaccaacaatcttcaataacaatagtacatcttccatcttacttttaatcgagtataaggaaatgtttctttatggccattttggagggagcaggggatgaggcttggcatagtccaaaatttaagtctccaataattaattgcattttaaattgttttaaattggcccactttcaaggcaattttttttgtgtgtctgtaactgagctcctccacccctgtcattcacttccaattttacccaatccaattttagcactcaagttccattgtgttaatttttgcacggtctacacacatcaagtcagcaagcatttgccaccactccctatacttctccctcttttttacacacacacacacacacacacacacaatccatctcttgcttgttcctacctccctgatttttcttccctacagaaatagaaatagggacaaagaaggggaaaatgtatatattggggctgggctgaacaactaacttcataagtagtattaactaggggtaaattgagagaaaagctccttttctcttcactgttttggaaaggatagccattagcatgactgctttgtgtccttatggactttagtattagcctagattgaattatagcgtttttctagctggaaggaaccttaagatcacatcatctactcctctactccaaatttctcattcttcaggccaggaaaccgagacacagaggtaaagtaatttccccaaggtcacacagctggctggggcaggattgggtttacaacccacatctcctggctcttattccagggccttttcccactaagtagtattgccttccattaggctcctgagagttatttctcagggtcatgttgcatcttggagccacatgctgctgccctgatctcagtgggaaatccacccagcaacctaatacagccccttttccctgcattcacctggttcccatccacatgggttgcagatgtccttgaagagagtgaggcattgagggccaataggagcaatggggtccctggccttgtccatctgattcaggagatcactgctccatcgtgaggagccctctgaatagccccccactgaatgcttgccttgcccaaatggaatggaggaagattgattttctccatcagttcaccttgtgtcatctcataatggttggtctttccaggctgagggaaatgtttcttgtttccagagtagaaaaaagaaagagtggaacaatagctttgttcatcctaactttctgagatggcttttcaacatttaaaaaaaactagtgtggtaccattcactggcatgatttcttttagaatatgggagtaagatgaggtagagaaaataacctggtctcactgtggttgccctcatccacaatgtccccaaagccatcctgctctgatgaggacaatttccaggtataagcaaggggctttgtgacaaaaatgtaccctggctgatgttaaacattggctcctgtgtttgcaccaaaatagcaagctgtgtgctctatacactcttcccatcgtcttgtgtacactgctcctgtggccttccacagcagaaaccagggcaaaagggtccaaacacatggttttccttgctgcaaggctcttcctgggaactaagggggtatttattagttcagttctaagagacctccttctgggcttaccccactcctcaggtacttctctctccttcctccttctcctccacagtcacaagtaaccaaggaacctgaaagtggatgtgtagctatttgaagaaggcaaggaaccctgagattcttctttgaatcctttagtccaagtcttagaccagtgattggtgcttaccttgaacaaaattttgtctgtgttcctaatcccttcaatactctgggtacaatgctcccaatcaccctgcacatttgattctaaatggcttttattttttaaaaatccatatccctaggacaagagaacaggatgcctatatccccaaaatgagctccaggacactgatgggaatgatcccaaagatcaccccacctcagaaaacgtctgtgccaagagacttccccagatagaaacactgggacagtggtttgaacgacttcttttatggttgtccagtttgctatggaaataaaaggcattgattttttaaaaaagatgattggaacctgtctttggccacatagggccacttggatccatttccaggccttactcatatattgccttcactgaagggctttggctttaagtcccagactggtctcccaagtgaaccataagtgttttggagctcatctggggtgaggcatgagaatgttgccccatctatcccttcaggaaaaggtgccttccctccctttctcctaaagcctggtccccaaaaattgtttttgtctccaaaagtctagtatggtctttatacacccagactcttagtgttgcgtcctgccttgtttccttgttaaggatctatgcagacctcccgctttggcttagctagcgtgacattggctatcatttgacaagactaactttttttttttttttttttgactgagtctccctctgtcacctaggctggagtgcagtggcacaatcttggctcgctgcaaccttcacccttcacctcccaggtcgaagcgattctcctgcctcagtctcccgagtagctgggattacaggcgtgcgccaccaaatctggctatttttttattattattatttttagtagagatggggtttcaccatgttggccagactggtcttgaactcttggcctcaaattatctgcccacctcggcctcccaaagtgctgggattacaggcatgagcaccatgcccagctgacaagactaattttttatcccttggtttattggcttcaacatcttctggaatcagaggtgattttttcttaccttggatgcctgagactaggggagtatagaattccaattggtaattaaggcatctttctgctcctgatcagaagggcaggttagttgggagaggtcagatggcacaacagaagtcaccttgtaagtaaggcaaagactttgaaggcattagcgtttctcattacttaggtcaataaccttgagggaatcaatggcttttttgccgctctacctctttgtgtatctctttgacttttctttctctgtctagtttcctctgttctcagtttatattctatgttatcagtctctctttccacagtacaaacatccatcctttctcctgtgcaattctgtctctccctcttattatctttatttgtactttttccttcctccctgtctaggcattgggcatgtgcctcttcttagcctgtgattttgccttgggactgatgataaattatttccagattcaatcagccctggtcctaccccagtccaatcagaagtatgttggtgggaatcaacctgatcctggccctttcttcttctccattttcattcgtaatccccctcagcagatctttacaagcagtttccttatagctcatgtatctttaggtctttgccttccaagcactgtacagaatactttgtggttcctttttagtctgacattttgtggagcagtgaagcgtgctcagagacataatcagctgaagagaaaaaatccacccatggatttatatcagctaaatactaataattgattttgtttgatgtgcccataatttttaaagctgcaatataatataatgagggaccacaggtaatttctcctgtcatttgttttggctggatgggggtgggggagtaattgcttaaagttttaccattacacattaaactctctataataatcttgtttggggcttgctaactgttgagctgttttaactaaactggtaggcaatcggagttgatttaaatgaaaagataatttaacaaatctatactataaaaagagacatttgcttaattgacatgtattttttccttctgagtcacctaaacatttactcttgacaccaactgttcatgatactgaatagacagtccatataagagaaattagtggacctaaagaagccagattgtaggtgttaatttattaaacagagtgcaaagcccttggaaatgtcactgcttggcaataccatatggaatgccaaaatttacaatgacttttctttataagttatccaaaagggatttgaacaagtaagaggttatgccaaaatgtctccaatgtatggtcctgtaatatattgcagcttgaagccaatgatcccttatgacttgtatacaactaatgcatgttttattgaattttgcatttcccacgtgtggtaagttctttaaaatgtttttgatcacctttttgtgccattaaacttgtacagaaaatgtttttatggccattttcaaagggagaaagtttaaaatggaaacagcccaccctttctgccctatagctgtagttagaattgagtacctgtagcaaaacagctgtaattggtggttgtagtgttagaggtgttagcttgctagtgactagctttggagagtaaatgcatggtattgtacatcacatttcttaactcgttttaacctctgaaaagaatatattcttctttgtagtccttcttcccacccccttgccctctccctctccctgctcccagttgtcttacagttgtaaatatctgatttgaggcccaataactcttgccaagtaaagtcagcaaacaacaaacaaaccaaaatgtggggaaaaggcatttctcaaccatctctcagcagttattgatcatttcttaaggaacagcattgtgatcaaagactcaactttacgtaaaaatcagtggtaaattggggttgtatttggccatttgattacatttcaggattgaatagttttcagaatcacatgtaatccaaagacagtaggtagtgatgtcccttatccctgcagctgttttaagatagagacctcagaagactctgcttgaccgatgaccaataattatttgaaaaaaaaagaaaaaatgagagaaataaaacagatatttaagaactttagccacctatttagaatagttatagccagaaaaaaaaacaagggcatgagttcaaatgcattactatcagtgtcctaggcaatacctaacctactctgaaattgtgattcaaaagcagtatttcaagaggcattctccttttttggtttgctgaccccacttggactggtaggtttggtgaggcccccataaaccagctggagcagacccttttcatctcctgtgcctgtaacacccctcttcccccaccccctccgcaattcaatgagggctttcttgggtcagaggacttcaaggttgtctagagaagtttgccatgtgtgtaaggtgctgtgaactgtgagtgctgaagattcgcagcattcaataccaggcagccaaagagctgctcttgcaattattttggctctcaagctctgttcttcatcgcattctcatttctgtgtacatttgcaagatgtgtgtaatgtcattttccaaaaataaaatttgatttcaata

SEQ ID NO: 303005 - DNA, 922 bp, Homo sapiens
ggaagtttaggttaactgtcttaaatttccaaagctgtaatcattattttcattctcaaagtgatggccttgtgttttgctcctctcctccagggccagactgagcccaggttgatttcaggcggacaccaatagactccacagcagctccaggagcccagacaccggcggccagaagcaaggctaggagctgctgcagccatgtcggccctcagcctcctcattctgggcctgctcacggcagtgccacctgccagctgtcagcaaggcctggggaaccttcagccctggatgcagggccttatcgcggtggccgtgttcctggtcctcgttgcaatcgcctttgcagtcaaccacttctggtgccaggaggagccggagcctgcacacatgatcctgaccgtcggaaacaaggcagatggagtcctggtgggaacagatggaaggtactcttcgatggcggccagtttcaggtccagtgagcatgagaatgcctatgagaatgtgcccgaggaggaaggcaaggtccgcagcaccccgatgtaaccttctctgtggctccaaccccaagactcccaggcacatgggatggatgtccagtgctaccacccaagccccctccttctttgtgtggaatctgcaatagtgggctgactccctccagccccatgccggccctacccgcccttgaagtatagccagccaaggttggagctcagaccgtgtctaggttggggctcggctgtggccctggggtctcctgctcagctcagaagagccttctggagaggacagtcagctgagcacctcccatcctgctcacacgtccttccccataactatggaaatggccctaatttctgtgaaataaagactttttgtatttctggggctgaggctcagcaacagcccctcaggcttc

SEQ ID NO: 303006 - DNA, 1146 bp, Homo sapiens
gtggacaccacgtgatcctggggaggcttttgcctcttccgagggctctggctccagggcctccctgttccaggggctaggtgtgccttcctcaatgctgcttttggctatgagggtgacgggcccagggcttcagggccccagatcgcaccttgccatctggggtgtccgtcctttgtcccccacagcaggctgtgtttgcccattttctcctctgccatgggtggagatggatctgaagttgggtgttgaagcctctgaccaaggctgtatcttgttttgaggccctgcccggtttccagggaccacatctggggccaagaggaagaaccgaactgggactaggcggacaccaatagactccacagcagctccaggagcccagacaccggcggccagaagcaaggctaggagctgctgcagccatgtcggccctcagcctcctcattctgggcctgctcacggcagtgccacctgccagctgtcagcaaggcctggggaaccttcagccctggatgcagggccttatcgcggtggccgtgttcctggtcctcgttgcaatcgcctttgcagtcaaccacttctggtgccaggaggagccggagcctgcacacatgatcctgaccgtcggaaacaaggcagatggagtcctggtgggaacagatggaaggtactcttcgatggcggccagtttcaggtccagtgagcatgagaatgcctatgagaatgtgcccgaggaggaaggcaaggtccgcagcaccccgatgtaaccttctctgtggctccaaccccaagactcccaggcacatgggatggatgtccagtgctaccacccaagccccctccttctttgtgtggaatctgcaatagtgggctgactccctccagccccatgccggccctacccgcccttgaagtatagccagccaaggttggagctcagaccgtgtctaggttggggctcggctgtggccctggggtctcctgctcagctcagaagagccttctggagaggacagtcagctgagcacctcccatcctgctcacacgtccttccccataactatggaaatggccctaatttctgtgaaataaagactttttgtatttctggggctgaggctcagcaacagcccctcaggcttc

SEQ ID NO: 303007 - DNA, 681 bp, Homo sapiens
caggctcatggatggatgtcagtgctacacccaagcccctccttctttgtgtggaatctgcaatagtgggctgactccctccagccccatgccggccctacccgcccttgaagtatagccagccaaggttggagccggagcctgcacacatgatcctgaccgtcggaaacaaggcagatggagtcctggtgggaacagatggaaggtactcttcgatggcggccagtttcaggtccagtgagcatgagaatgcctatgagaatgtgcccgaggaggaaggcaaggtccgcagcaccccgatgtaaccttctctgtggctccaaccccaagactcccaggcacatgggatggatgtccagtgctaccacccaagccccctccttctttgtgtggaatctgcaatagtgggctgactccctccagccccatgccggccctacccgcccttgaagtatagccagccaaggttggagctcagaccgtgtctaggttggggctcggctgtggccctggggtctcctgctcagctcagaagagccttctggagaggacagtcagctgagcacctcccatcctgctcacacgtccttccccataactatggaaatggccctaatttctgtgaaataaagactttttgtatttctggggctgaggctcagcaacagcccctcaggcttc

SEQ ID NO: 303008 - DNA, 813 bp, Homo sapiens
ggaagtttaggttaactgtcttaaatttccaaagctgtaatcattattttcattctcaaagtgatggccttgtgttttgctcctctcctccagggccagactgagcccaggttgatttcaggcggacaccaatagactccacagcagctccaggagcccagacaccggcggccagaagcaaggctaggagctgctgcagccatgtcggccctcagcctcctcattctgggcctgctcacggcagtgccacctgccagctgtcagcaagggagcctgcacacatgatcctgaccgtcggaaacaaggcagatggagtcctggtgggaacagatggaaggtactcttcgatggcggccagtttcaggtccagtgagcatgagaatgcctatgagaatgtgcccgaggaggaaggcaaggtccgcagcaccccgatgtaaccttctctgtggctccaaccccaagactcccaggcacatgggatggatgtccagtgctaccacccaagccccctccttctttgtgtggaatctgcaatagtgggctgactccctccagccccatgccggccctacccgcccttgaagtatagccagccaaggttggagctcagaccgtgtctaggttggggctcggctgtggccctggggtctcctgctcagctcagaagagccttctggagaggacagtcagctgagcacctcccatcctgctcacacgtccttccccataactatggaaatggccctaatttctgtgaaataaagactttttgtatttctggggctgaggctcagcaacagcccctcaggcttc

SEQ ID NO: 303009 - DNA, 703 bp, Homo sapiens
cgcgcactttcgggtgttgtctggccgccgtagcgcgtcttgggtctcccggctgccgctgctgccgccgccgcctcgggtcgtggagccaggagcgacgtcaccgccatggcaggcatcaaagctttgattagtttgtcctttggaggagcaatcggactgatgtttttgatgcttggatgtgcccttccaatatacaacaaatactggcccctctttgttctatttttttacatcctttcacctattccatactgcatagcaagaagattagtggatgatacagatgctatgagtaacgcttgtaaggaacttgccatctttcttacaacgggcattgtcgtgtcagcttttggactccctattgtatttgccagagcacatctgattgagtggggagcttgtgcacttgttctcacaggaaacacagtcatctttgcaactatactaggctttttcttggtctttggaagcaatgacgacttcagctggcagcagtggtgaaaagaaattactgaactattgtcaaatggacttcctgtcatttgttggccattcacgcacacaggagatggggcagttaatgctgaatggtatagcaagcctcttgggggtattttaggtgctcccttctcacttttattgtaagcatactattttcacagagacttgctgaaggattaaaaggattttctcttttgga

SEQ ID NO: 303010 - DNA, 1340 bp, Homo sapiens
cgcgcactttcgggtgttgtctggccgccgtagcgcgtcttgggtctcccggctgccgctgctgccgccgccgcctcgggtcgtggagccaggagcgacgtcaccgccatggcaggcatcaaagctttgattagtttgtcctttggaggagcaatcggactgatgtttttgatgcttggatgtgcccttccaatatacaacaaatactggcccctctttgttctatttttttacatcctttcacctattccatactgcatagcaagaagattagtggatgatacagatgctatgagtaacgcttgtaaggaacttgccatctttcttacaacgggcattgtcgtgtcagcttttggactccctattgtatttgccagagcacatctgatggggcgcctacccttcttcagcaagatgggaacagctgagtctgaaggaagagaaacactgacacagcagctgcctctcccagcagccgccatgagaagattgttacctgcaagcagagtgtccactcaacccgtgctgaggctggcagacagtgctgagtcacttctgggcaggcctgctctgtgggctctaggattcctgctttgccctccctctcaggcacaatgacaactactgctcagtgccagacactgcaccatgtaggcaacacgtggcagtgatgattagtcacaaaatcacatttatattcattctaatgaaactgccattgcaaaattataactgagacagtgaaagaagtctgacctaaccaactccatcttgcttctaacctccaagctgtccttgttcattcctgggactcattttgggaggaacttagttaatagcttacagtttaaaacaaagacaatcacagacctttcccaaaacaaacccccttcttgcctggaaactagactgcctttgtaggattaacaaattagccgaaagattagaaattatggtttaggagtcacgcagctggagatgacaagattctgacactcctccaattgctcctggggataacattactattctaaggcctaacatcagtgcttgagatgttttgtagaccctgcccttgatggatcagctggtactacccagaccgataaactggctcgtcttatcttgtggcccccacccaggagctgactcaatgcaagaagactgttctgactccctatgatttcatctccaacccaaccaagcggcactgtcaactcactggcctccccctacccaccaaattatccttaaaaactcagatccccaaatgctcagggaaactgattatgattaccccaaagcttggagtaataataaaactggcctgtctcccgcac

SEQ ID NO: 303011 - DNA, 2709 bp, Homo sapiens
cgcgcactttcgggtgttgtctggccgccgtagcgcgtcttgggtctcccggctgccgctgctgccgccgccgcctcgggtcgtggagccaggagcgacgtcaccgccatggcaggcatcaaagctttgattagtttgtcctttggaggagcaatcggactgatgtttttgatgcttggatgtgcccttccaatatacaacaaatactggcccctctttgttctatttttttacatcctttcacctattccatactgcatagcaagaagattagtggatgatacagatgctatgagtaacgcttgtaaggaacttgccatctttcttacaacgggcattgtcgtgtcagcttttggactccctattgtatttgccagagcacatctgattgagtggggagcttgtgcacttgttctcacaggaaacacagtcatctttgcaactatactaggctttttcttggtctttggaagcaatgacgacttcagctggcagcagtggtgaaaagaaattactgaactattgtcaaatggacttcctgtcatttgttggccattcacgcacacaggagatggggcagttaatgctgaatggtatagcaagcctcttgggggtattttaggtgctcccttctcacttttattgtaagcatactattttcacagagacttgctgaaggattaaaaggattttctcttttggaaaagcttgactgatttcacacttatctatagtatgctttttgtggtgtcctgctgaatttaaatatttatgtgtttttcctgttaggttgattttttttggaatcaatatgcaatgttaaacacttttttaatgtaatcatttgcattggttaggaattcagaattccgccggctctattactggtcaagtacatcttttctcttaaaattatttagcctccattattacaaaaaattataaaaataagttttcagtcagtcaggatgacatcactcccaatgttatgcagacatacagacggttggcatacgttatagactgtatactcagtgcaaatatagctgcatttatacctcagaggggccaagtgttaatgcccatgccctccgttaagggttgttggttttactggtagacagatgttttgtggattgaaaattattttatggaattgctacagaggagtgcttttcttctcaattgttagaagaatttatgttaaactttaaggtaagggtgtaaaaacatttttgagataaggtttttatttatgtttattattgttagagtgagttgcaatgtgggaagaaatgacattgaaattccagtttttgaatcctgtttctatttataagtgaaatttgtgatctcctatcaacctttcatgttttaccctgttaaaatggacatacatggaaccactactgatgagggacagttgtatgtttgcatcatatatgccagaaaaccttcctctgcttcctccttttgacttatttggtatgttgtatatattacataaaataacttttcaaatatagtttaataacacttagaagtgtttacttacctggaaaataattgctatgccgtacattcagagtgccccctcccctgcaaggccttgccatgattaacaagtaacttgttagtcttacagataattcatgcattaacagtttaagatttagaccatggtaatagtagttcttattctctaaggttatatcatatgtaatttaaaagtatttttaagacaagtttcctgtatacctctgaactgttttgattttgagttcatcatgatagatctgctgtttccttataaaaggcatttgttgtgtgagttaatgcaaagtagccaagtccagctatatagcagcttcagaaacatacctgaccaaaaaattcccagtaaccaggcatgatcaatttatagtggtcgtttacatctaataattatcaggacttttttcaggagtgggttataaaaacattcaagttggtctgacagtattttgttaaggatatttgtttgtatgtttattcagtatacttacataaaaattatttcgccatcagccaaaactcagtaatcatgacagctgtctgttgttttatgaagtttatttctcaagaaaatgggaataaatttgggatttgttcagcttttttactaaagatgcctaaagccacaggttttattgcctaacttaagccatgacttttagatatgagatgacgggaagcaggacgaaatatcggcgtgtggctggagccttcccactggaggctgaaagtggcttgtggtattataatgttcagatttcaagaggaaggtgcaggtacacatgagttagagagctggtgagacagttgggaactctttgtgcttgtgatctactggactttttttttgcaggaagtgcattctctggtccttccctattttctgttctggatgtcagtgcagtgcactgctactgttttatccacttggccacagactttttctaacagctgcgtattatttctatatactaattgcattggcagcattgtgtctttgaccttgtatactagcttgacatagtgctgtctctgatttctaggctagttacttgagatatgaattttccatagaatatgcactgatacaacattaccattcttctatggaaagaaaacttttgatgatgaaacaataaagattttaaatatcta

SEQ ID NO: 303012 - DNA, 1539 bp, Homo sapiens
cgcgcactttcgggtgttgtctggccgccgtagcgcgtcttgggtctcccggctgccgctgctgccgccgccgcctcgggtcgtggagccaggagcgacgtcaccgccatggcaggcatcaaagctttgattagtttgtcctttggaggagcaatcggactgatgtttttgatgcttggatgtgcccttccaatatacaacaaatactggcccctctttgttctatttttttacatcctttcacctattccatactgcatagcaagaagattagtggatgatacagatgctatgagtaacgcttgtaaggaacttgccatctttcttacaacgggcattgtcgtgtcagcttttggactccctattgtatttgccagagcacatctgattgagtggggagcttgtgcacttgttctcacaggaaacacagtcatctttgcaactatactaggctttttcttggtctttggaagcaatgacgacttcagctggcagcagtggtgaaaagaaattactgaactattgtcaaatggacttcctgtcatttgttggccattcacgcacacaggagatggggcagttaatgctgaatggtatagcaagcctcttgggggtattttaggtgctcccttctcacttttattgtaagcatactattttcacagagacttgctgaaggattaaaaggattttctcttttggaaaagcttgactgatttcacacttatctatagtatgctttttgtggtgtcctgctgaatttaaatatttatgtgtttttcctgttaggttgattttttttggaatcaatatgcaatgttaaacacttttttaatgtaatcatttgcattggttaggaattcagaattccgccggctctattactggtcaagtacatcttttctcttaaaattatttagcctccattattacaaaaaattataaaaataagttttcagtcagtcaggatgacatcactcccaatgttatgcagacatacagacggttggcatacgttatagactgtatactcagtgcaaatatagctgcatttatacctcagaggggccaagtgttaatgcccatgccctccgttaagggttgttggttttactggtagacagatgttttgtggattgaaaattattttatggaattgctacagaggagtgcttttcttctcaattgttagaagaatttatgttaaactttaaggtaagggtgtaaaaacatttttgagataaggtttttatttatgtttattattgttagagtgagttgcaatgtgggaagaaatgacattgaaattccagtttttgaatcctgtttctatttataagtgaaatttgtgatctcctatcaacctttcatgttttaccctgttaaaatggacatacatggaaccactactgatgagggacagttgtatgtttgcatcatatatgccagaaaaccttcctctgcttcctccttttgacttatttggtatgttgtatatattacataaaataacttttcaaatatagtttaataacactt

SEQ ID NO: 303013 - DNA, 491 bp, Homo sapiens
  misc_feature (15)..(15): n is a, c, g, or t
caccaaactggcccncggtccaatcctttcacctattccatactgcatagcaagaagattagtggatgatacagatgctatgagtaacgcttgtaaggaacttgccatctttcttacaacgggcattgtcgtgtcagcttttggactccctattgtatttgccagagcacatctgattgagtggggagcttgtgcacttgttctcacaggaaacacagtcatctttgcaactatactaggctttttcttggtctttggaagcaatgacgacttcagctggcagcagtggtgaaaagaaattactgaactattgtcaaatggacttcctgtcatttgttggccattcacgcacacaggagatggggcagttaatgctgaatggtatagcaagcctcttgggggtattttaggtgctcccttctcacttttattgtaagcatactattttcacagagacttgctgaaggattaaaaggattttctcttttgga

SEQ ID NO: 303014 - DNA, 591 bp, Homo sapiens
cacagcggcaaacgctatcaggggtaaagggacgtagtggcttccacactgaggaaaaccccagcagtggtcagacaggcagggtctgcaggagagatgaggtctgggatatcacacctgcgttgacaggatgcctgtgcggcagcgagtagaggaagctggctttccctctaacctgctcgtgccgaattcggcacgagggagccttcccactggaggctgaaagtggcttgtggtattataatgttcagatttcaagaggaaggtgcaggtacacatgagttagagagaagtgcattctctggtccttccctattttctgttctggatgtcagtgcagtgcactgctactgttttatccacttggccacagactttttctaacagctgcgtattatttctatatactaattgcattggcagcattgtgtctttgaccttgtatactagcttgacatagtgctgtctctgatttctaggctagttacttgagatatgaattttccatagaatatgcactgatacaacattaccattcttctatggaaagaaaacttttgatgatgaaacaataaagattttaaatatcta

SEQ ID NO: 303015 - DNA, 2829 bp, Homo sapiens
tgcgcggggaagcgacccccgccccggcctgcgcttggcccggaggtgggcgcggcgccctcgggcaacggacggttgcgaccccggcttcgccctgcagcccccactttctgccgatttcggcagcctctctcccacccatcgccccccggacaaaatatgaagtggttggcggtcagtgaggagtcccgtcgcgacttggacggccacacacgttttgcaggagtttgcatccgagagagagctttgattagtttgtcctttggaggagcaatcggactgatgtttttgatgcttggatgtgcccttccaatatacaacaaatactggcccctctttgttctatttttttacatcctttcacctattccatactgcatagcaagaagattagtggatgatacagatgctatgagtaacgcttgtaaggaacttgccatctttcttacaacgggcattgtcgtgtcagcttttggactccctattgtatttgccagagcacatctgattgagtggggagcttgtgcacttgttctcacaggaaacacagtcatctttgcaactatactaggctttttcttggtctttggaagcaatgacgacttcagctggcagcagtggtgaaaagaaattactgaactattgtcaaatggacttcctgtcatttgttggccattcacgcacacaggagatggggcagttaatgctgaatggtatagcaagcctcttgggggtattttaggtgctcccttctcacttttattgtaagcatactattttcacagagacttgctgaaggattaaaaggattttctcttttggaaaagcttgactgatttcacacttatctatagtatgctttttgtggtgtcctgctgaatttaaatatttatgtgtttttcctgttaggttgattttttttggaatcaatatgcaatgttaaacacttttttaatgtaatcatttgcattggttaggaattcagaattccgccggctctattactggtcaagtacatcttttctcttaaaattatttagcctccattattacaaaaaattataaaaataagttttcagtcagtcaggatgacatcactcccaatgttatgcagacatacagacggttggcatacgttatagactgtatactcagtgcaaatatagctgcatttatacctcagaggggccaagtgttaatgcccatgccctccgttaagggttgttggttttactggtagacagatgttttgtggattgaaaattattttatggaattgctacagaggagtgcttttcttctcaattgttagaagaatttatgttaaactttaaggtaagggtgtaaaaacatttttgagataaggtttttatttatgtttattattgttagagtgagttgcaatgtgggaagaaatgacattgaaattccagtttttgaatcctgtttctatttataagtgaaatttgtgatctcctatcaacctttcatgttttaccctgttaaaatggacatacatggaaccactactgatgagggacagttgtatgtttgcatcatatatgccagaaaaccttcctctgcttcctccttttgacttatttggtatgttgtatatattacataaaataacttttcaaatatagtttaataacacttagaagtgtttacttacctggaaaataattgctatgccgtacattcagagtgccccctcccctgcaaggccttgccatgattaacaagtaacttgttagtcttacagataattcatgcattaacagtttaagatttagaccatggtaatagtagttcttattctctaaggttatatcatatgtaatttaaaagtatttttaagacaagtttcctgtatacctctgaactgttttgattttgagttcatcatgatagatctgctgtttccttataaaaggcatttgttgtgtgagttaatgcaaagtagccaagtccagctatatagcagcttcagaaacatacctgaccaaaaaattcccagtaaccaggcatgatcaatttatagtggtcgtttacatctaataattatcaggacttttttcaggagtgggttataaaaacattcaagttggtctgacagtattttgttaaggatatttgtttgtatgtttattcagtatacttacataaaaattatttcgccatcagccaaaactcagtaatcatgacagctgtctgttgttttatgaagtttatttctcaagaaaatgggaataaatttgggatttgttcagcttttttactaaagatgcctaaagccacaggttttattgcctaacttaagccatgacttttagatatgagatgacgggaagcaggacgaaatatcggcgtgtggctggagccttcccactggaggctgaaagtggcttgtggtattataatgttcagatttcaagaggaaggtgcaggtacacatgagttagagagctggtgagacagttgggaactctttgtgcttgtgatctactggactttttttttgcaggaagtgcattctctggtccttccctattttctgttctggatgtcagtgcagtgcactgctactgttttatccacttggccacagactttttctaacagctgcgtattatttctatatactaattgcattggcagcattgtgtctttgaccttgtatactagcttgacatagtgctgtctctgatttctaggctagttacttgagatatgaattttccatagaatatgcactgatacaacattaccattcttctatggaaagaaaacttttgatgatgaaacaataaagattttaaatatcta

SEQ ID NO: 303016 - DNA, 2636 bp, Homo sapiens
atcgccgaccacgcgtcgggagcgacgatagcgcagggaggcagtcaacagctttgattagtttgtcctttggaggagcaatcggactgatgtttttgatgcttggatgtgcccttccaatatacaacaaatactggcccctctttgttctatttttttacatcctttcacctattccatactgcatagcaagaagattagtggatgatacagatgctatgagtaacgcttgtaaggaacttgccatctttcttacaacgggcattgtcgtgtcagcttttggactccctattgtatttgccagagcacatctgattgagtggggagcttgtgcacttgttctcacaggaaacacagtcatctttgcaactatactaggctttttcttggtctttggaagcaatgacgacttcagctggcagcagtggtgaaaagaaattactgaactattgtcaaatggacttcctgtcatttgttggccattcacgcacacaggagatggggcagttaatgctgaatggtatagcaagcctcttgggggtattttaggtgctcccttctcacttttattgtaagcatactattttcacagagacttgctgaaggattaaaaggattttctcttttggaaaagcttgactgatttcacacttatctatagtatgctttttgtggtgtcctgctgaatttaaatatttatgtgtttttcctgttaggttgattttttttggaatcaatatgcaatgttaaacacttttttaatgtaatcatttgcattggttaggaattcagaattccgccggctctattactggtcaagtacatcttttctcttaaaattatttagcctccattattacaaaaaattataaaaataagttttcagtcagtcaggatgacatcactcccaatgttatgcagacatacagacggttggcatacgttatagactgtatactcagtgcaaatatagctgcatttatacctcagaggggccaagtgttaatgcccatgccctccgttaagggttgttggttttactggtagacagatgttttgtggattgaaaattattttatggaattgctacagaggagtgcttttcttctcaattgttagaagaatttatgttaaactttaaggtaagggtgtaaaaacatttttgagataaggtttttatttatgtttattattgttagagtgagttgcaatgtgggaagaaatgacattgaaattccagtttttgaatcctgtttctatttataagtgaaatttgtgatctcctatcaacctttcatgttttaccctgttaaaatggacatacatggaaccactactgatgagggacagttgtatgtttgcatcatatatgccagaaaaccttcctctgcttcctccttttgacttatttggtatgttgtatatattacataaaataacttttcaaatatagtttaataacacttagaagtgtttacttacctggaaaataattgctatgccgtacattcagagtgccccctcccctgcaaggccttgccatgattaacaagtaacttgttagtcttacagataattcatgcattaacagtttaagatttagaccatggtaatagtagttcttattctctaaggttatatcatatgtaatttaaaagtatttttaagacaagtttcctgtatacctctgaactgttttgattttgagttcatcatgatagatctgctgtttccttataaaaggcatttgttgtgtgagttaatgcaaagtagccaagtccagctatatagcagcttcagaaacatacctgaccaaaaaattcccagtaaccaggcatgatcaatttatagtggtcgtttacatctaataattatcaggacttttttcaggagtgggttataaaaacattcaagttggtctgacagtattttgttaaggatatttgtttgtatgtttattcagtatacttacataaaaattatttcgccatcagccaaaactcagtaatcatgacagctgtctgttgttttatgaagtttatttctcaagaaaatgggaataaatttgggatttgttcagcttttttactaaagatgcctaaagccacaggttttattgcctaacttaagccatgacttttagatatgagatgacgggaagcaggacgaaatatcggcgtgtggctggagccttcccactggaggctgaaagtggcttgtggtattataatgttcagatttcaagaggaaggtgcaggtacacatgagttagagagctggtgagacagttgggaactctttgtgcttgtgatctactggactttttttttgcaggaagtgcattctctggtccttccctattttctgttctggatgtcagtgcagtgcactgctactgttttatccacttggccacagactttttctaacagctgcgtattatttctatatactaattgcattggcagcattgtgtctttgaccttgtatactagcttgacatagtgctgtctctgatttctaggctagttacttgagatatgaattttccatagaatatgcactgatacaacattaccattcttctatggaaagaaaacttttgatgatgaaacaataaagattttaaatatcta

SEQ ID NO: 303017 - DNA, 3171 bp, Homo sapiens
tgcgcggggaagcgacccccgccccggcctgcgcttggcccggaggtgggcgcggcgccctcgggcaacggacggttgcgaccccggcttcgccctgcagcccccactttctgccgatttcggcagcctctctcccacccatcgccccccggacaaaatatgaagtggttggcggtcagtgaggagtcccgtcgcgacttggacggccacacacgttttgcaggagtttgcatccgagagagaggcaggcagagcgtgggattgagaaggctgaggctgctagagatgccagctatggaaaaccagtcatttcccaccgaaaggcacaagtgcggtctgcgggcgctgcacgggtctgcccgaaacctcgaccccacgtccaccccggccgcccgcgcccgaggctttacaggctcccgaaacgggtgcattttcatctgcggtgtctggaccctagagttgatcctgtaggcgaccccaaagtgctcctggctctcttccctctccgcagttgcaccctgaggctttttcaaatttcaaaatttttctttttttccttttttttttttaagaagataaaatactgctttgattagtttgtcctttggaggagcaatcggactgatgtttttgatgcttggatgtgcccttccaatatacaacaaatactggcccctctttgttctatttttttacatcctttcacctattccatactgcatagcaagaagattagtggatgatacagatgctatgagtaacgcttgtaaggaacttgccatctttcttacaacgggcattgtcgtgtcagcttttggactccctattgtatttgccagagcacatctgattgagtggggagcttgtgcacttgttctcacaggaaacacagtcatctttgcaactatactaggctttttcttggtctttggaagcaatgacgacttcagctggcagcagtggtgaaaagaaattactgaactattgtcaaatggacttcctgtcatttgttggccattcacgcacacaggagatggggcagttaatgctgaatggtatagcaagcctcttgggggtattttaggtgctcccttctcacttttattgtaagcatactattttcacagagacttgctgaaggattaaaaggattttctcttttggaaaagcttgactgatttcacacttatctatagtatgctttttgtggtgtcctgctgaatttaaatatttatgtgtttttcctgttaggttgattttttttggaatcaatatgcaatgttaaacacttttttaatgtaatcatttgcattggttaggaattcagaattccgccggctctattactggtcaagtacatcttttctcttaaaattatttagcctccattattacaaaaaattataaaaataagttttcagtcagtcaggatgacatcactcccaatgttatgcagacatacagacggttggcatacgttatagactgtatactcagtgcaaatatagctgcatttatacctcagaggggccaagtgttaatgcccatgccctccgttaagggttgttggttttactggtagacagatgttttgtggattgaaaattattttatggaattgctacagaggagtgcttttcttctcaattgttagaagaatttatgttaaactttaaggtaagggtgtaaaaacatttttgagataaggtttttatttatgtttattattgttagagtgagttgcaatgtgggaagaaatgacattgaaattccagtttttgaatcctgtttctatttataagtgaaatttgtgatctcctatcaacctttcatgttttaccctgttaaaatggacatacatggaaccactactgatgagggacagttgtatgtttgcatcatatatgccagaaaaccttcctctgcttcctccttttgacttatttggtatgttgtatatattacataaaataacttttcaaatatagtttaataacacttagaagtgtttacttacctggaaaataattgctatgccgtacattcagagtgccccctcccctgcaaggccttgccatgattaacaagtaacttgttagtcttacagataattcatgcattaacagtttaagatttagaccatggtaatagtagttcttattctctaaggttatatcatatgtaatttaaaagtatttttaagacaagtttcctgtatacctctgaactgttttgattttgagttcatcatgatagatctgctgtttccttataaaaggcatttgttgtgtgagttaatgcaaagtagccaagtccagctatatagcagcttcagaaacatacctgaccaaaaaattcccagtaaccaggcatgatcaatttatagtggtcgtttacatctaataattatcaggacttttttcaggagtgggttataaaaacattcaagttggtctgacagtattttgttaaggatatttgtttgtatgtttattcagtatacttacataaaaattatttcgccatcagccaaaactcagtaatcatgacagctgtctgttgttttatgaagtttatttctcaagaaaatgggaataaatttgggatttgttcagcttttttactaaagatgcctaaagccacaggttttattgcctaacttaagccatgacttttagatatgagatgacgggaagcaggacgaaatatcggcgtgtggctggagccttcccactggaggctgaaagtggcttgtggtattataatgttcagatttcaagaggaaggtgcaggtacacatgagttagagagctggtgagacagttgggaactctttgtgcttgtgatctactggactttttttttgcaggaagtgcattctctggtccttccctattttctgttctggatgtcagtgcagtgcactgctactgttttatccacttggccacagactttttctaacagctgcgtattatttctatatactaattgcattggcagcattgtgtctttgaccttgtatactagcttgacatagtgctgtctctgatttctaggctagttacttgagatatgaattttccatagaatatgcactgatacaacattaccattcttctatggaaagaaaacttttgatgatgaaacaataaagattttaaatatcta

SEQ ID NO: 303018 - DNA, 2715 bp, Homo sapiens
agcgggtgggcgcccggcgcccgctccggtcgctcggcccgcgcggtggtgggcgctctccggcgggcgcgctctgagcgtggcgcggggcgggtgcggcgtggcgggggtcaagtgcgtgtgagttaggctttgattagtttgtcctttggaggagcaatcggactgatgtttttgatgcttggatgtgcccttccaatatacaacaaatactggcccctctttgttctatttttttacatcctttcacctattccatactgcatagcaagaagattagtggatgatacagatgctatgagtaacgcttgtaaggaacttgccatctttcttacaacgggcattgtcgtgtcagcttttggactccctattgtatttgccagagcacatctgattgagtggggagcttgtgcacttgttctcacaggaaacacagtcatctttgcaactatactaggctttttcttggtctttggaagcaatgacgacttcagctggcagcagtggtgaaaagaaattactgaactattgtcaaatggacttcctgtcatttgttggccattcacgcacacaggagatggggcagttaatgctgaatggtatagcaagcctcttgggggtattttaggtgctcccttctcacttttattgtaagcatactattttcacagagacttgctgaaggattaaaaggattttctcttttggaaaagcttgactgatttcacacttatctatagtatgctttttgtggtgtcctgctgaatttaaatatttatgtgtttttcctgttaggttgattttttttggaatcaatatgcaatgttaaacacttttttaatgtaatcatttgcattggttaggaattcagaattccgccggctctattactggtcaagtacatcttttctcttaaaattatttagcctccattattacaaaaaattataaaaataagttttcagtcagtcaggatgacatcactcccaatgttatgcagacatacagacggttggcatacgttatagactgtatactcagtgcaaatatagctgcatttatacctcagaggggccaagtgttaatgcccatgccctccgttaagggttgttggttttactggtagacagatgttttgtggattgaaaattattttatggaattgctacagaggagtgcttttcttctcaattgttagaagaatttatgttaaactttaaggtaagggtgtaaaaacatttttgagataaggtttttatttatgtttattattgttagagtgagttgcaatgtgggaagaaatgacattgaaattccagtttttgaatcctgtttctatttataagtgaaatttgtgatctcctatcaacctttcatgttttaccctgttaaaatggacatacatggaaccactactgatgagggacagttgtatgtttgcatcatatatgccagaaaaccttcctctgcttcctccttttgacttatttggtatgttgtatatattacataaaataacttttcaaatatagtttaataacacttagaagtgtttacttacctggaaaataattgctatgccgtacattcagagtgccccctcccctgcaaggccttgccatgattaacaagtaacttgttagtcttacagataattcatgcattaacagtttaagatttagaccatggtaatagtagttcttattctctaaggttatatcatatgtaatttaaaagtatttttaagacaagtttcctgtatacctctgaactgttttgattttgagttcatcatgatagatctgctgtttccttataaaaggcatttgttgtgtgagttaatgcaaagtagccaagtccagctatatagcagcttcagaaacatacctgaccaaaaaattcccagtaaccaggcatgatcaatttatagtggtcgtttacatctaataattatcaggacttttttcaggagtgggttataaaaacattcaagttggtctgacagtattttgttaaggatatttgtttgtatgtttattcagtatacttacataaaaattatttcgccatcagccaaaactcagtaatcatgacagctgtctgttgttttatgaagtttatttctcaagaaaatgggaataaatttgggatttgttcagcttttttactaaagatgcctaaagccacaggttttattgcctaacttaagccatgacttttagatatgagatgacgggaagcaggacgaaatatcggcgtgtggctggagccttcccactggaggctgaaagtggcttgtggtattataatgttcagatttcaagaggaaggtgcaggtacacatgagttagagagctggtgagacagttgggaactctttgtgcttgtgatctactggactttttttttgcaggaagtgcattctctggtccttccctattttctgttctggatgtcagtgcagtgcactgctactgttttatccacttggccacagactttttctaacagctgcgtattatttctatatactaattgcattggcagcattgtgtctttgaccttgtatactagcttgacatagtgctgtctctgatttctaggctagttacttgagatatgaattttccatagaatatgcactgatacaacattaccattcttctatggaaagaaaacttttgatgatgaaacaataaagattttaaatatcta

SEQ ID NO: 303019 - DNA, 2619 bp, Homo sapiens
tatggagtttgccgtaatggaatgatatcgaaagctttgattgatagtccttgcggagcaatcggactgatggtggatgcattggcatgtgtccctgtccaattatacaacaaatactggcccctctttgttctatttttttacatcctttcacctattccatactgcatagcaagaagattagtggatgatacagatgctatgagtaacgcttgtaaggaacttgccatctttcttacaacgggcattgtcgtgtcagcttttggactccctattgtatttgccagagcacatctgattgagtggggagcttgtgcacttgttctcacaggaaacacagtcatctttgcaactatactaggctttttcttggtctttggaagcaatgacgacttcagctggcagcagtggtgaaaagaaattactgaactattgtcaaatggacttcctgtcatttgttggccattcacgcacacaggagatggggcagttaatgctgaatggtatagcaagcctcttgggggtattttaggtgctcccttctcacttttattgtaagcatactattttcacagagacttgctgaaggattaaaaggattttctcttttggaaaagcttgactgatttcacacttatctatagtatgctttttgtggtgtcctgctgaatttaaatatttatgtgtttttcctgttaggttgattttttttggaatcaatatgcaatgttaaacacttttttaatgtaatcatttgcattggttaggaattcagaattccgccggctctattactggtcaagtacatcttttctcttaaaattatttagcctccattattacaaaaaattataaaaataagttttcagtcagtcaggatgacatcactcccaatgttatgcagacatacagacggttggcatacgttatagactgtatactcagtgcaaatatagctgcatttatacctcagaggggccaagtgttaatgcccatgccctccgttaagggttgttggttttactggtagacagatgttttgtggattgaaaattattttatggaattgctacagaggagtgcttttcttctcaattgttagaagaatttatgttaaactttaaggtaagggtgtaaaaacatttttgagataaggtttttatttatgtttattattgttagagtgagttgcaatgtgggaagaaatgacattgaaattccagtttttgaatcctgtttctatttataagtgaaatttgtgatctcctatcaacctttcatgttttaccctgttaaaatggacatacatggaaccactactgatgagggacagttgtatgtttgcatcatatatgccagaaaaccttcctctgcttcctccttttgacttatttggtatgttgtatatattacataaaataacttttcaaatatagtttaataacacttagaagtgtttacttacctggaaaataattgctatgccgtacattcagagtgccccctcccctgcaaggccttgccatgattaacaagtaacttgttagtcttacagataattcatgcattaacagtttaagatttagaccatggtaatagtagttcttattctctaaggttatatcatatgtaatttaaaagtatttttaagacaagtttcctgtatacctctgaactgttttgattttgagttcatcatgatagatctgctgtttccttataaaaggcatttgttgtgtgagttaatgcaaagtagccaagtccagctatatagcagcttcagaaacatacctgaccaaaaaattcccagtaaccaggcatgatcaatttatagtggtcgtttacatctaataattatcaggacttttttcaggagtgggttataaaaacattcaagttggtctgacagtattttgttaaggatatttgtttgtatgtttattcagtatacttacataaaaattatttcgccatcagccaaaactcagtaatcatgacagctgtctgttgttttatgaagtttatttctcaagaaaatgggaataaatttgggatttgttcagcttttttactaaagatgcctaaagccacaggttttattgcctaacttaagccatgacttttagatatgagatgacgggaagcaggacgaaatatcggcgtgtggctggagccttcccactggaggctgaaagtggcttgtggtattataatgttcagatttcaagaggaaggtgcaggtacacatgagttagagagctggtgagacagttgggaactctttgtgcttgtgatctactggactttttttttgcaggaagtgcattctctggtccttccctattttctgttctggatgtcagtgcagtgcactgctactgttttatccacttggccacagactttttctaacagctgcgtattatttctatatactaattgcattggcagcattgtgtctttgaccttgtatactagcttgacatagtgctgtctctgatttctaggctagttacttgagatatgaattttccatagaatatgcactgatacaacattaccattcttctatggaaagaaaacttttgatgatgaaacaataaagattttaaatatcta

SEQ ID NO: 303020 - DNA, 2484 bp, Homo sapiens
cgcgcactttcgggtgttgtctggccgccgtagcgcgtcttgggtctcccggctgccgctgctgccgccgccgcctcgggtcgtggagccaggagcgacgtcaccgccatggcaggcatcaaagctttgattagtttgtcctttggaggagcaatcggactgatgtttttgatgcttggatgtgcccttccaatatacaacaaatactggcccctctttgttctatttttttacatcctttcacctattccatactgcatagcaagaagattatggtgaaaagaaattactgaactattgtcaaatggacttcctgtcatttgttggccattcacgcacacaggagatggggcagttaatgctgaatggtatagcaagcctcttgggggtattttaggtgctcccttctcacttttattgtaagcatactattttcacagagacttgctgaaggattaaaaggattttctcttttggaaaagcttgactgatttcacacttatctatagtatgctttttgtggtgtcctgctgaatttaaatatttatgtgtttttcctgttaggttgattttttttggaatcaatatgcaatgttaaacacttttttaatgtaatcatttgcattggttaggaattcagaattccgccggctctattactggtcaagtacatcttttctcttaaaattatttagcctccattattacaaaaaattataaaaataagttttcagtcagtcaggatgacatcactcccaatgttatgcagacatacagacggttggcatacgttatagactgtatactcagtgcaaatatagctgcatttatacctcagaggggccaagtgttaatgcccatgccctccgttaagggttgttggttttactggtagacagatgttttgtggattgaaaattattttatggaattgctacagaggagtgcttttcttctcaattgttagaagaatttatgttaaactttaaggtaagggtgtaaaaacatttttgagataaggtttttatttatgtttattattgttagagtgagttgcaatgtgggaagaaatgacattgaaattccagtttttgaatcctgtttctatttataagtgaaatttgtgatctcctatcaacctttcatgttttaccctgttaaaatggacatacatggaaccactactgatgagggacagttgtatgtttgcatcatatatgccagaaaaccttcctctgcttcctccttttgacttatttggtatgttgtatatattacataaaataacttttcaaatatagtttaataacacttagaagtgtttacttacctggaaaataattgctatgccgtacattcagagtgccccctcccctgcaaggccttgccatgattaacaagtaacttgttagtcttacagataattcatgcattaacagtttaagatttagaccatggtaatagtagttcttattctctaaggttatatcatatgtaatttaaaagtatttttaagacaagtttcctgtatacctctgaactgttttgattttgagttcatcatgatagatctgctgtttccttataaaaggcatttgttgtgtgagttaatgcaaagtagccaagtccagctatatagcagcttcagaaacatacctgaccaaaaaattcccagtaaccaggcatgatcaatttatagtggtcgtttacatctaataattatcaggacttttttcaggagtgggttataaaaacattcaagttggtctgacagtattttgttaaggatatttgtttgtatgtttattcagtatacttacataaaaattatttcgccatcagccaaaactcagtaatcatgacagctgtctgttgttttatgaagtttatttctcaagaaaatgggaataaatttgggatttgttcagcttttttactaaagatgcctaaagccacaggttttattgcctaacttaagccatgacttttagatatgagatgacgggaagcaggacgaaatatcggcgtgtggctggagccttcccactggaggctgaaagtggcttgtggtattataatgttcagatttcaagaggaaggtgcaggtacacatgagttagagagctggtgagacagttgggaactctttgtgcttgtgatctactggactttttttttgcaggaagtgcattctctggtccttccctattttctgttctggatgtcagtgcagtgcactgctactgttttatccacttggccacagactttttctaacagctgcgtattatttctatatactaattgcattggcagcattgtgtctttgaccttgtatactagcttgacatagtgctgtctctgatttctaggctagttacttgagatatgaattttccatagaatatgcactgatacaacattaccattcttctatggaaagaaaacttttgatgatgaaacaataaagattttaaatatcta

SEQ ID NO: 303021 - DNA, 2433 bp, Homo sapiens
aaggcatgcttcttttagatcataattgggatacaactagagccttgatttttttttttattttcctttcgtttttcatgcctgttgactgagtgtatcttatttccatagattgagtggggagcttgtgcacttgttctcacaggaaacacagtcatctttgcaactatactaggctttttcttggtctttggaagcaatgacgacttcagctggcagcagtggtgaaaagaaattactgaactattgtcaaatggacttcctgtcatttgttggccattcacgcacacaggagatggggcagttaatgctgaatggtatagcaagcctcttgggggtattttaggtgctcccttctcacttttattgtaagcatactattttcacagagacttgctgaaggattaaaaggattttctcttttggaaaagcttgactgatttcacacttatctatagtatgctttttgtggtgtcctgctgaatttaaatatttatgtgtttttcctgttaggttgattttttttggaatcaatatgcaatgttaaacacttttttaatgtaatcatttgcattggttaggaattcagaattccgccggctctattactggtcaagtacatcttttctcttaaaattatttagcctccattattacaaaaaattataaaaataagttttcagtcagtcaggatgacatcactcccaatgttatgcagacatacagacggttggcatacgttatagactgtatactcagtgcaaatatagctgcatttatacctcagaggggccaagtgttaatgcccatgccctccgttaagggttgttggttttactggtagacagatgttttgtggattgaaaattattttatggaattgctacagaggagtgcttttcttctcaattgttagaagaatttatgttaaactttaaggtaagggtgtaaaaacatttttgagataaggtttttatttatgtttattattgttagagtgagttgcaatgtgggaagaaatgacattgaaattccagtttttgaatcctgtttctatttataagtgaaatttgtgatctcctatcaacctttcatgttttaccctgttaaaatggacatacatggaaccactactgatgagggacagttgtatgtttgcatcatatatgccagaaaaccttcctctgcttcctccttttgacttatttggtatgttgtatatattacataaaataacttttcaaatatagtttaataacacttagaagtgtttacttacctggaaaataattgctatgccgtacattcagagtgccccctcccctgcaaggccttgccatgattaacaagtaacttgttagtcttacagataattcatgcattaacagtttaagatttagaccatggtaatagtagttcttattctctaaggttatatcatatgtaatttaaaagtatttttaagacaagtttcctgtatacctctgaactgttttgattttgagttcatcatgatagatctgctgtttccttataaaaggcatttgttgtgtgagttaatgcaaagtagccaagtccagctatatagcagcttcagaaacatacctgaccaaaaaattcccagtaaccaggcatgatcaatttatagtggtcgtttacatctaataattatcaggacttttttcaggagtgggttataaaaacattcaagttggtctgacagtattttgttaaggatatttgtttgtatgtttattcagtatacttacataaaaattatttcgccatcagccaaaactcagtaatcatgacagctgtctgttgttttatgaagtttatttctcaagaaaatgggaataaatttgggatttgttcagcttttttactaaagatgcctaaagccacaggttttattgcctaacttaagccatgacttttagatatgagatgacgggaagcaggacgaaatatcggcgtgtggctggagccttcccactggaggctgaaagtggcttgtggtattataatgttcagatttcaagaggaaggtgcaggtacacatgagttagagagctggtgagacagttgggaactctttgtgcttgtgatctactggactttttttttgcaggaagtgcattctctggtccttccctattttctgttctggatgtcagtgcagtgcactgctactgttttatccacttggccacagactttttctaacagctgcgtattatttctatatactaattgcattggcagcattgtgtctttgaccttgtatactagcttgacatagtgctgtctctgatttctaggctagttacttgagatatgaattttccatagaatatgcactgatacaacattaccattcttctatggaaagaaaacttttgatgatgaaacaataaagattttaaatatcta

SEQ ID NO: 303022 - DNA, 3167 bp, Homo sapiens
cgcgcactttcgggtgttgtctggccgccgtagcgcgtcttgggtctcccggctgccgctgctgccgccgccgcctcgggtcgtggagccaggagcgacgtcaccgccatggcaggcatcaaagctttgattagtttgtcctttggaggagcaatcggactgatgtttttgatgcttggatgtgcccttccaatatacaacaaatactggcccctctttgttctatttttttacatcctttcacctattccatactgcatagcaagaagattagtggatgatacagatgctatgagtaacgcttgtaaggaacttgccatctttcttacaacgggcattgtcgtgtcagcttttggactccctattgtatttgccagagcacatctgattgagtggggagcttgtgcacttgttctcacaggaaacacagtcatctttgcaactatactaggctttttcttggtctttggaagcaatgacgacttcagctggcagcagtggtgaaaagaaattactgaactattgtcaaatggacttcctgtcatttgttggccattcacgcacacaggagatggggcagttaatgctgaatggtatagcaagcctcttgggggtattttaggtgctcccttctcacttttattgtaagcatactattttcacagagacttgctgaaggattaaaaggattttctcttttggaaaagcttgactgatttcacacttatctatagtatgctttttgtggtgtcctgctgaatttaaatatttatgtgtttttcctgttaggttgattttttttggaatcaatatgcaatgttaaacacttttttaatgtaatcatttgcattggttaggaattcagaattccgccggctctattactggtcaagtacatcttttctcttaaaattatttagcctccattattacaaaaaattataaaaataagttttcagtcagtcaggatgacatcactcccaatgttatgcagacatacagacggttggcatacgttatagactgtatactcagtgcaaatatagctgcatttatacctcagaggggccaagtgttaatgcccatgccctccgttaagggttgttggttttactggtagacagatgttttgtggattgaaaattattttatggaattgctacagaggagtgcttttcttctcaattgttagaagaatttatgttaaactttaaggtaagggtgtaaaaacatttttgagataaggtttttatttatgtttattattgttagagtgagttgcaatgtgggaagaaatgacattgaaattccagtttttgaatcctgtttctatttataagtgaaatttgtgatctcctatcaacctttcatgttttaccctgttaaaatggacatacatggaaccactactgatgagggacagttgtatgtttgcatcatatatgccagaaaaccttcctctgcttcctccttttgacttatttggtatgttgtatatattacataaaataacttttcaaatatagtttaataacacttagaagtgtttacttacctggaaaataattgctatgccgtacattcagagtgccccctcccctgcaaggccttgccatgattaacaagtaacttgttagtcttacagataattcatgcattaacagtttaagatttagaccatggtaatagtagttcttattctctaaggttatatcatatgtaatttaaaagtatttttaagacaagtttcctgtatacctctgaactgttttgattttgagttcatcatgatagatctgctgtttccttataaaaggcatttgttgtgtgagttaatgcaaagtagccaagtccagctatatagcagcttcagaaacatacctgaccaaaaaattcccagtaaccaggcatgatcaatttatagtggtcgtttacatctaataattatcaggacttttttcaggagtgggttataaaaacattcaagttggtctgacagtattttgttaaggatatttgtttgtatgtttattcagtatacttacataaaaattatttcgccatcagccaaaactcagtaatcatgacagctgtctgttgttttatgaagtttatttctcaagaaaatgggaataaatttgggatttgttcagcttttttactaaagatgcctaaagccacaggttttattgcctaacttaagccatgacttttagatatgagatgacgggaagcaggacgaaatatcggcgtgtggctggagccttcccactggaggctgaaagtggcttgtggtattataatgttcagatttcaagaggaaggtgcaggtacacatgagttagagagctggtgagacagttgggaactctttgtgcttgtgatctactggactttttttttgcaggaagtgcattctctggtccttccctattttctgttctggatgtcagtgcagtgcactgctactgttttatccacttggccacagactttttctaacagctgcgtattatttctatatactaattgcattggcagcattgtgtctttgaccttgtatactagcttgacatagtgctgtctctgatttctaggctagttacttgagatatgaattttccatagaatatgcactgatacaacattaccattcttctatggaaagaaaacttttgatgatgaaacaataaagattttaaatatctattttagtttgtgggtgtttttgaaatgaaaatatatggcacactttcattctgaagtgcattaacattctaataaggtgatgtaaagcaagatgacattggtgtaatgttagagttgcagaagtttccattccaaaataaaatggaaaccatagttacagatattacaatgcagccctgtaattttgagctgtagtaaaaggattggtaatctgggaagtagaatttttacaaaatcttttacaaaaatagtcataaaaggttttgttgacatttaagactactactgatctaaaggcaaggtcctacttcttaaattttcagaacatttttatgacttcttattatgtatttattaccactcattattatagcatgttactttttgcaaacattttaaacaaaaaatatttctgtttggtacactgtgaagagagaaaagtactgttctgtattttc

SEQ ID NO: 303023 - DNA, 1056 bp, Homo sapiens
  misc_feature (24)..(24): n is a, c, g, or t
gatctagaggaccctgacaccagnacactggtatggtagttcttattctctaaggttatatcatatgtaatttaaaagtatttttaagacaagtttcctgtatacctctgaactgttttgattttgagttcatcatgatagatctgctgtttccttataaaaggcatttgttgtgtgagttaatgcaaagtagccaagtccagctatatagcagcttcagaaacatacctgaccaaaaaattcccagtaaccaggcatgatcaatttatagtggtcgtttacatctaataattatcaggacttttttcaggagtgggttataaaaacattcaagttggtctgacagtattttgttaaggatatttgtttgtatgtttattcagtatacttacataaaaattatttcgccatcagccaaaactcagtaatcatgacagctgtctgttgttttatgaagtttatttctcaagaaaatgggaataaatttgggatttgttcagcttttttactaaagatgcctaaagccacaggttttattgcctaacttaagccatgacttttagatatgagatgacgggaagcaggacgaaatatcggcgtgtggctggagccttcccactggaggctgaaagtggcttgtggtattataatgttcagatttcaagaggaaggtgcaggtacacatgagttagagagctggtgagacagttgggaactctttgtgcttgtgatctactggactttttttttgcaggaagtgcattctctggtccttccctattttctgttctggatgtcagtgcagtgcactgctactgttttatccacttggccacagactttttctaacagctgcgtattatttctatatactaattgcattggcagcattgtgtctttgaccttgtatactagcttgacatagtgctgtctctgatttctaggctagttacttgagatatgaattttccatagaatatgcactgatacaacattaccattcttctatggaaagaaaacttttgatgatgaaacaataaagattttaaatatcta

SEQ ID NO: 303024 - DNA, 955 bp, Homo sapiens
actcacttctagcagcgcgagcggcagttcatcatgatagatctgctgtttccttataaaaggcatttgttgtgtgagttaatgcaaagtagccaagtccagctatatagcagcttcagaaacatacctgaccaaaaaattcccagtaaccaggcatgatcaatttatagtggtcgtttacatctaataattatcaggacttttttcaggagtgggttataaaaacattcaagttggtctgacagtattttgttaaggatatttgtttgtatgtttattcagtatacttacataaaaattatttcgccatcagccaaaactcagtaatcatgacagctgtctgttgttttatgaagtttatttctcaagaaaatgggaataaatttgggatttgttcagcttttttactaaagatgcctaaagccacaggttttattgcctaacttaagccatgacttttagatatgagatgacgggaagcaggacgaaatatcggcgtgtggctggagccttcccactggaggctgaaagtggcttgtggtattataatgttcagatttcaagaggaaggtgcaggtacacatgagttagagagctggtgagacagttgggaactctttgtgcttgtgatctactggactttttttttgcaggaagtgcattctctggtccttccctattttctgttctggatgtcagtgcagtgcactgctactgttttatccacttggccacagactttttctaacagctgcgtattatttctatatactaattgcattggcagcattgtgtctttgaccttgtatactagcttgacatagtgctgtctctgatttctaggctagttacttgagatatgaattttccatagaatatgcactgatacaacattaccattcttctatggaaagaaaacttttgatgatgaaacaataaagattttaaatatcta

SEQ ID NO: 303025 - DNA, 908 bp, Homo sapiens
actctagaggacccccgacgagttgtccgagttaatgcaaagtagccaagtccagctatatagcagcttcagaaacatacctgaccaaaaaattcccagtaaccaggcatgatcaatttatagtggtcgtttacatctaataattatcaggacttttttcaggagtgggttataaaaacattcaagttggtctgacagtattttgttaaggatatttgtttgtatgtttattcagtatacttacataaaaattatttcgccatcagccaaaactcagtaatcatgacagctgtctgttgttttatgaagtttatttctcaagaaaatgggaataaatttgggatttgttcagcttttttactaaagatgcctaaagccacaggttttattgcctaacttaagccatgacttttagatatgagatgacgggaagcaggacgaaatatcggcgtgtggctggagccttcccactggaggctgaaagtggcttgtggtattataatgttcagatttcaagaggaaggtgcaggtacacatgagttagagagctggtgagacagttgggaactctttgtgcttgtgatctactggactttttttttgcaggaagtgcattctctggtccttccctattttctgttctggatgtcagtgcagtgcactgctactgttttatccacttggccacagactttttctaacagctgcgtattatttctatatactaattgcattggcagcattgtgtctttgaccttgtatactagcttgacatagtgctgtctctgatttctaggctagttacttgagatatgaattttccatagaatatgcactgatacaacattaccattcttctatggaaagaaaacttttgatgatgaaacaataaagattttaaatatcta

SEQ ID NO: 303026 - DNA, 335 bp, Homo sapiens
accccatctcaattttaaaaaagaaaaaaattataaaactaaaattctagcttatattagggtaacccacaaatctttaaaaaggaaaaaaactttgattctgatagacatacgaacagttaatctaatttttatatttaaatttgtgcttcgggatgcagagatctaaagccctaaaatgagaagtatgggaaattctggccagtttttagtcagaagtaaagtattttttcctgtttaaaaactatggtacatttcagatatgctgaaagccagaaaataatataaaagtgctcacatattcactgcctggcataaaaatgaaaaaaaaaaaa

SEQ ID NO: 303027 - DNA, 2014 bp, Homo sapiens
caggaactcacaccagcgatcaatcttccttaatttgtaactgggcagtgtcccgggccagccaatagctaagactgccccccccgcaccccaccctccctgaccctgggggactctctactcagtctgcactggagctgcctggtgaccagaagtttggagtccgctgacgtcgccgcccagatggcctccaggctgaccctgctgaccctcctgctgctgctgctggctggggatagagcctcctcaaatccaaatgctaccagctccagctcccaggatccagagagtttgcaagacagaggcgaagggaaggtcgcaacaacagttatctccaagatgctattcgttgaacccatcctggaggtttccagcttgccgacaaccaactcaacaaccaattcagccaccaaaataacagctaataccactgatgaacccaccacacaacccaccacagagcccaccacccaacccaccatccaacccacccaaccaactacccagctcccaacagattctcctacccagcccactactgggtccttctgcccaggacctgttactctctgctctgacttggagagtcattcaacagaggccgtgttgggggatgctttggtagatttctccctgaagctctaccacgccttctcagcaatgaagaaggtggagaccaacatggccttttccccattcagcatcgccagcctccttacccaggtcctgctcggggctggggagaacaccaaaacaaacctggagagcatcctctcttaccccaaggacttcacctgtgtccaccaggccctgaagggcttcacgaccaaaggtgtcacctcagtctctcagatcttccacagcccagacctggccataagggacacctttgtgaatgcctctcggaccctgtacagcagcagccccagagtcctaagcaacaacagtgacgccaacttggagctcatcaacacctgggtggccaagaacaccaacaacaagatcagccggctgctagacagtctgccctccgatacccgccttgtcctcctcaatgctatctacctgagtgccaagtggaagacaacatttgatcccaagaaaaccagaatggaaccctttcacttcaaaaactcagttataaaagtgcccatgatgaatagcaagaagtaccctgtggcccatttcattgaccaaactttgaaagccaaggtggggcagctgcagctctcccacaatctgagtttggtgatcctggtaccccagaacctgaaacatcgtcttgaagacatggaacaggctctcagcccttctgttttcaaggccatcatggagaaactggagatgtccaagttccagcccactctcctaacactaccccgcatcaaagtgacgaccagccaggatatgctctcaatcatggagaaattggaattcttcgatttttcttatgaccttaacctgtgtgggctgacagaggacccagatcttcaggtttctgcgatgcagcaccagacagtgctggaactgacagagactggggtggaggcggctgcagcctccgccatctctgtggcccgcaccctgctggtctttgaagtgcagcagcccttcctcttcgtgctctgggaccagcagcacaagttccctgtcttcatggggcgagtatatgaccccagggcctgagacctgcaggatcaggttagggcgagcgctacctctccagcctcagctctcagttgcagccctgctgctgcctgcctggacttggcccctgccacctcctgcctcaggtgtccgctatccaccaaaagggctccctgagggtctgggcaagggacctgcttctattagcccttctccatggccctgccatgctctccaaaccactttttgcagctttctctagttcaagttcaccagactctataaataaaacctgacagaccatgaaaaaaaaaaaacaaaaatggccttgttgggctcaacggaggagcttctcggcctgtttcct

SEQ ID NO: 303028 - DNA, 1989 bp, Homo sapiens
ggccccaggagggaggaggagggaattcgctaagagggactggggcctgagacggaatgggggcgggccccgggcggggtgggggcccctgggctcccagggtgggagctggctccgaggctggctggctccgcaggtccgctgacgtcgccgcccagatggcctccaggctgaccctgctgaccctcctgctgctgctgctggctggggatagagcctcctcaaatccaaatgctaccagctccagctcccaggatccagagagtttgcaagacagaggcgaagggaaggtcgcaacaacagttatctccaagatgctattcgttgaacccatcctggaggtttccagcttgccgacaaccaactcaacaaccaattcagccaccaaaataacagctaataccactgatgaacccaccacacaacccaccacagagcccaccacccaacccaccatccaacccacccaaccaactacccagctcccaacagattctcctacccagcccactactgggtccttctgcccaggacctgttactctctgctctgacttggagagtcattcaacagaggccgtgttgggggatgctttggtagatttctccctgaagctctaccacgccttctcagcaatgaagaaggtggagaccaacatggccttttccccattcagcatcgccagcctccttacccaggtcctgctcggggctggggagaacaccaaaacaaacctggagagcatcctctcttaccccaaggacttcacctgtgtccaccaggccctgaagggcttcacgaccaaaggtgtcacctcagtctctcagatcttccacagcccagacctggccataagggacacctttgtgaatgcctctcggaccctgtacagcagcagccccagagtcctaagcaacaacagtgacgccaacttggagctcatcaacacctgggtggccaagaacaccaacaacaagatcagccggctgctagacagtctgccctccgatacccgccttgtcctcctcaatgctatctacctgagtgccaagtggaagacaacatttgatcccaagaaaaccagaatggaaccctttcacttcaaaaactcagttataaaagtgcccatgatgaatagcaagaagtaccctgtggcccatttcattgaccaaactttgaaagccaaggtggggcagctgcagctctcccacaatctgagtttggtgatcctggtaccccagaacctgaaacatcgtcttgaagacatggaacaggctctcagcccttctgttttcaaggccatcatggagaaactggagatgtccaagttccagcccactctcctaacactaccccgcatcaaagtgacgaccagccaggatatgctctcaatcatggagaaattggaattcttcgatttttcttatgaccttaacctgtgtgggctgacagaggacccagatcttcaggtttctgcgatgcagcaccagacagtgctggaactgacagagactggggtggaggcggctgcagcctccgccatctctgtggcccgcaccctgctggtctttgaagtgcagcagcccttcctcttcgtgctctgggaccagcagcacaagttccctgtcttcatggggcgagtatatgaccccagggcctgagacctgcaggatcaggttagggcgagcgctacctctccagcctcagctctcagttgcagccctgctgctgcctgcctggacttggcccctgccacctcctgcctcaggtgtccgctatccaccaaaagggctccctgagggtctgggcaagggacctgcttctattagcccttctccatggccctgccatgctctccaaaccactttttgcagctttctctagttcaagttcaccagactctataaataaaacctgacagaccatgaaaaaaaaaaaacaaaaatggccttgttgggctcaacggaggagcttctcggcctgtttcct

SEQ ID NO: 303029 - DNA, 1957 bp, Homo sapiens
caggaactcacaccagcgatcaatcttccttaatttgtaactgggcagtgtcccgggccagccaatagctaagactgccccccccgcaccccaccctccctgaccctgggggactctctactcagtctgcactggagctgcctggtgaccagaagtttggagtccgctgacgtcgccgcccagatggcctccaggctgaccctgctgaccctcctgctgctgctgctggctggggatagagcctcctcaaatccaaatgctaccagaacagttatctccaagatgctattcgttgaacccatcctggaggtttccagcttgccgacaaccaactcaacaaccaattcagccaccaaaataacagctaataccactgatgaacccaccacacaacccaccacagagcccaccacccaacccaccatccaacccacccaaccaactacccagctcccaacagattctcctacccagcccactactgggtccttctgcccaggacctgttactctctgctctgacttggagagtcattcaacagaggccgtgttgggggatgctttggtagatttctccctgaagctctaccacgccttctcagcaatgaagaaggtggagaccaacatggccttttccccattcagcatcgccagcctccttacccaggtcctgctcggggctggggagaacaccaaaacaaacctggagagcatcctctcttaccccaaggacttcacctgtgtccaccaggccctgaagggcttcacgaccaaaggtgtcacctcagtctctcagatcttccacagcccagacctggccataagggacacctttgtgaatgcctctcggaccctgtacagcagcagccccagagtcctaagcaacaacagtgacgccaacttggagctcatcaacacctgggtggccaagaacaccaacaacaagatcagccggctgctagacagtctgccctccgatacccgccttgtcctcctcaatgctatctacctgagtgccaagtggaagacaacatttgatcccaagaaaaccagaatggaaccctttcacttcaaaaactcagttataaaagtgcccatgatgaatagcaagaagtaccctgtggcccatttcattgaccaaactttgaaagccaaggtggggcagctgcagctctcccacaatctgagtttggtgatcctggtaccccagaacctgaaacatcgtcttgaagacatggaacaggctctcagcccttctgttttcaaggccatcatggagaaactggagatgtccaagttccagcccactctcctaacactaccccgcatcaaagtgacgaccagccaggatatgctctcaatcatggagaaattggaattcttcgatttttcttatgaccttaacctgtgtgggctgacagaggacccagatcttcaggtttctgcgatgcagcaccagacagtgctggaactgacagagactggggtggaggcggctgcagcctccgccatctctgtggcccgcaccctgctggtctttgaagtgcagcagcccttcctcttcgtgctctgggaccagcagcacaagttccctgtcttcatggggcgagtatatgaccccagggcctgagacctgcaggatcaggttagggcgagcgctacctctccagcctcagctctcagttgcagccctgctgctgcctgcctggacttggcccctgccacctcctgcctcaggtgtccgctatccaccaaaagggctccctgagggtctgggcaagggacctgcttctattagcccttctccatggccctgccatgctctccaaaccactttttgcagctttctctagttcaagttcaccagactctataaataaaacctgacagaccatgaaaaaaaaaaaacaaaaatggccttgttgggctcaacggaggagcttctcggcctgtttcct

SEQ ID NO: 303030 - DNA, 1943 bp, Homo sapiens
caggaactcacaccagcgatcaatcttccttaatttgtaactgggcagtgtcccgggccagccaatagctaagactgccccccccgcaccccaccctccctgaccctgggggactctctactcagtctgcactggagctgcctggtgaccagaagtttggagtccgctgacgtcgccgcccagatggcctccaggctgaccctgctgaccctcctgctgctgctgctggctggggatagagcctcctcaaatccaaatgctaccagctccagctcccaggatccagagagtttgcaagacagaggcgaagggaaggtcgcaaccaaccaattcagccaccaaaataacagctaataccactgatgaacccaccacacaacccaccacagagcccaccacccaacccaccatccaacccacccaaccaactacccagctcccaacagattctcctacccagcccactactgggtccttctgcccaggacctgttactctctgctctgacttggagagtcattcaacagaggccgtgttgggggatgctttggtagatttctccctgaagctctaccacgccttctcagcaatgaagaaggtggagaccaacatggccttttccccattcagcatcgccagcctccttacccaggtcctgctcggggctggggagaacaccaaaacaaacctggagagcatcctctcttaccccaaggacttcacctgtgtccaccaggccctgaagggcttcacgaccaaaggtgtcacctcagtctctcagatcttccacagcccagacctggccataagggacacctttgtgaatgcctctcggaccctgtacagcagcagccccagagtcctaagcaacaacagtgacgccaacttggagctcatcaacacctgggtggccaagaacaccaacaacaagatcagccggctgctagacagtctgccctccgatacccgccttgtcctcctcaatgctatctacctgagtgccaagtggaagacaacatttgatcccaagaaaaccagaatggaaccctttcacttcaaaaactcagttataaaagtgcccatgatgaatagcaagaagtaccctgtggcccatttcattgaccaaactttgaaagccaaggtggggcagctgcagctctcccacaatctgagtttggtgatcctggtaccccagaacctgaaacatcgtcttgaagacatggaacaggctctcagcccttctgttttcaaggccatcatggagaaactggagatgtccaagttccagcccactctcctaacactaccccgcatcaaagtgacgaccagccaggatatgctctcaatcatggagaaattggaattcttcgatttttcttatgaccttaacctgtgtgggctgacagaggacccagatcttcaggtttctgcgatgcagcaccagacagtgctggaactgacagagactggggtggaggcggctgcagcctccgccatctctgtggcccgcaccctgctggtctttgaagtgcagcagcccttcctcttcgtgctctgggaccagcagcacaagttccctgtcttcatggggcgagtatatgaccccagggcctgagacctgcaggatcaggttagggcgagcgctacctctccagcctcagctctcagttgcagccctgctgctgcctgcctggacttggcccctgccacctcctgcctcaggtgtccgctatccaccaaaagggctccctgagggtctgggcaagggacctgcttctattagcccttctccatggccctgccatgctctccaaaccactttttgcagctttctctagttcaagttcaccagactctataaataaaacctgacagaccatgaaaaaaaaaaaacaaaaatggccttgttgggctcaacggaggagcttctcggcctgtttcct

SEQ ID NO: 303031 - DNA, 1914 bp, Homo sapiens
caggaactcacaccagcgatcaatcttccttaatttgtaactgggcagtgtcccgggccagccaatagctaagactgccccccccgcaccccaccctccctgaccctgggggactctctactcagtctgcactggagctgcctggtgaccagaagtttggagtccgctgacgtcgccgcccagatggcctccaggctgaccctgctgaccctcctgctgctgctgctggctggggatagagcctcctcaaatccaaatgctaccagctccagctcccaggatccagagagtttgcaagacagaggcgaagggaaggtcgcaacaacagttatctccaagatgctattcgttgaacccatcctggaggtttccagcttgccgacaaccaactcaacaaccaattcagccaccaaaataacagctaataccactgatgaacccaccacacaacccaccacagagcccaccacccaacccaccatccaacccacccaaccaactacccagctcccaacagattctcctacccagcccactactgggtccttctgcccaggacctgttactctctgctctgacttggagagtcattcaacagaggccgtgttgggggatgctttggtagatttctccctgaagctctaccacgccttctcagcaatgaagaaggtggagaccaacatggcgacttcacctgtgtccaccaggccctgaagggcttcacgaccaaaggtgtcacctcagtctctcagatcttccacagcccagacctggccataagggacacctttgtgaatgcctctcggaccctgtacagcagcagccccagagtcctaagcaacaacagtgacgccaacttggagctcatcaacacctgggtggccaagaacaccaacaacaagatcagccggctgctagacagtctgccctccgatacccgccttgtcctcctcaatgctatctacctgagtgccaagtggaagacaacatttgatcccaagaaaaccagaatggaaccctttcacttcaaaaactcagttataaaagtgcccatgatgaatagcaagaagtaccctgtggcccatttcattgaccaaactttgaaagccaaggtggggcagctgcagctctcccacaatctgagtttggtgatcctggtaccccagaacctgaaacatcgtcttgaagacatggaacaggctctcagcccttctgttttcaaggccatcatggagaaactggagatgtccaagttccagcccactctcctaacactaccccgcatcaaagtgacgaccagccaggatatgctctcaatcatggagaaattggaattcttcgatttttcttatgaccttaacctgtgtgggctgacagaggacccagatcttcaggtttctgcgatgcagcaccagacagtgctggaactgacagagactggggtggaggcggctgcagcctccgccatctctgtggcccgcaccctgctggtctttgaagtgcagcagcccttcctcttcgtgctctgggaccagcagcacaagttccctgtcttcatggggcgagtatatgaccccagggcctgagacctgcaggatcaggttagggcgagcgctacctctccagcctcagctctcagttgcagccctgctgctgcctgcctggacttggcccctgccacctcctgcctcaggtgtccgctatccaccaaaagggctccctgagggtctgggcaagggacctgcttctattagcccttctccatggccctgccatgctctccaaaccactttttgcagctttctctagttcaagttcaccagactctataaataaaacctgacagaccatgaaaaaaaaaaaacaaaaatggccttgttgggctcaacggaggagcttctcggcctgtttcct

SEQ ID NO: 303032 - DNA, 2421 bp, Homo sapiens
caggaactcacaccagcgatcaatcttccttaatttgtaactgggcagtgtcccgggccagccaatagctaagactgccccccccgcaccccaccctccctgaccctgggggactctctactcagtctgcactggagctgcctggtgaccagaagtttggagtccgctgacgtcgccgcccagatggcctccaggctgaccctgctgaccctcctgctgctgctgctggctggggatagagcctcctcaaatccaaatgctaccagctccagctcccaggatccagagagtttgcaagacagaggcgaagggaaggtcgcaacaacagttatctccaagatgctattcgttgaacccatcctggaggtttccagcttgccgacaaccaactcaacaaccaattcagccaccaaaataacagctaataccactgatgaacccaccacacaacccaccacagagcccaccacccaacccaccatccaacccacccaaccaactacccagctcccaacagattctcctacccagcccactactgggtccttctgcccaggacctgttactctctgctctgacttggagagtcattcaacagaggccgtgttgggggatgctttggtagatttctccctgaagctctaccacgccttctcagcaatgaagaaggtggagaccaacatggccttttccccattcagcatcgccagcctccttacccaggtcctgctcggggctggggagaacaccaaaacaaacctggagagcatcctctcttaccccaaggacttcacctgtgtccaccaggccctgaagggcttcacgaccaaaggtgtcacctcagtctctcagatcttccacagcccagtggactgaaggcttttgcagagcaaaagccaggaagttttgtcacaaacttccaccaaggccaggaagcagagtctattccgtgccaaaattaagggaagaaaagagggaaaatctaggcaaatggaatttaatatctcaaaaagattatcttgccgagccatagtcacatagcaagctgaggcagcggaggcttggggctacttctcttgttcttggttctgggtttaccttctttgggccttatttgccacatctgtaagaggagtgggctggaccgcgctccaccatgccgtattcactaagtgagcagatagaaccatagaaagcatgctcactctcaaatcgtgctcatggaaagaacgacgtgttcaggactcatgcctccctttctcaacatacccccagacctggccataagggacacctttgtgaatgcctctcggaccctgtacagcagcagccccagagtcctaagcaacaacagtgacgccaacttggagctcatcaacacctgggtggccaagaacaccaacaacaagatcagccggctgctagacagtctgccctccgatacccgccttgtcctcctcaatgctatctacctgagtgccaagtggaagacaacatttgatcccaagaaaaccagaatggaaccctttcacttcaaaaactcagttataaaagtgcccatgatgaatagcaagaagtaccctgtggcccatttcattgaccaaactttgaaagccaaggtggggcagctgcagctctcccacaatctgagtttggtgatcctggtaccccagaacctgaaacatcgtcttgaagacatggaacaggctctcagcccttctgttttcaaggccatcatggagaaactggagatgtccaagttccagcccactctcctaacactaccccgcatcaaagtgacgaccagccaggatatgctctcaatcatggagaaattggaattcttcgatttttcttatgaccttaacctgtgtgggctgacagaggacccagatcttcaggtttctgcgatgcagcaccagacagtgctggaactgacagagactggggtggaggcggctgcagcctccgccatctctgtggcccgcaccctgctggtctttgaagtgcagcagcccttcctcttcgtgctctgggaccagcagcacaagttccctgtcttcatggggcgagtatatgaccccagggcctgagacctgcaggatcaggttagggcgagcgctacctctccagcctcagctctcagttgcagccctgctgctgcctgcctggacttggcccctgccacctcctgcctcaggtgtccgctatccaccaaaagggctccctgagggtctgggcaagggacctgcttctattagcccttctccatggccctgccatgctctccaaaccactttttgcagctttctctagttcaagttcaccagactctataaataaaacctgacagaccatgaaaaaaaaaaaacaaaaatggccttgttgggctcaacggaggagcttctcggcctgtttcct

SEQ ID NO: 303033 - DNA, 1490 bp, Homo sapiens
ggccccaggagggaggaggagggaattcgctaagagggactggggcctgagacggaatgggggcgggccccgggcggggtgggggcccctgggctcccagggtgggagctggctccgaggctggctggctccgcaggtccgctgacgtcgccgcccagatggcctccaggctgaccctgctgaccctcctgctgctgctgctggctggggggctggggagaacaccaaaacaaacctggagagcatcctctcttaccccaaggacttcacctgtgtccaccaggccctgaagggcttcacgaccaaaggtgtcacctcagtctctcagatcttccacagcccagacctggccataagggacacctttgtgaatgcctctcggaccctgtacagcagcagccccagagtcctaagcaacaacagtgacgccaacttggagctcatcaacacctgggtggccaagaacaccaacaacaagatcagccggctgctagacagtctgccctccgatacccgccttgtcctcctcaatgctatctacctgagtgccaagtggaagacaacatttgatcccaagaaaaccagaatggaaccctttcacttcaaaaactcagttataaaagtgcccatgatgaatagcaagaagtaccctgtggcccatttcattgaccaaactttgaaagccaaggtggggcagctgcagctctcccacaatctgagtttggtgatcctggtaccccagaacctgaaacatcgtcttgaagacatggaacaggctctcagcccttctgttttcaaggccatcatggagaaactggagatgtccaagttccagcccactctcctaacactaccccgcatcaaagtgacgaccagccaggatatgctctcaatcatggagaaattggaattcttcgatttttcttatgaccttaacctgtgtgggctgacagaggacccagatcttcaggtttctgcgatgcagcaccagacagtgctggaactgacagagactggggtggaggcggctgcagcctccgccatctctgtggcccgcaccctgctggtctttgaagtgcagcagcccttcctcttcgtgctctgggaccagcagcacaagttccctgtcttcatggggcgagtatatgaccccagggcctgagacctgcaggatcaggttagggcgagcgctacctctccagcctcagctctcagttgcagccctgctgctgcctgcctggacttggcccctgccacctcctgcctcaggtgtccgctatccaccaaaagggctccctgagggtctgggcaagggacctgcttctattagcccttctccatggccctgccatgctctccaaaccactttttgcagctttctctagttcaagttcaccagactctataaataaaacctgacagaccatgaaaaaaaaaaaacaaaaatggccttgttgggctcaacggaggagcttctcggcctgtttcct

SEQ ID NO: 303034 - DNA, 1204 bp, Homo sapiens
acgggcatcacgatctaaacgggcacacggacactcagaacataccacagaccaggagacctggccataagggacacctttgtgaatgcctctcggaccctgtacagcagcagccccagagtcctaagcaacaacagtgacgccaacttggagctcatcaacacctgggtggccaagaacaccaacaacaagatcagccggctgctagacagtctgccctccgatacccgccttgtcctcctcaatgctatctacctgagtgccaagtggaagacaacatttgatcccaagaaaaccagaatggaaccctttcacttcaaaaactcagttataaaagtgcccatgatgaatagcaagaagtaccctgtggcccatttcattgaccaaactttgaaagccaaggtggggcagctgcagctctcccacaatctgagtttggtgatcctggtaccccagaacctgaaacatcgtcttgaagacatggaacaggctctcagcccttctgttttcaaggccatcatggagaaactggagatgtccaagttccagcccactctcctaacactaccccgcatcaaagtgacgaccagccaggatatgctctcaatcatggagaaattggaattcttcgatttttcttatgaccttaacctgtgtgggctgacagaggacccagatcttcaggtttctgcgatgcagcaccagacagtgctggaactgacagagactggggtggaggcggctgcagcctccgccatctctgtggcccgcaccctgctggtctttgaagtgcagcagcccttcctcttcgtgctctgggaccagcagcacaagttccctgtcttcatggggcgagtatatgaccccagggcctgagacctgcaggatcaggttagggcgagcgctacctctccagcctcagctctcagttgcagccctgctgctgcctgcctggacttggcccctgccacctcctgcctcaggtgtccgctatccaccaaaagggctccctgagggtctgggcaagggacctgcttctattagcccttctccatggccctgccatgctctccaaaccactttttgcagctttctctagttcaagttcaccagactctataaataaaacctgacagaccatgaaaaaaaaaaaacaaaaatggccttgttgggctcaacggaggagcttctcggcctgtttcct

SEQ ID NO: 303035 - DNA, 2016 bp, Homo sapiens
ggccccaggagggaggaggagggaattcgctaagagggactggggcctgagacggaatgggggcgggccccgggcggggtgggggcccctgggctcccagggtgggagctggctccgaggctggctggctccgcaggtccgctgacgtcgccgcccagatggcctccaggctgaccctgctgaccctcctgctgctgctgctggctggggatagagcctcctcaaatccaaatgctaccagctccagctcccaggatccagagagtttgcaagacagaggcgaagggaaggtcgcaacaacagttatctccaagatgctattcgttgaacccatcctggaggtttccagcttgccgacaaccaactcaacaaccaattcagccaccaaaataacagctaataccactgatgaacccaccacacaacccaccacagagcccaccacccaacccaccatccaacccacccaaccaactacccagctcccaacagattctcctacccagcccactactgggtccttctgcccaggacctgttactctctgctctgacttggagagtcattcaacagaggccgtgttgggggatgctttggtagatttctccctgaagctctaccacgccttctcagcaatgaagaaggtggagaccaacatggccttttccccattcagcatcgccagcctccttacccaggtcctgctcggggctggggagaacaccaaaacaaacctggagagcatcctctcttaccccaaggacttcacctgtgtccaccaggccctgaagggcttcacgaccaaaggtgtcacctcagtctctcagatcttccacagcccagacctggccataagggacacctttgtgaatgcctctcggaccctgtacagcagcagccccagagtcctaagcaacaacagtgacgccaacttggagctcatcaacacctgggtggccaagaacaccaacaacaagatcagccggctgctagacagtctgccctccgatacccgccttgtcctcctcaatgctatctacctgagtgagcaaccctcccacctcttccctctagccaagtggaagacaacatttgatcccaagaaaaccagaatggaaccctttcacttcaaaaactcagttataaaagtgcccatgatgaatagcaagaagtaccctgtggcccatttcattgaccaaactttgaaagccaaggtggggcagctgcagctctcccacaatctgagtttggtgatcctggtaccccagaacctgaaacatcgtcttgaagacatggaacaggctctcagcccttctgttttcaaggccatcatggagaaactggagatgtccaagttccagcccactctcctaacactaccccgcatcaaagtgacgaccagccaggatatgctctcaatcatggagaaattggaattcttcgatttttcttatgaccttaacctgtgtgggctgacagaggacccagatcttcaggtttctgcgatgcagcaccagacagtgctggaactgacagagactggggtggaggcggctgcagcctccgccatctctgtggcccgcaccctgctggtctttgaagtgcagcagcccttcctcttcgtgctctgggaccagcagcacaagttccctgtcttcatggggcgagtatatgaccccagggcctgagacctgcaggatcaggttagggcgagcgctacctctccagcctcagctctcagttgcagccctgctgctgcctgcctggacttggcccctgccacctcctgcctcaggtgtccgctatccaccaaaagggctccctgagggtctgggcaagggacctgcttctattagcccttctccatggccctgccatgctctccaaaccactttttgcagctttctctagttcaagttcaccagactctataaataaaacctgacagaccatgaaaaaaaaaaaacaaaaatggccttgttgggctcaacggaggagcttctcggcctgtttcct

SEQ ID NO: 303036 - DNA, 1943 bp, Homo sapiens
caggaactcacaccagcgatcaatcttccttaatttgtaactgggcagtgtcccgggccagccaatagctaagactgccccccccgcaccccaccctccctgaccctgggggactctctactcagtctgcactggagctgcctggtgaccagaagtttggagtccgctgacgtcgccgcccagatggcctccaggctgaccctgctgaccctcctgctgctgctgctggctggggatagagcctcctcaaatccaaatgctaccagctccagctcccaggatccagagagtttgcaagacagaggcgaagggaaggtcgcaacaacagttatctccaagatgctattcgttgaacccatcctggaggtttccagcttgccgacaaccaactcaacaaccaattcagccaccaaaataacagctaataccactgatgaacccaccacacaacccaccacagagcccaccacccaacccaccatccaacccacccaaccaactacccagctcccaacagattctcctacccagcccactactgggtccttctgcccaggacctgttactctctgctctgacttggagagtcattcaacagaggccgtgttgggggatgctttggtagatttctccctgaagctctaccacgccttctcagcaatgaagaaggtggagaccaacatggccttttccccattcagcatcgccagcctccttacccaggtcctgctcggggctggggagaacaccaaaacaaacctggagagcatcctctcttaccccaaggacttcacctgtgtccaccaggccctgaagggcttcacgaccaaaggtgtcacctcagtctctcagatcttccacagcccagacctggccataagggacacctttgtgaatgcctctcggaccctgtacagcagcagccccagagtcctaagcaacaacagtgacgccaacttggagctcatcaacacctgggtggccaagaacaccaacaacaagatcagccggctgctagacagtctgccctccgatacccgccttgtcctcctcaatgctatctacctgagtgccaagtggaagacaacatttgatcccaagaaaaccagaatggaaccctttcacttcaaaaactcagttagtggggcagctgcagctctcccacaatctgagtttggtgatcctggtaccccagaacctgaaacatcgtcttgaagacatggaacaggctctcagcccttctgttttcaaggccatcatggagaaactggagatgtccaagttccagcccactctcctaacactaccccgcatcaaagtgacgaccagccaggatatgctctcaatcatggagaaattggaattcttcgatttttcttatgaccttaacctgtgtgggctgacagaggacccagatcttcaggtttctgcgatgcagcaccagacagtgctggaactgacagagactggggtggaggcggctgcagcctccgccatctctgtggcccgcaccctgctggtctttgaagtgcagcagcccttcctcttcgtgctctgggaccagcagcacaagttccctgtcttcatggggcgagtatatgaccccagggcctgagacctgcaggatcaggttagggcgagcgctacctctccagcctcagctctcagttgcagccctgctgctgcctgcctggacttggcccctgccacctcctgcctcaggtgtccgctatccaccaaaagggctccctgagggtctgggcaagggacctgcttctattagcccttctccatggccctgccatgctctccaaaccactttttgcagctttctctagttcaagttcaccagactctataaataaaacctgacagaccatgaaaaaaaaaaaacaaaaatggccttgttgggctcaacggaggagcttctcggcctgtttcct

SEQ ID NO: 303037 - DNA, 1488 bp, Homo sapiens
caggaactcacaccagcgatcaatcttccttaatttgtaactgggcagtgtcccgggccagccaatagctaagactgccccccccgcaccccaccctccctgaccctgggggactctctactcagtctgcactggagctgcctggtgaccagaagtttggagtccgctgacgtcgccgcccagatggcctccaggctgaccctgctgaccctcctgctgctgctgctggctggggatagagcctcctcaaatccaaatgctaccagctccagctcccaggatccagagagtttgcaagacagaggcgaagggaaggtcgcaacaacagttatctccaagatgctattcgttgaacccatcctggaggtttccagcttgccgacaaccaactcaacagccccagagtcctaagcaacaacagtgacgccaacttggagctcatcaacacctgggtggccaagaacaccaacaacaagatcagccggctgctagacagtctgccctccgatacccgccttgtcctcctcaatgctatctacctgagtgccaagtggaagacaacatttgatcccaagaaaaccagaatggaaccctttcacttcaaaaactcagttataaaagtgcccatgatgaatagcaagaagtaccctgtggcccatttcattgaccaaactttgaaagccaaggtggggcagctgcagctctcccacaatctgagtttggtgatcctggtaccccagaacctgaaacatcgtcttgaagacatggaacaggctctcagcccttctgttttcaaggccatcatggagaaactggagatgtccaagttccagcccactctcctaacactaccccgcatcaaagtgacgaccagccaggatatgctctcaatcatggagaaattggaattcttcgatttttcttatgaccttaacctgtgtgggctgacagaggacccagatcttcaggtttctgcgatgcagcaccagacagtgctggaactgacagagactggggtggaggcggctgcagcctccgccatctctgtggcccgcaccctgctggtctttgaagtgcagcagcccttcctcttcgtgctctgggaccagcagcacaagttccctgtcttcatggggcgagtatatgaccccagggcctgagacctgcaggatcaggttagggcgagcgctacctctccagcctcagctctcagttgcagccctgctgctgcctgcctggacttggcccctgccacctcctgcctcaggtgtccgctatccaccaaaagggctccctgagggtctgggcaagggacctgcttctattagcccttctccatggccctgccatgctctccaaaccactttttgcagctttctctagttcaagttcaccagactctataaataaaacctgacagaccatgaaaaaaaaaaaacaaaaatggccttgttgggctcaacggaggagcttctcggcctgtttcct

SEQ ID NO: 303038 - DNA, 1014 bp, Homo sapiens
  misc_feature (2)..(3): n is a, c, g, or t
cnngagtgccaaatgttgtcttccacttggcactcaggtagatagcattgaggaggacaaggcgggtatcggagggcagactgtctagcagccggctgatcttgttgttggtgttcttggccacccaggtgttgatgagcttaaaagtgcccatgatgaatagcaagaagtaccctgtggcccatttcattgaccaaactttgaaagccaaggtggggcagctgcagctctcccacaatctgagtttggtgatcctggtaccccagaacctgaaacatcgtcttgaagacatggaacaggctctcagcccttctgttttcaaggccatcatggagaaactggagatgtccaagttccagcccactctcctaacactaccccgcatcaaagtgacgaccagccaggatatgctctcaatcatggagaaattggaattcttcgatttttcttatgaccttaacctgtgtgggctgacagaggacccagatcttcaggtttctgcgatgcagcaccagacagtgctggaactgacagagactggggtggaggcggctgcagcctccgccatctctgtggcccgcaccctgctggtctttgaagtgcagcagcccttcctcttcgtgctctgggaccagcagcacaagttccctgtcttcatggggcgagtatatgaccccagggcctgagacctgcaggatcaggttagggcgagcgctacctctccagcctcagctctcagttgcagccctgctgctgcctgcctggacttggcccctgccacctcctgcctcaggtgtccgctatccaccaaaagggctccctgagggtctgggcaagggacctgcttctattagcccttctccatggccctgccatgctctccaaaccactttttgcagctttctctagttcaagttcaccagactctataaataaaacctgacagaccatgaaaaaaaaaaaacaaaaatggccttgttgggctcaacggaggagcttctcggcctgtttcct

SEQ ID NO: 303039 - DNA, 1634 bp, Homo sapiens
  misc_feature (260)..(260): n is a, c, g, or t
gccctgcacttcttacatacttttgtctggtcaccagttgaaagtccttcttcttttttttttctctttttgagatggagtctcgctctgtcaccaggctggagtgcagtggcatgatctcggctcactgcagcctccacctcccgggttcaagcaattctcctgcctcagcctcctgagtagctgggattacaggcacgtgccaccacccagctaatttttgtatttttagtagaggtggggtttcatcatggtggccnggatggtctcaatctcttgacctcatgatccgcccacctcggcctcccaaagtgctgggattacaggtgtgagccaccgtgcatgaccaaaagtccttctaatagcaaagtggaaaggtaggctgtgaacaatcttgaatgccatactaagatttgtacttattctcataggcagtgaagagccatcaatagtttttacagaggctgacctgataactctggcggttcaatgtgcatgctatatactatatgcacaacacattaggaaggaagggaacagcgctcagagaaatcaaatcacttgcccatattacatagctcgtcagtggtggagtcagggtataatcagaaactcatgctccttcctctacctctccccagcacagagttggatcagcactgttcacccagctggtatccccatttcatggtaaagcctggaagcttaggtctgactgatgcttgttgaaatacagactgtgggagcagactgcaggacagcattgtgacagagggtggggccaggagagagatgcggtaggaagactgttaaggtgcatctcttattttctgtggggcagctgcagctctcccacaatctgagtttggtgatcctggtaccccagaacctgaaacatcgtcttgaagacatggaacaggctctcagcccttctgttttcaaggccatcatggagaaactggagatgtccaagttccagcccactctcctaacactaccccgcatcaaagtgacgaccagccaggatatgctctcaatcatggagaaattggaattcttcgatttttcttatgaccttaacctgtgtgggctgacagaggacccagatcttcaggtttctgcgatgcagcaccagacagtgctggaactgacagagactggggtggaggcggctgcagcctccgccatctctgtggcccgcaccctgctggtctttgaagtgcagcagcccttcctcttcgtgctctgggaccagcagcacaagttccctgtcttcatggggcgagtatatgaccccagggcctgagacctgcaggatcaggttagggcgagcgctacctctccagcctcagctctcagttgcagccctgctgctgcctgcctggacttggcccctgccacctcctgcctcaggtgtccgctatccaccaaaagggctccctgagggtctgggcaagggacctgcttctattagcccttctccatggccctgccatgctctccaaaccactttttgcagctttctctagttcaagttcaccagactctataaataaaacctgacagaccatgaaaaaaaaaaaacaaaaatggccttgttgggctcaacggaggagcttctcggcctgtttcct

SEQ ID NO: 303040 - DNA, 870 bp, Homo sapiens
tatattttaggctggaaacaggattctcaagtttcttcatgcatctctactatattgaatggcaaaatgtggggcagctgcagctctcccacaatctgagtttggtgatcctggtaccccagaacctgaaacatcgtcttgaagacatggaacaggctctcagcccttctgttttcaaggccatcatggagaaactggagatgtccaagttccagcccactctcctaacactaccccgcatcaaagtgacgaccagccaggatatgctctcaatcatggagaaattggaattcttcgatttttcttatgaccttaacctgtgtgggctgacagaggacccagatcttcaggtttctgcgatgcagcaccagacagtgctggaactgacagagactggggtggaggcggctgcagcctccgccatctctgtggcccgcaccctgctggtctttgaagtgcagcagcccttcctcttcgtgctctgggaccagcagcacaagttccctgtcttcatggggcgagtatatgaccccagggcctgagacctgcaggatcaggttagggcgagcgctacctctccagcctcagctctcagttgcagccctgctgctgcctgcctggacttggcccctgccacctcctgcctcaggtgtccgctatccaccaaaagggctccctgagggtctgggcaagggacctgcttctattagcccttctccatggccctgccatgctctccaaaccactttttgcagctttctctagttcaagttcaccagactctataaataaaacctgacagaccatgaaaaaaaaaaaacaaaaatggccttgttgggctcaacggaggagcttctcggcctgtttcct

SEQ ID NO: 303041 - DNA, 869 bp, Homo sapiens
caaactcaggggcgagctgttaactcaggccgagctgcagggtgaactcagaggcgagctgctaactgtggggcagctgcagctctcccacaatctgagtttggtgatcctggtaccccagaacctgaaacatcgtcttgaagacatggaacaggctctcagcccttctgttttcaaggccatcatggagaaactggagatgtccaagttccagcccactctcctaacactaccccgcatcaaagtgacgaccagccaggatatgctctcaatcatggagaaattggaattcttcgatttttcttatgaccttaacctgtgtgggctgacagaggacccagatcttcaggtttctgcgatgcagcaccagacagtgctggaactgacagagactggggtggaggcggctgcagcctccgccatctctgtggcccgcaccctgctggtctttgaagtgcagcagcccttcctcttcgtgctctgggaccagcagcacaagttccctgtcttcatggggcgagtatatgaccccagggcctgagacctgcaggatcaggttagggcgagcgctacctctccagcctcagctctcagttgcagccctgctgctgcctgcctggacttggcccctgccacctcctgcctcaggtgtccgctatccaccaaaagggctccctgagggtctgggcaagggacctgcttctattagcccttctccatggccctgccatgctctccaaaccactttttgcagctttctctagttcaagttcaccagactctataaataaaacctgacagaccatgaaaaaaaaaaaacaaaaatggccttgttgggctcaacggaggagcttctcggcctgtttcct

SEQ ID NO: 303042 - DNA, 1762 bp, Homo sapiens
caggaactcacaccagcgatcaatcttccttaatttgtaactgggcagtgtcccgggccagccaatagctaagactgccccccccgcaccccaccctccctgaccctgggggactctctactcagtctgcactggagctgcctggtgaccagaagtttggagtccgctgacgtcgccgcccagatggcctccaggctgaccctgctgaccctcctgctgctgctgctggctggggatagagcctcctcaaatccaaatgctaccagctccagctcccaggatccagagagtttgcaagacagaggcgaagggaaggtcgcaacaacagttatctccaagatgctattcgttgaacccatcctggaggtttccagcttgccgacaaccaactcaacaaccaattcagccaccaaaataacagctaataccactgatgaacccaccacacaacccaccacagagcccaccacccaacccaccatccaacccacccaaccaactacccagctcccaacagattctcctacccagcccactactgggtccttctgcccaggacctgttactctctgctctgacttggagagtcattcaacagaggccgtgttgggggatgctttggtagatttctccctgaagctctaccacgccttctcagcaatgaagaaggtggagaccaacatggccttttccccattcagcatcgccagcctccttacccaggtcctgctcggggctggggagaacaccaaaacaaacctggagagcatcctctcttaccccaaggacttcacctgtgtccaccaggccctgaagggcttcacgaccaaaggtgtcacctcagtctctcagatcttccacagcccagacctggccataagggacacctttgtgaatgcctctcggaccctgtacagcagcagccccagagtcctaagcaacaacagtgacgccaacttggagctcatcaacacctgggtggccaagaacaccaacaacaagatcagccggctgctagacagtctgccctccgatacccgccttgtcctcctcaatgctatctacctgagtgccaagtggaagacaacatttgatcccaagaaaaccagaatggaaccctttcacttcaaaaactcagttataaaagtgcccatgatgaatagcaagaagtaccctgtggcccatttcattgaccaaactttgaaagccaaggtggggcagctgcagctctcccacaatctgagtttggtgatcctggtaccccagaacctgaaacatcgtcttgaagacatggaacaggctctcagcccttctgttttcaaggccatcatggagaaactggagatgtccaagttccagcccactctcctaacactaccccgcatcaaagtgacgaccagccaggatatgctctcaatcatggagaaattggaattcttcgatttttcttatgaccttaacctgtgtgggctgacagaggacccagatcttcaggtttctgcgatgcagcaccagacagtgctggaactgacagagactggggtggaggcggctgcagcctccgccatctctgtggcccgcaccctgctggtctttgaagtgcagcagcccttcctcttcgtgctctgggaccagcagcacaagttccctgtcttcatggggcgagtatatgaccccaggttactcagtgaccatcaggataagatcaggacgcgacgtaccactccagtccagttacactcacgaatacagtgtatgacca

SEQ ID NO: 303043 - DNA, 1690 bp, Homo sapiens
caggaactcacaccagcgatcaatcttccttaatttgtaactgggcagtgtcccgggccagccaatagctaagactgccccccccgcaccccaccctccctgaccctgggggactctctactcagtctgcactggagctgcctggtgaccagaagtttggagtccgctgacgtcgccgcccagatggcctccaggctgaccctgctgaccctcctgctgctgctgctggctggggatagagcctcctcaaatccaaatgctaccagctccagctcccaggatccagagagtttgcaagacagaggcgaagggaaggtcgcaacaacagttatctccaagatgctattcgttgaacccatcctggaggtttccagcttgccgacaaccaactcaacaaccaattcagccaccaaaataacagctaataccactgatgaacccaccacacaacccaccacagagcccaccacccaacccaccatccaacccacccaaccaactacccagctcccaacagattctcctacccagcccactactgggtccttctgcccaggacctgttactctctgctctgacttggagagtcattcaacagaggccgtgttgggggatgctttggtagatttctccctgaagctctaccacgccttctcagcaatgaagaaggtggagaccaacatggccttttccccattcagcatcgccagcctccttacccaggtcctgctcggggctggggagaacaccaaaacaaacctggagagcatcctctcttaccccaaggacttcacctgtgtccaccaggccctgaagggcttcacgaccaaaggtgtcacctcagtctctcagatcttccacagcccagacctggccataagggacacctttgtgaatgcctctcggaccctgtacagcagcagccccagagtcctaagcaacaacagtgacgccaacttggagctcatcaacacctgggtggccaagaacaccaacaacaagatcagccggctgctagacagtctgccctccgatacccgccttgtcctcctcaatgctatctacctgagtgccaagtggaagacaacatttgatcccaagaaaaccagaatggaaccctttcacttcaaaaactcagttataaaagtgcccatgatgaatagcaagaagtaccctgtggcccatttcattgaccaaactttgaaagccaaggtggggcagctgcagctctcccacaatctgagtttggtgatcctggtaccccagaacctgaaacatcgtcttgaagacatggaacaggctctcagcccttctgttttcaaggccatcatggagaaactggagatgtccaagttccagcccactctcctaacactaccccgcatcaaagtgacgaccagccaggatatgctcagttgcagccctgctgctgcctgcctggacttggcccctgccacctcctgcctcaggtgtccgctatccaccaaaagggctccctgagggtctgggcaagggacctgcttctattagcccttctccatggccctgccatgctctccaaaccactttttgcagctttctctagttcaagttcaccagactctataaataaaacctgacagaccatgaaaaaaaaaaaacaaaaatggccttgttgggctcaacggaggagcttctcggcctgtttcct

SEQ ID NO: 303044 - DNA, 1488 bp, Homo sapiens
  misc_feature (1433)..(1433): n is a, c, g, or t
caggaactcacaccagcgatcaatcttccttaatttgtaactgggcagtgtcccgggccagccaatagctaagactgccccccccgcaccccaccctccctgaccctgggggactctctactcagtctgcactggagctgcctggtgaccagaagtttggagtccgctgacgtcgccgcccagatggcctccaggctgaccctgctgaccctcctgctgctgctgctggctggggatagagcctcctcaaatccaaatgctaccagctccagctcccaggatccagagagtttgcaagacagaggcgaagggaaggtcgcaacaacagttatctccaagatgctattcgttgaacccatcctggaggtttccagcttgccgacaaccaactcaacaaccaattcagccaccaaaataacagctaataccactgatgaacccaccacacaacccaccacagagcccaccacccaacccaccatccaacccacccaaccaactacccagctcccaacagattctcctacccagcccactactgggtccttctgcccaggacctgttactctctgctctgacttggagagtcattcaacagaggccgtgttgggggatgctttggtagatttctccctgaagctctaccacgccttctcagcaatgaagaaggtggagaccaacatggccttttccccattcagcatcgccagcctccttacccaggtcctgctcggggctggggagaacaccaaaacaaacctggagagcatcctctcttaccccaaggacttcacctgtgtccaccaggccctgaagggcttcacgaccaaaggtgtcacctcagtctctcagatcttccacagcccagacctggccataagggacacctttgtgaatgcctctcggaccctgtacagcagcagccccagagtcctaagcaacaacagtgacgccaacttggagctcatcaacacctgggtggccaagaacaccaacaacaagatcagccggctgctagacagtctgccctccgatacccgccttgtcctcctcaatgctatctacctgagtgccaagtggaagacaacatttgatcccaagaaaaccagaatggaaccctttcacttcaaaaactcagttataaaagtgcccatgatgaatagcaagaagtaccctgtggcccatttcattgaccaaactttgaaagccaaggtggggcagctgcagctctcccacaatctgagtttggtgatcctggtaccccagaacctgaaacatcgtcttgaagacatggaacaggctctcagcccttctgttttcaaggccatcatggagaaactggagatgtccaagttccagcccactctcctaacactaccccgcatcaaagtgacgaccagccaggatatgctctcaatcatggagaaattggnaatccttcgatttttcttatcagtccaacatccggggtcagtccaacatccgggt

SEQ ID NO: 303045 - DNA, 1673 bp, Homo sapiens
caggaactcacaccagcgatcaatcttccttaatttgtaactgggcagtgtcccgggccagccaatagctaagactgccccccccgcaccccaccctccctgaccctgggggactctctactcagtctgcactggagctgcctggtgaccagaagtttggagtccgctgacgtcgccgcccagatggcctccaggctgaccctgctgaccctcctgctgctgctgctggctggggatagagcctcctcaaatccaaatgctaccagctccagctcccaggatccagagagtttgcaagacagaggcgaagggaaggtcgcaacaacagttatctccaagatgctattcgttgaacccatcctggaggtttccagcttgccgacaaccaactcaacaaccaattcagccaccaaaataacagctaataccactgatgaacccaccacacaacccaccacagagcccaccacccaacccaccatccaacccacccaaccaactacccagctcccaacagattctcctacccagcccactactgggtccttctgcccaggacctgttactctctgctctgacttggagagtcattcaacagaggccgtgttgggggatgctttggtagatttctccctgaagctctaccacgccttctcagcaatgaagaaggtggagaccaacatggccttttccccattcagcatcgccagcctccttacccaggtcctgctcggggctggggagaacaccaaaacaaacctggagagcatcctctcttaccccaaggacttcacctgtgtccaccaggccctgaagggcttcacgaccaaaggtgtcacctcagtctctcagatcttccacagcccagacctggccataagggacacctttgtgaatgcctctcggaccctgtacagcagcagccccagagtcctaagcaacaacagtgacgccaacttggagctcatcaacacctgggtggccaagaacaccaacaacaagatcagccggctgctagacagtctgccctccgatacccgccttgtcctcctcaatgctatctacctgagtgccaagtggaagacaacatttgatcccaagaaaaccagaatggaaccctttcacttcaaaaactcagttataaaagtgcccatgatgaatagcaagaagtaccctgtggcccatttcattgaccaaactttgaaagccaaggtggggcagctgcagctctcccacaatctgagtttggtgatcctggtaccccagaacctgaaacatcgtgctctgggaccagcagcacaagttccctgtcttcatggggcgagtatatgaccccagggcctgagacctgcaggatcaggttagggcgagcgctacctctccagcctcagctctcagttgcagccctgctgctgcctgcctggacttggcccctgccacctcctgcctcaggtgtccgctatccaccaaaagggctccctgagggtctgggcaagggacctgcttctattagcccttctccatggccctgccatgctctccaaaccactttttgcagctttctctagttcaagttcaccagactctataaataaaacctgacagaccatgaaaaaaaaaaaacaaaaatggccttgttgggctcaacggaggagcttctcggcctgtttcct

SEQ ID NO: 303046 - DNA, 595 bp, Homo sapiens
gcggccgcctactactactaaattcgcggccgcgtcgacaacctgtgtgggctgacagaggacccagatcttcaggtttctgcgatgcagcaccagacagtgctggaactgacagagactggggtggaggcggctgcagcctccgccatctctgtggcccgcaccctgctggtctttgaagtgcagcagcccttcctcttcgtgctctgggaccagcagcacaagttccctgtcttcatggggcgagtatatgaccccagggcctgagacctgcaggatcaggttagggcgagcgctacctctccagcctcagctctcagttgcagccctgctgctgcctgcctggacttggcccctgccacctcctgcctcaggtgtccgctatccaccaaaagggctccctgagggtctgggcaagggacctgcttctattagcccttctccatggccctgccatgctctccaaaccactttttgcagctttctctagttcaagttcaccagactctataaataaaacctgacagaccatgaaaaaaaaaaaacaaaaatggccttgttgggctcaacggaggagcttctcggcctgtttcct

SEQ ID NO: 303047 - DNA, 1344 bp, Homo sapiens
caggaactcacaccagcgatcaatcttccttaatttgtaactgggcagtgtcccgggccagccaatagctaagactgccccccccgcaccccaccctccctgaccctgggggactctctactcagtctgcactggagctgcctggtgaccagaagtttggagtccgctgacgtcgccgcccagatggcctccaggctgaccctgctgaccctcctgctgctgctgctggctggggatagagcctcctcaaatccaaatgctaccagctccagctcccaggatccagagagtttgcaagacagaggcgaagggaaggtcgcaacaacagttatctccaagatgctattcgttgaacccatcctggaggtttccagcttgccgacaaccaactcaacaaccaattcagccaccaaaataacagctaataccactgatgaacccaccacacaacccaccacagagcccaccacccaacccaccatccaacccacccaaccaactacccagctcccaacagattctcctacccagcccactactgggtccttctgcccaggacctgttactctctgctctgacttggagagtcattcaacagaggccgtgttgggggatgctttggtagatttctccctgaagctctaccacgccttctcagcaatgaagaaggtggagaccaacatggccttttccccattcagcatcgccagcctccttacccaggtcctgctcggggctggggagaacaccaaaacaaacctggagagcatcctctcttaccccaaggacttcacctgtgtccaccaggccctgaagggcttcacgaccaaaggtgtcacctcagtctctcagatcttccacagcccagacctggccataagggacacctttgtgaatgcctctcggaccctgtacagcagcagccccagagtcctaagcaacaacagtgacgccaacttggagctcatcaacacctgggtggccaagaacaccaacaacaagatcagccggctgctagacagtctgccctccgatacccgccttgtcctcctcaatgctatctacctgagtgccaagtggaagacaacatttgatcccaagaaaaccagaatggaaccctttcacttcaaaaactcagttataaaagtgcccatgatgaatagcaagaagtaccctgtggcccatttcattgaccaaactttgaaagccaagtttgtgggacaaaaacttgatactacaggcaattggaagagagttagttacatcggaaaggccagtacctggcacgtagtcttgcagatcaagttacaggcggatcatgcctttgtgtatctatcaaaatga

SEQ ID NO: 303048 - DNA, 1302 bp, Homo sapiens
  misc_feature (1194)..(1194): n is a, c, g, or t
caggaactcacaccagcgatcaatcttccttaatttgtaactgggcagtgtcccgggccagccaatagctaagactgccccccccgcaccccaccctccctgaccctgggggactctctactcagtctgcactggagctgcctggtgaccagaagtttggagtccgctgacgtcgccgcccagatggcctccaggctgaccctgctgaccctcctgctgctgctgctggctggggatagagcctcctcaaatccaaatgctaccagctccagctcccaggatccagagagtttgcaagacagaggcgaagggaaggtcgcaacaacagttatctccaagatgctattcgttgaacccatcctggaggtttccagcttgccgacaaccaactcaacaaccaattcagccaccaaaataacagctaataccactgatgaacccaccacacaacccaccacagagcccaccacccaacccaccatccaacccacccaaccaactacccagctcccaacagattctcctacccagcccactactgggtccttctgcccaggacctgttactctctgctctgacttggagagtcattcaacagaggccgtgttgggggatgctttggtagatttctccctgaagctctaccacgccttctcagcaatgaagaaggtggagaccaacatggccttttccccattcagcatcgccagcctccttacccaggtcctgctcggggctggggagaacaccaaaacaaacctggagagcatcctctcttaccccaaggacttcacctgtgtccaccaggccctgaagggcttcacgaccaaaggtgtcacctcagtctctcagatcttccacagcccagacctggccataagggacacctttgtgaatgcctctcggaccctgtacagcagcagccccagagtcctaagcaacaacagtgacgccaacttggagctcatcaacacctgggtggccaagaacaccaacaacaagatcagccggctgctagacagtctgccctccgatacccgccttgtcctcctcaatgctatctacctgagtgccaagtggaagacaacatttgatcccaagaaaaccagaatggaaccctttcacttcaaaaactcagttataaaagtgcccatgatgaatagcaagaagtgcgcctgggtgcagaagtgcgcntgggtgcagaagtgcgcctgggtgcagaagtgcgcctgggtgcagaagtgcgccgggtgcagaagtgcgcctgggtgcagaagtgcgcctgggtgcagaagcgcctgg

SEQ ID NO: 303049 - DNA, 1149 bp, Homo sapiens
caggaactcacaccagcgatcaatcttccttaatttgtaactgggcagtgtcccgggccagccaatagctaagactgccccccccgcaccccaccctccctgaccctgggggactctctactcagtctgcactggagctgcctggtgaccagaagtttggagtccgctgacgtcgccgcccagatggcctccaggctgaccctgctgaccctcctgctgctgctgctggctggggatagagcctcctcaaatccaaatgctaccagctccagctcccaggatccagagagtttgcaagacagaggcgaagggaaggtcgcaacaacagttatctccaagatgctattcgttgaacccatcctggaggtttccagcttgccgacaaccaactcaacaaccaattcagccaccaaaataacagctaataccactgatgaacccaccacacaacccaccacagagcccaccacccaacccaccatccaacccacccaaccaactacccagctcccaacagattctcctacccagcccactactgggtccttctgcccaggacctgttactctctgctctgacttggagagtcattcaacagaggccgtgttgggggatgctttggtagatttctccctgaagctctaccacgccttctcagcaatgaagaaggtggagaccaacatggccttttccccattcagcatcgccagcctccttacccaggtcctgctcggggctggggagaacaccaaaacaaacctggagagcatcctctcttaccccaagtcttcatggggcgagtatatgaccccagggcctgagacctgcaggatcaggttagggcgagcgctacctctccagcctcagctctcagttgcagccctgctgctgcctgcctggacttggcccctgccacctcctgcctcaggtgtccgctatccaccaaaagggctccctgagggtctgggcaagggacctgcttctattagcccttctccatggccctgccatgctctccaaaccactttttgcagctttctctagttcaagttcaccagactctataaataaaacctgacagaccatgaaaaaaaaaaaacaaaaatggccttgttgggctcaacggaggagcttctcggcctgtttcct

SEQ ID NO: 303050 - DNA, 1705 bp, Homo sapiens
caggaactcacaccagcgatcaatcttccttaatttgtaactgggcagtgtcccgggccagccaatagctaagactgccccccccgcaccccaccctccctgaccctgggggactctctactcagtctgcactggagctgcctggtgaccagaagtttggagtccgctgacgtcgccgcccagatggcctccaggctgaccctgctgaccctcctgctgctgctgctggctggggatagagcctcctcaaatccaaatgctaccagctccagctcccaggatccagagagtttgcaagacagaggcgaagggaaggtcgcaacaacagttatctccaagatgctattcgttgaacccatcctggaggtttccagcttgccgacaaccaactcaacaaccaattcagccaccaaaataacagctaataccactgatgaacccaccacacaacccaccacagagcccaccacccaacccaccatccaacccacccaaccaactacccagctcccaacagattctcctacccagcccactactgggtccttctgcccaggacctgttactctctgctctgacttggagagtcattcaacagaggccgtgttgggggatgctttggtagatttctccctgaagctctaccacgccttctcagcaatgaagaaggtggagaccaacatggccttttccccattcagcatcgccagcctccttacccaggtcctgctcggggctggggagaacaccaaaacaaacctggagagcatcctctcttaccccaaggacttcacctgtgtccaccaggccctgaagggcttcacgaccaaaggtgtcacctcagtctctcagatcttccacagcccagtggactgaaggcttttgcagagcaaaagccaggaagttttgtcacaaacttccaccaaggccaggaagcagagtctattccgtgccaaaattaagggaagaaaagagggaaaatctaggcaaatggaatttaatatctcaaaaagattatcttgccgagccatagtcacatagcaagctgaggcagcggaggcttggggctacttctcttgttcttggttctgggtttaccttctttgggccttatttgccacatctgtaagaggagtgggctggaccgcgctccaccatgccgtattcactaagtgagcagatagaaccatagaaagcatgctcactctcaaatcgtgctcatggaaagaacgacgtgttcaggactcatgcctccctttctcaacatacccccagacctggccataagggacacctttgtgaatgcctctcggaccctgtacagcagcagccccagagtcctaagcaacaacagtgacgccaacttggagctcatcaacacctgggtggccattgtcatgtgatgggtcccctccaggttactaaagggtgcatgtcccctgcttgaacactgaagggcaggtggtgggccatggccatggtccccagctgaggagcaggtgtccctgagaacccaaacttcccagagagtatgtgagaaccaaccaatgaaaacagtcccatcgctcttacccggtaagtaaacagtcagaaaattagcatgaaagcagtttagcattgggaggaagctcagatctctagagctgtcttgtcgccgcccaggattgacctgtgtgtaagtcccaataaactcacctactcatca

SEQ ID NO: 303051 - DNA, 1671 bp, Homo sapiens
gctaggcccagagagcctggaggaggagcctctgccagactggagagaagcaggcctgagcctccccaaaggcagctcctggggactcccaggaccacaggctgagacgagacgcagggtggctggaggaagtgagaggtgaactcagcctgggactggctgggcgagactctccacctgctccctgggaccatcgcccaccatggctgtggcccagcagctgcgggccgagagtgactttgaacagcttccggatgatgttgccatctcggccaacattgctgacatcgaggagaagagaggcttcaccagccactttgttttcgtcatcgaggtgaagacaaaaggaggatccaagtacctcatctaccgccgctaccgccagttccatgctttgcagagcaagctggaggagcgcttcgggccagacagcaagagcagtgccctggcctgtaccctgcccacactcccagccaaagtctacgtgggtgtgaaacaggagatcgccgagatgcggatacctgccctcaacgcctacatgaagagcctgctcagcctgccggtctgggtgctgatggatgaggacgtccggatcttcttttaccagtcgccctatgactcagagcaggtgccccaggcactccgccggctccgcccgcgcacccggaaagtcaagagcgtgtccccacagggcaacagcgttgaccgcatggcagctccgagagcagaggctctatttgacttcactggaaacagcaaactggagctgaatttcaaagctggagatgtgatcttcctcctcagtcggatcaacaaagactggctggagggcactgtccggggagccacgggcatcttccctctctccttcgtgaagatcctcaaagacttccctgaggaggacgaccccaccaactggctgcgttgctactactacgaagacaccatcagcaccatcaagtctgtggcctgggagggaggggcctgtccagccttcctgccatccctacgaccaccgcccctcacatcaccttctcatgggtccctctcccactccaaagcccccagtggctcccagatgagccacaatgctgtaacaagccatcaacgtccagggtggcctggccagcctcattcccctttcccccaccccacaccccacttccagcctgatgcctccttactccagcctgtcacccccttagggacatcgcggtggaggaagatctcagcagcactcccctattgaaagacctgctggagctcacaaggcgggagttccagagagaggacatagctctgaattaccgggacgctgagggggatctggttcggctgctgtcggatgaggacgtagcgctcatggtgcggcaggctcgtggcctcccctcccagaagcgcctcttcccctggaagctgcacatcacgcagaaggacaactacagggtctacaacacgatgccatgagctgacggtgtccctggagcagtgaggggacaccagcaaaaaccttcagctctcagaggagattgggaccaggaaaacctgggaggatgggcagacttcctgtctttgaggctaatggacccgtggggcttgtaatctgtctctttctactatttacatctgatttaaataaaccattccatctgaaaggggcaaaaaaaaaaa

SEQ ID NO: 303052 - DNA, 740 bp, Homo sapiens
gctaggcccagagagcctggaggaggagcctctgccagactggagagaagcaggcctgagcctccccaaaggcagctcctggggactcccaggaccacaggctgagacgagacgcagggtggctggaggaagtgagaggtgaactcagcctgggactggctgggcgagactctccacctgctccctgggaccatcgcccaccatggctgtggcccagcagctgcgggccgagaggtgagtgccggggtgtggccgcccccgggccttctcactgctcctcataggccttagggacaaaggccagtccttctgcagtccctgatcaacatgagaggctggggttgagtcagaacccaaatactcagaaatgcaacctctcagaactgctttaacgaaactttgagctgtggctcaccaccctcagacacaaatgagaacactgaggctccaagagtgggagtgacttgcccacggtcacacaacgagtgaccggcagtgtctggagaggaatgcaggtgtcctgggtcccaggctggggccctttgcttcacatggtgatcagcaatgactttccatcttctgcgcaaacagaattcacagaatctggcttgttcttccgctaatcagggcttgcctcaaatgtcacctcctccaagaagccttcctgacagcccctacctcattgctgtctgaccctttgccctatttcccttttctgcctggttcttatattacaggaa

SEQ ID NO: 303053 - DNA, 1426 bp, Homo sapiens
gctaggcccagagagcctggaggaggagcctctgccagactggagagaagcaggcctgagcctccccaaaggcagctcctggggactcccaggaccacaggctgagacgagacgcagggtggctggaggaagtgagaggtgaactcagcctgggactggctgggcgagactctccacctgctccctgggaccatcgcccaccatggctgtggcccagcagctgcgggccgagagtgactttgaacagcttccggatgatgttgccatctcggccaacattgctgacatcgaggagaagagaggcttcaccagccactttgttttcgtcatcgaggtgaagacaaaaggaggatccaagtacctcatctaccgccgctaccgccagttccatgctttgcagagcaagctggaggagcgcttcgggccagacagcaagagcagtgccctggcctgtaccctgcccacactcccagccaaagtctacgtgggtgtgaaacaggagatcgccgagatgcggatacctgccctcaacgcctacatgaagagcctgctcagcctgccggtctgggtgctgatggatgaggacgtccggatcttcttttaccagtcgccctatgactcagagcaggtgccccaggcactccgccggctccgcccgcgcacccggaaagtcaagagcgtgtccccacagggcaacagcgttgaccgcatggcagctccgagagcagaggctctatttgacttcactggaaacagcaaactggagctgaatttcaaagctggagatgtgatcttcctcctcagtcggatcaacaaagactggctggagggcactgtccggggagccacgggcatcttccctctctccttcgtgaagatcctcaaagacttccctgaggaggacgaccccaccaactggctgcgttgctactactacgaagacaccatcagcaccatcaaggacatcgcggtggaggaagatctcagcagcactcccctattgaaagacctgctggagctcacaaggcgggagttccagagagaggacatagctctgaattaccgggacgctgagggggatctggttcggctgctgtcggatgaggacgtagcgctcatggtgcggcaggctcgtggcctcccctcccagaagcgcctcttcccctggaagctgcacatcacgcagaaggacaactacagggtctacaacacgatgccatgagctgacggtgtccctggagcagtgaggggacaccagcaaaaaccttcagctctcagaggagattgggaccaggaaaacctgggaggatgggcagacttcctgtctttgaggctaatggacccgtggggcttgtaatctgtctctttctactatttacatctgatttaaataaaccattccatctgaaaggggcaaaaaaaaaaa

SEQ ID NO: 303054 - DNA, 1354 bp, Homo sapiens
ggggagagtctcgcccagccagtcccaggctgagttcacctctcacttcctccagccaccctgcgtctcgtctcagcctgggactggctgggcgagactctccacctgctccctgggaccatcgcccaccatggctgtggcccagcagctgcgggccgagagtgactttgaacagcttccggatgatgttgccatctcggccaacattgctgacatcgaggagaagagaggcttcaccagccactttgttttcgtcatcgaggtgaagacaaaaggaggatccaagtacctcatctaccgccgctaccgccagttccatgctttgcagagcaagctggaggagcgcttcgggccagacagcaagagcagtgccctggcctgtaccctgcccacactcccagccaaagtctacgtgggtgtgaaacaggagatcgccgagatgcggatacctgccctcaacgcctacatgaagagcctgctcagcctgccggtctgggtgctgatggatgaggacgtccggatcttcttttaccagtcgccctatgactcagagcaggtgccccaggcactccgccggctccgcccgcgcacccggaaagtcaagagcgtgtccccacagggcaacagcgttgaccgcatggcagctccgagagcagaggctctatttgacttcactggaaacagcaaactggagctgaatttcaaagctggagatgtgatcttcctcctcagtcggatcaacaaagactggctggagggcactgtccggggagccacgggcatcttccctctctccttcgtgaagatcctcaaagacttccctgaggaggacgaccccaccaactggctgcgttgctactactacgaagacaccatcagcaccatcaaggacatcgcggtggaggaagatctcagcagcactcccctattgaaagacctgctggagctcacaaggcgggagttccagagagaggacatagctctgaattaccgggacgctgagggggatctggttcggctgctgtcggatgaggacgtagcgctcatggtgcggcaggctcgtggcctcccctcccagaagcgcctcttcccctggaagctgcacatcacgcagaaggacaactacagggtctacaacacgatgccatgagctgacggtgtccctggagcagtgaggggacaccagcaaaaaccttcagctctcagaggagattgggaccaggaaaacctgggaggatgggcagacttcctgtctttgaggctaatggacccgtggggcttgtaatctgtctctttctactatttacatctgatttaaataaaccattccatctgaaaggggcaaaaaaaaaaa

SEQ ID NO: 303055 - DNA, 1062 bp, Homo sapiens
ctggagtcagggagacctgggttcaattcccagctcctccactaaaaaatggggtggcctcagagaagtcgcttattctccccaagcctcagtttctacatctgtaaaatgggagactaaagctctatttgacttcactggaaacagcaaactggagctgaatttcaaagctggagatgtgatcttcctcctcagtcggatcaacaaagactggctggagggcactgtccggggagccacgggcatcttccctctctccttcgtgaagatcctcaaagacttccctgaggaggacgaccccaccaactggctgcgttgctactactacgaagacaccatcagcaccatcaagtctgtggcctgggagggaggggcctgtccagccttcctgccatccctacgaccaccgcccctcacatcaccttctcatgggtccctctcccactccaaagcccccagtggctcccagatgagccacaatgctgtaacaagccatcaacgtccagggtggcctggccagcctcattcccctttcccccaccccacaccccacttccagcctgatgcctccttactccagcctgtcacccccttagggacatcgcggtggaggaagatctcagcagcactcccctattgaaagacctgctggagctcacaaggcgggagttccagagagaggacatagctctgaattaccgggacgctgagggggatctggttcggctgctgtcggatgaggacgtagcgctcatggtgcggcaggctcgtggcctcccctcccagaagcgcctcttcccctggaagctgcacatcacgcagaaggacaactacagggtctacaacacgatgccatgagctgacggtgtccctggagcagtgaggggacaccagcaaaaaccttcagctctcagaggagattgggaccaggaaaacctgggaggatgggcagacttcctgtctttgaggctaatggacccgtggggcttgtaatctgtctctttctactatttacatctgatttaaataaaccattccatctgaaaggggcaaaaaaaaaaa

SEQ ID NO: 303056 - DNA, 325 bp, Homo sapiens
acatcgaggagaagagaggcttcaccagccactttgtaagacagactcctagtccttcacccaacaacctctgaacttccacccagctgacctctgaaccttgccctctgacctctgaacctccaattctctgatctcttaacttctatctcagtggttctcaacaggaccgattttgcccatttgacattaccctgggagattctgattattgcatcttggggcaggtctactccacatctagtgggtagaatccagggtgctgctaaacaccccactgtgcacatgacagccctgtccccagtaaagaactgtccggccccag

SEQ ID NO: 303057 - DNA, 459 bp, Homo sapiens
aagcctttgttgaatgaataagtgaatgagtgagataaaagcagctttctatataaatccagattctggcatattgtaaaacccaaatataagccttcttagaagtgaccagctcagcgaacttcctcgctttccctcctccctctacagaagaagacccggacctcatctgcctttccccatcactagaacggggctgagggctctgaggcgtggctctgctgcctctcctctcaccagcatggcatcccttctcttcctctgcagggcactgtccggggagccacgggcatcttccctctctccttcgtgaagatcctcaaagacttccctgaggaggacgaccccaccaactggctgcgttgctactactacgaagacaccatcagcaccatcaagtctgtggcctgggagggaggggcctgtccagccttcctgccatccctacgaccaccgccc

SEQ ID NO: 303058 - DNA, 388 bp, Homo sapiens
gtccctggactttgggactcattctgctcgacttgatccccgctctgcccattgatcacatacacacgtttacacctggcagaagaggaagaggaggcatgaaggaatggcctcttcagaatggagaaaagccttccccatgagaacatgcctaagacagactgctgaagaaggcggcaagtggaacagcgctgaatcagcctggtcatcccagtcaagcctccagacatgtaagcaccctcctctgatctgcagagctgcctggcccaaatactgttgaccactcttgagtaagccccaccaagatcagctgagaacagtagaactgaccagatgactctaacctcatgaataaatccaagtgtttttttatttgcctctgaaattt

SEQ ID NO: 303059 - DNA, 534 bp, Homo sapiens
  misc_feature (531)..(532): n is a, c, g, or t
  misc_feature (534)..(534): n is a, c, g, or t
gatgaatctgaccacagatcctttataccctggaccacaaaagggaggagaagaacttgaacagaaaatgcagttaggggtttggattactgccttgtgactaataaataggactagacactttcatccccacatataagacagtcagctcacagagaaaaatgacaaggtgggtctgcaaacaacggaagcactggcgcaccaaaacttgatctacagagccatctgaaactataaacaaatatgctgatgaatattaagaagatgaaagaaagaaaccaaaggtttaaaaatatgatgctgaaaacaatgaaatgtctctaggtaattaaacagtatggcaggtaatctaatttaaaactaaaacccagctcaaactaagaaaacatattcccaccctctgcttgatttgctttctttcaagggcctttaaagcaaaacactaaccatgaagagttttacttttcccaggaaatgaaatattttctaacacagaacagcaaataaaatactttttctaacacaaaaaannan

SEQ ID NO: 303060 - DNA, 4397 bp, Homo sapiens
  misc_feature (4395)..(4395): n is a, c, g, or t
ggagggggtccttgccaggcctggggcggccgggggcggtcctgggctcccctccgtcccgcctccaggcctcggggcctggctggccgacgtggcgttggcggcgctgcgcgcgggagggcagggcaggagggacagaggcgggggcgggccggaaagtttgtccggcggcagcggcgttggggactccggcgggggatgcgcgcccggcccctcagcgcccccagcacgccgccgagtcccgctcgccatgggccactccccacctgtcctgcctttgtgtgcctctgtgtctttgctgggtggcctgacctttggttatgaactggcagtcatatcaggtgccctgctgccactgcagcttgactttgggctaagctgcttggagcaggagttcctggtgggcagcctgctcctgggggctctcctcgcctccctggttggtggcttcctcattgactgctatggcaggaagcaagccatcctcgggagcaacttggtgctgctggcaggcagcctgaccctgggcctggctggttccctggcctggctggtcctgggccgcgctgtggttggcttcgccatttccctctcctccatggcttgctgtatctacgtgtcagagctggtggggccacggcagcggggagtgctggtgtccctctatgaggcaggcatcaccgtgggcatcctgctctcctatgccctcaactatgcactggctggtaccccctggggatggaggcacatgttcggctgggccactgcacctgctgtcctgcaatccctcagcctcctcttcctccctgctggtacagatgagactgcaacacacaaggacctcatcccactccagggaggtgaggcccccaagctgggcccggggaggccacggtactcctttctggacctcttcagggcacgcgataacatgcgaggccggaccacagtgggcctggggctggtgctcttccagcaactaacagggcagcccaacgtgctgtgctatgcctccaccatcttcagctccgttggtttccatgggggatcctcagccgtgctggcctctgtggggcttggcgcagtgaaggtggcagctaccctgaccgccatggggctggtggaccgtgcaggccgcagggctctgttgctagctggctgtgccctcatggccctgtccgtcagtggcataggcctcgtcagctttgccgtgcccatggactcaggcccaagctgtctggctgtgcccaatgccaccgggcagacaggcctccctggagactctggcctgctgcaggactcctctctacctcccattccaaggaccaatgaggaccaaagggagccaatcttgtccactgctaagaaaaccaagccccatcccagatctggagacccctcagcccctcctcggctggccctgagctctgccctccctgggccccctctgcccgctcgggggcatgcactgctgcgctggaccgcactgctgtgcctgatggtctttgtcagtgccttctcctttgggtttgggccagtgacctggcttgtcctcagcgagatctaccctgtggagatacgaggaagagccttcgccttctgcaacagcttcaactgggcggccaacctcttcatcagcctctccttcctcgatctcattggcaccatcggcttgtcctggaccttcctgctctacggactgaccgctgtcctcggcctgggcttcatctatttatttgttcctgaaacaaaaggccagtcgttggcagagatagaccagcagttccagaagagacggttcaccctgagctttggccacaggcagaactccactggcatcccgtacagccgcatcgagatctctgcggcctcctgaggaatccgtctgcctggaaattctggaactgtggctttggcagaccatctccagcatcctgcttcctaggccccagagcacaagttccagctggtcttttgggagtggcccctgcccccaaaggtggtctgcttttgctggggtaaaaaggatgaaagtctgagaatgcccaactcttcattttgagtctcaggccctgaaggttcctgaggatctagcttcatgcctcagtttccccattgacttgcacatctctgcagtatttataagaagaatattctatgaagtctttgttgcaccatggacttttctcaaagaatctcaagggtaccaatcctggcaggaagtctctcccgatatcacccctaaatccaaatgaggatatcatcttttctaatctcttttttcaactggctgggacattttcggaagggggaagtctctttttttactcttatcattttttttttttgaggtggagtctcattctgttgcccaggctggcctgatcttggctcactgcaacctccacctcctgagttcaagcgattcttgtgcctcagcctcctaagcagctgggactacaggcgcatgcaaccatacccagctaatttatttttagcagagatggggtttcactgtgttggccaggctggtcgtgaactcctgagctcaagtgatccacccacctcagcctcccagagtgctaggattacaggccttttgactcttttatctgagttttattgacccctctaattctcttacccagaatatttatccttcaccagcaactctgactctttgacgggaggcctcagttctagtccttggtctgctggtgtcattgctgtaggaatgaccacgggcctcagtttccccatttgtataatgggaagcctgtaccaggtcattcttaagatttctcctgactccagtgagctggaattctaaatgctggtctaggagctgtctccaggatggtgcaggatggctttgcggaaaggagatgggtttggaggccaacaaacctgcttgtcaatattgcctttgcctcttggcagcccttgaacttgagtaaataacaactccctgaacctcagtttcctcatctgcagaatggggataattatgtcccaggggtatatttagaccctgtttcctttcaggagggtccccagctggtccagggcctgggaaatttctacttatcctcattacccaggtccctcctttggaccctgtaaagggtcagggtgaatcagatgggggactgagcaagtagctatgactgcagatcatgtaaggaagggactgacaagaagctcccagatgctggggagaatgaagagctaaaatagatcctaggtgctggatgctttgtcatccatgcgtgcacatatgggtgctggcagagcccccaaggactctggcctctcgagttctcctatcttctccattctagatgcttcccttgtatccagtgatgtgctggagctggctttgccaagcttgtgagagctggttgctacattttcaggatttttacaagttggtaaacacagccattataaaaaattaaatgatttaaatttataattaagtaaattacattaaaacaaaaaaattatactcaaaattcattacttaattttactacctgttactattatctgtgcttttgaggctatttctacatagtaactcttatggagacctaggggagacaccgcgcatctcttcctgattccccactcaatgacatcatgttagtctttggttgcttaactggctgtggggagtgtttttgtatcacaaagattagagaggactacacatcagggcttgatttattgtttgttgattttctagacttcagaacatgctggataaaatgtcagtaatgcaaattaaactttaaagtatgtcttgtttgtagccaatacatggtgtatagcaccaaaaaatggagggattattcttccagtagttgaacactgtcatccgtttcagctgacagctgctcaaatcatttaagaaggagttctgacattcattttcattgttttacttttgtcttcctcactagtgtaaacaaaaatttcaaccagcattcatgccgaacctatacccattcttcagtgcctagctgtacagttatcagggatttttatttgtagtctaattttgtcaaatcatggccaaatcgcagtgatagttgactttggatacaaggtttggcaaaaaaaaaaatattaacaaaatattctgtaagaatcaattgtctatatggaatttaggataaagaatatttacaataaagaatatttacaataaagagtttattattatttgtaagttgtgtgcaacaaacataccctttatctctgtaaaatttatacacacaaaaattaacaaaagattctgtaagaattaattggctatatggaatttaggatagaatatttacaataaagagtatttacaataaagagtttgttattatttgtaaaaaaaanaa

SEQ ID NO: 303061 - DNA, 4366 bp, Homo sapiens
ggagggggtccttgccaggcctggggcggccgggggcggtcctgggctcccctccgtcccgcctccaggcctcggggcctggctggccgacgtggcgttggcggcgctgcgcgcgggagggcagggcaggagggacagaggcgggggcgggccggaaagtttgtccggcggcagcggcgttggggactccggcgggggatgcgcgcccggcccctcagcgcccccagcacgccgccgagtcccgctcgccatgggccactccccacctgtcctgcctttgtgtgcctctgtgtctttgctgggtggcctgacctttggttatgaactggcagtcatatcaggtgccctgctgccactgcagcttgactttgggctaagctgcttggagcaggagttcctggtgggcagcctgctcctgggggctctcctcgcctccctggttggtggcttcctcattgactgctatggcaggaagcaagccatcctcgggagcaacttggtgctgctggcaggcagcctgaccctgggcctggctggttccctggcctggctggtcctgggccgcgctgtggttggcttcgccatttccctctcctccatggcttgctgtatctacgtgtcagagctggtggggccacggcagcggggagtgctggtgtccctctatgaggcaggcatcaccgtgggcatcctgctctcctatgccctcaactatgcactggctggtaccccctggggatggaggcacatgttcggctgggccactgcacctgctgtcctgcaatccctcagcctcctcttcctccctgctggtacagatgagactgcaacacacaaggacctcatcccactccagggaggtgaggcccccaagctgggcccggggaggccacggtactcctttctggacctcttcagggcacgcgataacatgcgaggccggaccacagtgggcctggggctggtgctcttccagcaactaacagggcagcccaacgtgctgtgctatgcctccaccatcttcagctccgttggtttccatgggggatcctcagccgtgctggcctctgtggggcttggcgcagtgaaggtggcagctaccctgaccgccatggggctggtggaccgtgcaggccgcagggctctgttgctagctggctgtgccctcatggccctgtccgtcagtggcataggcctcgtcagctttgccgtgcccatggactcaggcccaagctgtctggctgtgcccaatgccaccgggcagacaggcctccctggagactctggcctgctgcaggactcctctctacctcccattccaaggaccaatgaggaccaaagggagccaatcttgtccactgctaagaaaaccaagccccatcccagatctggagacccctcagcccctcctcggctggccctgagctctgccctccctgggccccctctgcccgctcgggggcatgcactgctgcgctggaccgcactgctgtgcctgatggtctttgtcagtgccttctcctttgggtttgggccagtgacctggcttgtcctcagcgagatctaccctgtggagatacgaggaagagccttcgccttctgcaacagcttcaactgggcggccaacctcttcatcagcctctccttcctcgatctcattggcaccatcggcttgtcctggaccttcctgctctacggactgaccgctgtcctcggcctgggcttcatctatttatttgttcctgaaacaaaaggccagtcgttggcagagatagaccagcagttccagaagagacggttcaccctgagctttggccacaggcagaactccactggcatcccgtacagccgcatcgagatctctgcggcctcctgaggaatccgtctgcctggaaattctggaactgtggctttggcagaccatctccagcatcctgcttcctaggccccagagcacaagttccagctggtcttttgggagtggcccctgcccccaaaggtggtctgcttttgctggggtaaaaaggatgaaagtctgagaatgcccaactcttcattttgagtctcaggccctgaaggttcctgaggatctagcttcatgcctcagtttccccattgacttgcacatctctgcagtatttataagaagaatattctatgaagtctttgttgcaccatggacttttctcaaagaatctcaagggtaccaatcctggcaggaagtctctcccgatatcacccctaaatccaaatgaggatatcatcttttctaatctcttttttcaactggctgggacattttcggaagggggaagtctctttttttactcttatcattttttttttttgaggtggagtctcattctgttgcccaggctggcctgatcttggctcactgcaacctccacctcctgagttcaagcgattcttgtgcctcagcctcctaagcagctgggactacaggcgcatgcaaccatacccagctaatttatttttagcagagatggggtttcactgtgttggccaggctggtcgtgaactcctgagctcaagtgatccacccacctcagcctcccagagtgctaggattacaggccttttgactcttttatctgagttttattgacccctctaattctcttacccagaatatttatccttcaccagcaactctgactctttgacgggaggcctcagttctagtccttggtctgctggtgtcattgctgtaggaatgaccacgggcctcagtttccccatttgtataatgggaagcctgtaccaggtcattcttaagatttctcctgactccagtgagctggaattctaaatgctggtctaggagctgtctccaggatggtgcaggatggctttgcggaaaggagatgggtttggaggccaacaaacctgcttgtcaatattgcctttgcctcttggcagcccttgaacttgagtaaataacaactccctgaacctcagtttcctcatctgcagaatggggataattatgtcccaggggtatatttagaccctgtttcctttcaggagggtccccagctggtccagggcctgggaaatttctacttatcctcattacccaggtccctcctttggaccctgtaaagggtcagggtgaatcagatgggggactgagcaagtagctatgactgcagatcatgtaaggaagggactgacaagaagctcccagatgctggggagaatgaagagctaaaatagatcctaggtgctggatgctttgtcatccatgcgtgcacatatgggtgctggcagagcccccaaggactctggcctctcgagttctcctatcttctccattctagatgcttcccttgtatccagtgatgtgctggagctggctttgccaagcttgtgagagctggttgctacattttcaggatttttacaagttggtaaacacagccattataaaaaattaaatgatttaaatttataattaagtaaattacattaaaacaaaaaaattatactcaaaattcattacttaattttactacctgttactattatctgtgcttttgaggctatttctacatagtaactcttatggagacctaggggagacaccgcgcatctcttcctgattccccactcaatgacatcatgttagtctttggttgcttaactggctgtggggagtgtttttgtatcacaaagattagagaggactacacatcagggcttgatttattgtttgttgattttctagacttcagaacatgctggataaaatgtcagtaatgcaaattaaactttaaagtatgtcttgtttgtagccaatacatggtgtatagcaccaaaaaatggagggattattcttccagtagttgaacactgtcatccgtttcagctgacagctgctcaaatcatttaagaaggagttctgacattcattttcattgttttacttttgtcttcctcactagtgtaaacaaaaatttcaaccagcattcatgccgaacctatacccattcttcagtgcctagctgtacagttatcagggatttttatttgtagtctaattttgtcaaatcatggccaaatcgcagtgatagttgactttggatacaaggtttggcaaaaaaaaaaatattaacaaaatattctgtaagaatcaattgtctatatggaatttaggataaagaatatttacaataaagaatatttacaataaagagtttattattatttgtaagttgtgtgcaacaaacataccctttatctctgtaaaatttatacacacaaaaattaacaaaagattctgtaagaattaattggctatatggaatttaggatagaatatttacaataaagagtatttacaata

SEQ ID NO: 303062 - DNA, 970 bp, Homo sapiens
ggagggggtccttgccaggcctggggcggccgggggcggtcctgggctcccctccgtcccgcctccaggcctcggggcctggctggccgacgtggcgttggcggcgctgcgcgcgggagggcagggcaggagggacagaggcgggggcgggccggaaagtttgtccggcggcagcggcgttggggactccggcgggggatgcgcgcccggcccctcagcgcccccagcacgccgccgagtcccgctcgccatgggtaagtcccgatcgggcgctgcctgctggaagcccgaccccttcccagggtgtagacaccgcccccacgctcccctaagagtgcgcgccccctggctcccccagggccgccccggccggataccgcctctcgggtggccagcccgagactgcaggcctgcggcgggggctgggacggggctcggtcgcgcttccttccatcttcctttctgccccggaaaagtggcccctcacttgctgcagcgcccactcgggcccaggcactctcccgggcgccctgatccgacagccccaggcaagtgcagctgttcctggtctgcagatgaagaaatggaggctccgaaagaagcaaagcagttcatcgattcgctgagcgcggttgtgccccaggcgctgttgtgggcctggggacgctgtcgcgaacgaaactgcgaacaaaacagacgaaccccctcctctggacgtgattctgcagagaggggacagagaaggagattctaacacagcattggggtgggacgcgtggggaatggctttgttgccactcgggactagggctctatttttctctctgcattcagaagcctcgaaggatcagtcgttgattcttgagtgagcacctactacgtgccagacattgatataggggttagagcttcagcaatgaacaaaatagacaataaacctctctctcatggaggtggcattctgattgag

SEQ ID NO: 303063 - DNA, 4186 bp, Homo sapiens
  misc_feature (4184)..(4184): n is a, c, g, or t
ctcactatagggctcactcactatagggctcgagcggccgcccgccactccccacctgtcctgcctttgtgtgcctctgtgtctttgctgggtggcctgacctttggttatgaactggcagtcatatcaggtgccctgctgccactgcagcttgactttgggctaagctgcttggagcaggagttcctggtgggcagcctgctcctgggggctctcctcgcctccctggttggtggcttcctcattgactgctatggcaggaagcaagccatcctcgggagcaacttggtgctgctggcaggcagcctgaccctgggcctggctggttccctggcctggctggtcctgggccgcgctgtggttggcttcgccatttccctctcctccatggcttgctgtatctacgtgtcagagctggtggggccacggcagcggggagtgctggtgtccctctatgaggcaggcatcaccgtgggcatcctgctctcctatgccctcaactatgcactggctggtaccccctggggatggaggcacatgttcggctgggccactgcacctgctgtcctgcaatccctcagcctcctcttcctccctgctggtacagatgagactgcaacacacaaggacctcatcccactccagggaggtgaggcccccaagctgggcccggggaggccacggtactcctttctggacctcttcagggcacgcgataacatgcgaggccggaccacagtgggcctggggctggtgctcttccagcaactaacagggcagcccaacgtgctgtgctatgcctccaccatcttcagctccgttggtttccatgggggatcctcagccgtgctggcctctgtggggcttggcgcagtgaaggtggcagctaccctgaccgccatggggctggtggaccgtgcaggccgcagggctctgttgctagctggctgtgccctcatggccctgtccgtcagtggcataggcctcgtcagctttgccgtgcccatggactcaggcccaagctgtctggctgtgcccaatgccaccgggcagacaggcctccctggagactctggcctgctgcaggactcctctctacctcccattccaaggaccaatgaggaccaaagggagccaatcttgtccactgctaagaaaaccaagccccatcccagatctggagacccctcagcccctcctcggctggccctgagctctgccctccctgggccccctctgcccgctcgggggcatgcactgctgcgctggaccgcactgctgtgcctgatggtctttgtcagtgccttctcctttgggtttgggccagtgacctggcttgtcctcagcgagatctaccctgtggagatacgaggaagagccttcgccttctgcaacagcttcaactgggcggccaacctcttcatcagcctctccttcctcgatctcattggcaccatcggcttgtcctggaccttcctgctctacggactgaccgctgtcctcggcctgggcttcatctatttatttgttcctgaaacaaaaggccagtcgttggcagagatagaccagcagttccagaagagacggttcaccctgagctttggccacaggcagaactccactggcatcccgtacagccgcatcgagatctctgcggcctcctgaggaatccgtctgcctggaaattctggaactgtggctttggcagaccatctccagcatcctgcttcctaggccccagagcacaagttccagctggtcttttgggagtggcccctgcccccaaaggtggtctgcttttgctggggtaaaaaggatgaaagtctgagaatgcccaactcttcattttgagtctcaggccctgaaggttcctgaggatctagcttcatgcctcagtttccccattgacttgcacatctctgcagtatttataagaagaatattctatgaagtctttgttgcaccatggacttttctcaaagaatctcaagggtaccaatcctggcaggaagtctctcccgatatcacccctaaatccaaatgaggatatcatcttttctaatctcttttttcaactggctgggacattttcggaagggggaagtctctttttttactcttatcattttttttttttgaggtggagtctcattctgttgcccaggctggcctgatcttggctcactgcaacctccacctcctgagttcaagcgattcttgtgcctcagcctcctaagcagctgggactacaggcgcatgcaaccatacccagctaatttatttttagcagagatggggtttcactgtgttggccaggctggtcgtgaactcctgagctcaagtgatccacccacctcagcctcccagagtgctaggattacaggccttttgactcttttatctgagttttattgacccctctaattctcttacccagaatatttatccttcaccagcaactctgactctttgacgggaggcctcagttctagtccttggtctgctggtgtcattgctgtaggaatgaccacgggcctcagtttccccatttgtataatgggaagcctgtaccaggtcattcttaagatttctcctgactccagtgagctggaattctaaatgctggtctaggagctgtctccaggatggtgcaggatggctttgcggaaaggagatgggtttggaggccaacaaacctgcttgtcaatattgcctttgcctcttggcagcccttgaacttgagtaaataacaactccctgaacctcagtttcctcatctgcagaatggggataattatgtcccaggggtatatttagaccctgtttcctttcaggagggtccccagctggtccagggcctgggaaatttctacttatcctcattacccaggtccctcctttggaccctgtaaagggtcagggtgaatcagatgggggactgagcaagtagctatgactgcagatcatgtaaggaagggactgacaagaagctcccagatgctggggagaatgaagagctaaaatagatcctaggtgctggatgctttgtcatccatgcgtgcacatatgggtgctggcagagcccccaaggactctggcctctcgagttctcctatcttctccattctagatgcttcccttgtatccagtgatgtgctggagctggctttgccaagcttgtgagagctggttgctacattttcaggatttttacaagttggtaaacacagccattataaaaaattaaatgatttaaatttataattaagtaaattacattaaaacaaaaaaattatactcaaaattcattacttaattttactacctgttactattatctgtgcttttgaggctatttctacatagtaactcttatggagacctaggggagacaccgcgcatctcttcctgattccccactcaatgacatcatgttagtctttggttgcttaactggctgtggggagtgtttttgtatcacaaagattagagaggactacacatcagggcttgatttattgtttgttgattttctagacttcagaacatgctggataaaatgtcagtaatgcaaattaaactttaaagtatgtcttgtttgtagccaatacatggtgtatagcaccaaaaaatggagggattattcttccagtagttgaacactgtcatccgtttcagctgacagctgctcaaatcatttaagaaggagttctgacattcattttcattgttttacttttgtcttcctcactagtgtaaacaaaaatttcaaccagcattcatgccgaacctatacccattcttcagtgcctagctgtacagttatcagggatttttatttgtagtctaattttgtcaaatcatggccaaatcgcagtgatagttgactttggatacaaggtttggcaaaaaaaaaaatattaacaaaatattctgtaagaatcaattgtctatatggaatttaggataaagaatatttacaataaagaatatttacaataaagagtttattattatttgtaagttgtgtgcaacaaacataccctttatctctgtaaaatttatacacacaaaaattaacaaaagattctgtaagaattaattggctatatggaatttaggatagaatatttacaataaagagtatttacaataaagagtttgttattatttgtaaaaaaaanaa

SEQ ID NO: 303064 - DNA, 4381 bp, Homo sapiens
  misc_feature (4379)..(4379): n is a, c, g, or t
ggagggggtccttgccaggcctggggcggccgggggcggtcctgggctcccctccgtcccgcctccaggcctcggggcctggctggccgacgtggcgttggcggcgctgcgcgcgggagggcagggcaggagggacagaggcgggggcgggccggaaagtttgtccggcggcagcggcgttggggactccggcgggggatgcgcgcccggcccctcagcgcccccagcacgccgccgagtcccgctcgccatgggccactccccacctgtcctgcctttgtgtgcctctgtgtctttgctgggtggcctgacctttggttatgaactggcagtcatatcaggtgccctgctgccactgcagcttgactttgggctaagctgcttggagcaggagttcctggtgggcagcctgctcctgggggctctcctcgcctccctggttggtggcttcctcattgactgctatggcaggaagcaagccatcctcgggagcaacttggtgctgctggcaggcagcctgaccctgggcctggctggttccctggcctggctggtcctgggccgcgctgtggttggcttcgccatttccctctcctccatggcttgctgtatctacgtgtcagagctggtggggccacggcagcggggagtgctggtgtccctctatgaggcaggcatcaccgtgggcatcctgctctcctatgccctcaactatgcactggctggtaccccctggggatggaggcacatgttcggctgggccactgcacctgctgtcctgcaatccctcagcctcctcttcctccctgctggtacagatgagactgcaacacacaaggacctcatcccactccagggaggtgaggcccccaagctgggcccggggaggccacggtactcctttctggacctcttcagggcacgcgataacatgcgaggccggaccacagtgggcctggggctggtgctcttccagcaactaacagggcagcccaacgtgctgtgctatgcctccaccatcttcagctccgttggtttccatgggggatcctcagccgtgctggcctctgtggggcttggcgcagtgaaggtggcagctaccctgaccgccatggggctggtggaccgtgcaggccgcagggctctgttgctagctggctgtgccctcatggccctgtccgtcagtggcataggcctcgtcagctttgccgtgcccatggactcaggcccaagctgtctggctgtgcccaatgccaccgggcagacaggcctccctggagactctggcctgctgcaggactcctctctacctcccattccaaggaccaatgaggaccaaagggagccaatcttgtccactgctaagaaaaccaagccccatcccagatctggagacccctcagcccctcctcggctggccctgagctctgccctccctgggccccctctgcccgctcgggggcatgcactgctgcgctggaccgcactgctgtgcctgatggtctttgtcagtgccttctcctttgggtttgggccagtgacctggcttgtcctcagcgagatctaccctgtggagatacgaggaagagccttcgccttctgcaacagcttcaactgggcggccaacctcttcatcagcctctccttcctcgatctcattggcaccatcggcttgtcctggaccttcctgctctacggactgaccgctgtcctcggcctgggcttcatctatttatttgttcctgaaacaaaaggccagtcgttggcagagatagaccagcagttccagaagagacggttcaccctgagctttggccacaggcagaactccactggcatcccgtacagccgcatcgagatctctgcggcctcctgaggaatccgtctgcctggaaattctggaactgtggctttggcagaccatctccagcatcctgcttcctaggccccagagcacaagttccagctggtcttttgggagtggcccctgcccccaaaggtggtctgcttttgctggggtaaaaaggatgaaagtctgagaatgcccaactcttcattttgagtctcaggccctgaaggttcctgaggatctagcttcatgcctcagtttccccattgacttgcacatctctgcagtatttataagaagaatattctatgaagtctttgttgcaccatggacttttctcaaagaatctcaagggtaccaatcctggcaggaagtctctcccgatatcacccctaaatccaaatgaggatatcatcttttctaatctcttttttcaactggctgggacattttcggaagggggaagtctctttttttactcttatcattttttttttttgaggtggagtctcattctgttgcccaggctggcctgatcttggctcactgcaacctccacctcctgagttcaagcgattcttgtgcctcagcctcctaagcagctgggactacaggcgcatgcaaccatacccagctaatttatttttagcagagatggggtttcactgtgttggccaggctggtcgtgaactcctgagctcaagtgatccacccacctcagcctcccagagtgctaggattacaggccttttgactcttttatctgagttttattgacccctctaattctcttacccagaatatttatccttcaccagcaactctgactctttgacgggaggcctcagttctagtccttggtctgctggtgtcattgctgtaggaatgaccacgggcctcagtttccccatttgtataatgggaagcctgtaccaggtcattcttaagatttctcctgactccagtgagctggaattctaaatgctggtctaggagctgtctccaggatggtgcaggatggctttgcggaaaggagatgggtttggaggccaacaaacctgcttgtcaatattgcctttgcctcttggcagcccttgaacttgagtaaataacaactccctgaacctcagtttcctcatctgcagaatggggataattatgtcccaggggtatatttagaccctgtttcctttcaggagggtccccagctggtccagggcctgggaaatttctacttatcctcattacccaggtccctcctttggaccctgtaaagggtcagggtgaatcagatgggggactgagcaagtagctatgactgcagatcatgtaaggaagggactgacaagaagctcccagatgctggggagaatgaagagctaaaatagatcctaggtgctggatgctttgtcatccatgcgtgcacatatgggtgctggcagagcccccaaggactctggcctctcgagttctcctatcttctccattctagatgcttcccttgtatccagtgatgtgctggagctggctttgccaagcttgtgagagctggttgctacattttcaggatttttacaagttggtaaacacagccattataaaaaattaaatgatttaaatttataattaagtaaattacattaaaacaaaaaaattatactcaaaattcattacttaattttactacctgttactattatctgtgcttttgaggctatttctacatagtaactcttatggagacctaggggagacaccgcgcatctcttcctgattccccactcaatgacatcatgttagtctttggttgcttaactggctgtggggagtgtttttgtatcacaaagattagagaggactacacatcagggcttgatttattgtttgttgattttctagacttcagaacatgctggataaaatgtcagtaatgcaaattaaactttaaagtatgtcttgtttgtagccaatacatggtgtatagcaccaaaaaatggagggattattcttccagtagttgaacactgtcatccgtttcagctgacagctgctcaaatcatttaagaaggagttctgacattcattttcattgttttacttttgtcttcctcactagtgtaaacaaaaatttcaaccagcattcatgccgaacctatacccattcttcagtgcctagctgtacagttatcagggatttttatttgtagtctaattttgtcaaatcatggccaaatcgcagtgatagttgactttggatacaaggtttggcaaaaaaaaaaatattaacaaaatattctgtaagaatcaattgtctatatggaatttaggataaagaatatttacaataaagagtttattattatttgtaagttgtgtgcaacaaacataccctttatctctgtaaaatttatacacacaaaaattaacaaaagattctgtaagaattaattggctatatggaatttaggatagaatatttacaataaagagtatttacaataaagagtttgttattatttgtaaaaaaaanaa

SEQ ID NO: 303065 - DNA, 3085 bp, Homo sapiens
gctcacttccagccgcctgtcacagtactgggagtaagaggtgacctatttatttttagaagggggcagtgataataacccagctcctagcttcattcaagggaggcaggcgctttggaagtttgtaaacaccgactttctgagtaagggaggagcactttttttccaaaaaggaaagaacgtctctactgggtttttttcctcctgatattcagcattagagtagaaaagaaactattgtttggccacattagccgtggttagcaggtgctgcagcctttgccactgttattatttttaaagggcagaaatgcctgaaggtgaagactttggaccaggcaaaagctgggaagttatcaattccaaaccagatgaaagacccaggctcagccactgtattgcagaatcatggatgaatttcagcatatttcttcaagaaatgtctctttttaaacagcagagccctggcaagttttgtctcctggtctgtagtgtgtgcacattttttacgatcttgggaagttacattcctggggttatactcagctatctactgttactgtgtgcatttttgtgtccattgtttaaatgtaatgatattggacaaaaaatttacagcaaaattaagtcagttctgctgaaactggattttggaattggagaatatattaatcagaagaaacgtgagagatctgaagcagataaagaaaaaagtcacaaagatgacagtgaattagacttttcagctctttgtcctaagattagcctcacggttgctgccaaagagttatctgtgtctgacacagacgtctcagaggtatcctggactgataatgggaccttcaacctttcagaaggatacactccacagacagacacttctgatgatcttgaccgacccagtgaggaagttttctctagagatctttcagattttccatctctagaaaatggcatgggaacaaatgatgaagatgaattaagccttggtttgcccactgagctcaagagaaagaaggaacagttggacagtggtcacagaccaagcaaagagacgcaatcagcagctggtctcacccttcctctgaacagtgaccaaacctttcacctgatgagcaacctggctggggatgttatcacagctgcagtgactgcagctatcaaagaccagttagagggtgtgcagcaagcactttctcaggctgcccccatcccagaagaggacacagacactgaagaaggtgatgactttgaactacttgaccagtcagagctggatcaaattgagagtgaattgggacttacacaagaccaggaagcagaagcacagcaaaataagaagtcttcaggtttcctttcaaatctgctgggaggccattaatctaggaatcagcttgcaacagagcacaaaaaacaccaaaaaaatttcaaacaagaaaaaaaaaaaaaaaaaggaaaagaaaaaaattgaactgtaagctttaatgattactttagatttgttttattttccctcctgcagtgaattaattggatatatatcagctgacactgatagattgatatttctgatcgttatttttgtgtaataagcatggaaatgaactttatacacaccactgtgttgtcagagataaatattaggggttgtttttaaagcaaaaagaaaaaaacaaaaaccaaactattaaaatcctcctataaatattctttttctttacagtttttcaagcatgcaaaacagtttattgtaacttactgaaaaatattaacaattaattgtgaatacatgctgttaccagcttccttattcctaatacctggaaaatttttttttcaacggatagattttgatgtaaaaaagaccgaaattatcaaggtatcttagttgaaggacttgggaaatactatcaaaattaatttcttaggaaaaaatttaaaagtatatttaagtactctggatagactgaaacgtttccatgttatttctgcagttgtagacttaggcttatttgtaaagaagcatgctccattgactgccatctctagtcttgcagtgggtggtattaacccatagaaagcaagcagttgtgtatcacatagacaatggttatgatgtaaacagattcagttgttttgttgttcattcgtcatatgtttgtgatagggatgttgggagcacagctctattctgcctgctcagacttaagttagacccttatcttttatattatgtcatgaaaaaagtctcctaaaattgtgaaactagttcttgatgagtgatgtgatcatcagcaataaagatataataactctgttttcttagcctgtatagaggagaggaacttgcttggctttaaaatatatttatttgccatttaagtataaatatgaaatctgtttcttattgggaagatagaatatatatattttcctttaaactttttaaggtcacttttaaataaccaaatttgatttatggtttttaacaaaggactaaagagctgaaaccaacctagttttgtttttgtgatataaactttaagtgtcgagggaccatgccagcaactaccaaaaatctcttaaatcttcaggtacagctggcattttggcagatgcatagagacatctgagaccctcagaaaggaaggataatccaagaatataggaaatctgtgttctcttcctttcattttatcccttatatttctaaagactaattataagtaatctgacattttaatgtagctactcttatttattttttctttctgaggtattaaaatatctggactgagttttgccaaatgttaaagggagaagagttactgaagactttgaacacttgctttttgtgattgcttatgtcattagtgcctcatgactgtgtttgatgtcctttattgatacaaagtgagcctgtgccttcattatcttgcccattttaatacaaatggaaacctggtgtttgaaaatctctgaactgtgtgggttttggaggaatatacctgaattttattcaataacagtttctggacaggaagaaaaatacagttacatatttataaaatagtcgttatcagta

SEQ ID NO: 303066 - DNA, 808 bp, Homo sapiens
  misc_feature (725)..(725): n is a, c, g, or t
  misc_feature (727)..(727): n is a, c, g, or t
gctcacttccagccgcctgtcacagtactgggagtaagaggtgacctatttatttttagaagggggcagtgataataacccagctcctagcttcattcaagggaggcaggcgctttggaagtttgtaaacaccgactttctgagtaagggaggagcactttttttccaaaaaggaaagaacgtctctactgggtttttttcctcctgatattcagcattagagtagaaaagaaactattgtttggccacattagccgtggttagcaggtgctgcagcctttgccactgttattatttttaaagggcagaaatgcctgaaggtgaagactttggaccaggcaaaagctgggaagttatcaattccaaaccagatgaaagacccaggctcagccactgtattgcagaatcatggatgaatttcagcatatttcttcaagaaatgtctctttttaaacagcagagccctggcaagttttgtctcctggtctgtagtgtgtgcacattttttacgatcttgggaagttacattcctggggttatactcagctatctactgttactgtgtgcatttttgtgtccattgtttaaatgtaatgatattggacaaaaaatttacagcaaaattaagtcagttctgctgaaactggattttggaattggagaatatattaatcagaagaaacgtgagagatctggagcagataaagaaacaagtcccaagatgncngtgaattagacttttcggttcttgtgtcttaggattagctcacggttgctgccaagagtttttgggttggaacagagttta

SEQ ID NO: 303067 - DNA, 782 bp, Homo sapiens
gcctgtgccccgcggtgcgcgccccgctccgggacctgccgccaccgccgccccgccctcggcggcacccacacccaggcgcgcccgcgcgcgcgcccggccccgtccctgcctggaagcacagctgaagatggcgagcccggcgcctccggagcacgccgaggagggatgcccggctcctgccgccgaggagcaggcgccgccgtcgccgccaccgccccaggcatcccccgcagagcggcagcagcaggaggaggaagcgcaggaagctggggcggcggagggcgcggggttgcaggtggaggaggccgcgggccgggcggcggccgcggtaacctggctgctcggggagccggtgctgtggctgggctgccgcgccgacgagctgctgagctggaagaggccgctgcggagcctgctcggcttcgtcgctgccaacctgctgttctggtagacactcaccgcaactttcctccggacgcacgtccctgtgaaacacacgggaatgctcagcccctgagcaacaggtttgtctctccaaaaagcgctcttcagaaaggccagggaaatgtctgtctccttcgttgaaagtggtgtcctgtcatccgttaccacgctattgagggcggagaaaaaccttctttgtttgctaagtgtcctcataacaaacatgacctacacagtgcagaataatcagactccggtaacagataccttgttacaggacagagatttctgaaccttaaagttgagaaataaataaattgcacaaaaaaaaaaac

SEQ ID NO: 303068 - DNA, 3274 bp, Homo sapiens
gcctgtgccccgcggtgcgcgccccgctccgggacctgccgccaccgccgccccgccctcggcggcacccacacccaggcgcgcccgcgcgcgcgcccggccccgtccctgcctggaagcacagctgaagatggcgagcccggcgcctccggagcacgccgaggagggatgcccggctcctgccgccgaggagcaggcgccgccgtcgccgccaccgccccaggcatcccccgcagagcggcagcagcaggaggaggaagcgcaggaagctggggcggcggagggcgcggggttgcaggtggaggaggccgcgggccgggcggcggccgcggtaacctggctgctcggggagccggtgctgtggctgggctgccgcgccgacgagctgctgagctggaagaggccgctgcggagcctgctcggcttcgtcgctgccaacctgctgttctggttccttgcattgactccatggagagtatatcacctgatttccgtcatgatacttgggcgtgttattatgcaaataataaaggatatggttttgtctagaacaagaggtgcacagttgtggagaagcctcagtgaaagctgggaagttatcaattccaaaccagatgaaagacccaggctcagccactgtattgcagaatcatggatgaatttcagcatatttcttcaagaaatgtctctttttaaacagcagagccctggcaagttttgtctcctggtctgtagtgtgtgcacattttttacgatcttgggaagttacattcctggggttatactcagctatctactgttactgtgtgcatttttgtgtccattgtttaaatgtaatgatattggacaaaaaatttacagcaaaattaagtcagttctgctgaaactggattttggaattggagaatatattaatcagaagaaacgtgagagatctgaagcagataaagaaaaaagtcacaaagatgacagtgaattagacttttcagctctttgtcctaagattagcctcacggttgctgccaaagagttatctgtgtctgacacagacgtctcagaggtatcctggactgataatgggaccttcaacctttcagaaggatacactccacagacagacacttctgatgatcttgaccgacccagtgaggaagttttctctagagatctttcagattttccatctctagaaaatggcatgggaacaaatgatgaagatgaattaagccttggtttgcccactgagctcaagagaaagaaggaacagttggacagtggtcacagaccaagcaaagagacgcaatcagcagctggtctcacccttcctctgaacagtgaccaaacctttcacctgatgagcaacctggctggggatgttatcacagctgcagtgactgcagctatcaaagaccagttagagggtgtgcagcaagcactttctcaggctgcccccatcccagaagaggacacagacactgaagaaggtgatgactttgaactacttgaccagtcagagctggatcaaattgagagtgaattgggacttacacaagaccaggaagcagaagcacagcaaaataagaagtcttcaggtttcctttcaaatctgctgggaggccattaatctaggaatcagcttgcaacagagcacaaaaaacaccaaaaaaatttcaaacaagaaaaaaaaaaaaaaaaaggaaaagaaaaaaattgaactgtaagctttaatgattactttagatttgttttattttccctcctgcagtgaattaattggatatatatcagctgacactgatagattgatatttctgatcgttatttttgtgtaataagcatggaaatgaactttatacacaccactgtgttgtcagagataaatattaggggttgtttttaaagcaaaaagaaaaaaacaaaaaccaaactattaaaatcctcctataaatattctttttctttacagtttttcaagcatgcaaaacagtttattgtaacttactgaaaaatattaacaattaattgtgaatacatgctgttaccagcttccttattcctaatacctggaaaatttttttttcaacggatagattttgatgtaaaaaagaccgaaattatcaaggtatcttagttgaaggacttgggaaatactatcaaaattaatttcttaggaaaaaatttagttgtagacttaggcttatttgtaaagaagcatgctccattgactgccatctctagtcttgcagtgggtggtattaacccatagaaagcaagcagttgtgtatcacatagacaatggttatgatgtaaacagattcagttgttttgttgttcattcgtcatatgtttgtgatagggatgttgggagcacagctctattctgcctgctcagacttaagttagacccttatcttttatattatgtcatgaaaaaagtctcctaaaattgtgaaactagttcttgatgagtgatgtgatcatcagcaataaagatataataactctgttttcttagcctgtatagaggagaggaacttgcttggctttaaaatatatttatttgccatttaagtataaatatgaaatctgtttcttattgggaagatagaatatatatattttcctttaaactttttaaggtcacttttaaataaccaaatttgatttatggtttttaacaaaggactaaagagctgaaaccaacctagttttgtttttgtgatataaactttaagtgtcgagggaccatgccagcaactaccaaaaatctcttaaatcttcaggtacagctggcattttggcagatgcatagagacatctgagaccctcagaaaggaaggataatccaagaatataggaaatctgtgttctcttcctttcattttatcccttatatttctaaagactaattataagtaatctgacattttaatgtagctactcttatttattttttctttctgaggtattaaaatatctggactgagttttgccaaatgttaaagggagaagagttactgaagactttgaacacttgctttttgtgattgcttatgtcattagtgcctcatgactgtgtttgatgtcctttattgatacaaagtgagcctgtgccttcattatcttgcccattttaatacaaatggaaacctggtgtttgaaaatctctgaactgtgtgggttttggaggaatatacctgaattttattcaataacagtttctggacaggaagaaaaatacagttacatatttataaaatagtcgttatcagta

SEQ ID NO: 303069 - DNA, 3271 bp, Homo sapiens
gcctgtgccccgcggtgcgcgccccgctccgggacctgccgccaccgccgccccgccctcggcggcacccacacccaggcgcgcccgcgcgcgcgcccggccccgtccctgcctggaagcacagctgaagatggcgagcccggcgcctccggagcacgccgaggagggatgcccggctcctgccgccgaggagcaggcgccgccgtcgccgccaccgccccaggcatcccccgcagagcggcagcagcaggaggaggaagcgcaggaagctggggcggcggagggcgcggggttgcaggtggaggaggccgcgggccgggcggcggccgcggtaacctggctgctcggggagccggtgctgtggctgggctgccgcgccgacgagctgctgagctggaagaggccgctgcggagcctgctcggcttcgtcgctgccaacctgctgttctggttccttgcattgactccatggagagtatatcacctgatttccgtcatgatacttgggcgtgttattatgcaaataataaaggatatggttttgtctagaacaagaggtgcacagttgtggagaagcctcagtgaaagctgggaagttatcaattccaaaccagatgaaagacccaggctcagccactgtattgcagaatcatggatgaatttcagcatatttcttcaagaaatgtctctttttaaacagcagagccctggcaagttttgtctcctggtctgtagtgtgtgcacattttttacgatcttgggaagttacattcctggggttatactcagctatctactgttactgtgtgcatttttgtgtccattgtttaaatgtaatgatattggacaaaaaatttacagcaaaattaagtcagttctgctgaaactggattttggaattggagaatatattaatcagaagaaacgtgagagatctgaagcagataaagaaaaaagtcacaaagatgacagtgaattagacttttcagctctttgtcctaagattagcctcacggttgctgccaaagagttatctgtgtctgacacagacgtctcagaggtatcctggactgataatgggaccttcaacctttcagaaggatacactccacagacagacacttctgatgatcttgaccgacccagtgaggaagttttctctagagatctttcagattttccatctctagaaaatggcatgggaacaaatgatgaagatgaattaagccttggtttgcccactgagctcaagagaaagaaggaacagttggacagtggtcacagaccaagcaaagagacgcaatcagcagctggtctcacccttcctctgaacagtgaccaaacctttcacctgatgagcaacctggctggggatgttatcacagctgcagtgactgcagctatcaaagaccagttagagggtgtgcagcaagcactttctcaggctgcccccatcccagaagaggacacagacactgaagaaggtgatgactttgaactacttgaccagtcagagctggatcaaattgagagtgaattgggacttacacaagaccaggaagcagaagcacagcaaaataagaagtcttcaggtttcctttcaaatctgctgggaggccattaatctaggaatcagcttgcaacagagcacaaaaaacaccaaaaaaatttcaaacaagaaaaaaaaaaaaaaaaaggaaaagaaaaaaattgaactgtaagctttaatgattactttagatttgttttattttccctcctgcagtgaattaattggatatatatcagctgacactgatagattgatatttctgatcgttatttttgtgtaataagcatggaaatgaactttatacacaccactgtgttgtcagagataaatattaggggttgtttttaaagcaaaaagaaaaaaacaaaaaccaaactattaaaatcctcctataaatattctttttctttacagtttttcaagcatgcaaaacagtttattgtaacttactgaaaaatattaacaattaattgtgaatacatgctgttaccagcttccttattcctaatacctggaaaatttttttttcaacggatagattttgatgtaaaaaagaccgaaattatcaaggtatcttagttgaaggacttgggaaatactatcaaaattaatttcttaggaaaaaatttaaaagtatatttaagtactctggatagactgaaacgtttccatgttatttctgcagttgtagacttaggcttatttgtaaagaagcatgctccattgactgccatctctagtcttgcagtgggtggtattaacccatagaaagcaagcagttgtgtatcacatagacaatggttatgatgtaaacagattcagttgttttgttgttcattcgtcatatgtttgtgatagggatgttgggagcacagctctattctgcctgctcagacttaagttagacccttatcttttatattatgtcatgaaaaaagtctcctaaaattgtgaaactagttcttgatgagtgatgtgatcatcagcaataaagatataataactctgttttcttagcctgtatagaggagaggaacttgcttggctttaaaatatatttatttgccatttaagtataaatatgaaatctgtttcttattgggaagatagaatatatatattttcctttaaactttttaaggtcacttttaaataaccaaatttgatttatggtttttaacaaaggactaaagagctgaaaccaacctagttttgtttttgtgatataaactttaagtgtcgagggaccatgccagcaactacctgagaccctcagaaaggaaggataatccaagaatataggaaatctgtgttctcttcctttcattttatcccttatatttctaaagactaattataagtaatctgacattttaatgtagctactcttatttattttttctttctgaggtattaaaatatctggactgagttttgccaaatgttaaagggagaagagttactgaagactttgaacacttgctttttgtgattgcttatgtcattagtgcctcatgactgtgtttgatgtcctttattgatacaaagtgagcctgtgccttcattatcttgcccattttaatacaaatggaaacctggtgtttgaaaatctctgaactgtgtgggttttggaggaatatacctgaattttattcaataacagtttctggacaggaagaaaaatacagttacatatttataaaatagtcgttatcagta

SEQ ID NO: 303070 - DNA, 3180 bp, Homo sapiens
gcctgtgccccgcggtgcgcgccccgctccgggacctgccgccaccgccgccccgccctcggcggcacccacacccaggcgcgcccgcgcgcgcgcccggccccgtccctgcctggaagcacagctgaagatggcgagcccggcgcctccggagcacgccgaggagggatgcccggctcctgccgccgaggagcaggcgccgccgtcgccgccaccgccccaggcatcccccgcagagcggcagcagcaggaggaggaagcgcaggaagctggggcggcggagggcgcggggttgcaggtggaggaggccgcgggccgggcggcggccgcggtaacctggctgctcggggagccggtgctgtggctgggctgccgcgccgacgagctgctgagctggaagaggccgctgcggagcctgctcggcttcgtcgctgccaacctgctgttctggttccttgcattgactccatggagagtatatcacctgatttccgtcatgatacttgggcgtgttattatgcaaataataaaggatatggttttgtctagaacaagaggtgcacagttgtggagaagcctcagtgaaagctgggaagttatcaattccaaaccagatgaaagacccaggctcagccactgtattgcagaatcatggatgaatttcagcatatttcttcaagaaatgtctctttttaaacagcagagccctggcaagttttgtctcctggtctgtagtgtgtgcacattttttacgatcttgggaagttacattcctggggttatactcagctatctactgttactgtgtgcatttttgtgtccattgtttaaatgtaatgatattggacaaaaaatttacagcaaaattaagtcagttctgctgaaactggattttggaattggagaatatattaatcagaagaaacgtgagagatctgaagcagataaagaaaaaagtcacaaagatgacagtgaattagacttttcagctctttgtcctaagattagcctcacggttgctgccaaagagttatctgtgtctgacacagacgtctcagaggtatcctggactgataatgggaccttcaacctttcagaaggatacactccacagacagacacttctgatgatcttgaccgacccagtgaggaagttttctctagagatctttcagattttccatctctagaaaatggcatgggaacaaatgatgaagatgaattaagccttggtttgcccactgagctcaagagaaagaaggaacagttggacagtggtcacagaccaagcaaagagacgcaatcagcagctggtctcacccttcctctgaacagtgaccaaacctttcacctgatgagcaacctggctggggatgttatcacagctgcagtgactgcagctatcaaagaccagttagagggtgtgcagcaagcactttctcaggctgcccccatcccagaagaggacacagacactgaagaaggtgatgactttgaactacttgaccagtcagagctggatcaaattgagagtgaattgggacttacacaagaccaggaagcagaagcacagcaaaataagaagtcttcaggtttcctttcaaatctgctgggaggccattaatctaggaatcagcttgcaacagagcacaaaaaacaccaaaaaaatttcaaacaagaaaaaaaaaaaaaaaaaggaaaagaaaaaaattgaactgtaagctttaatgattactttagatttgttttattttccctcctgcagtgaattaattggatatatatcagctgacactgatagattgatatttctgatcgttatttttgtgtaataagcatggaaatgaactttatacacaccactgtgttgtcagagataaatattaggggttgtttttaaagcaaaaagaaaaaaacaaaaaccaaactattaaaatcctcctataaatattctttttctttacagtttttcaagcatgcaaaacagtttattgtaacttactgaaaaatattaacaattaattgtgaatacatgctgttaccagcttccttattcctaatacctggaaaatttttttttcaacggatagattttgatgtaaaaaagaccgaaattatcaaggtatcttagttgaaggacttgggaaatactatcaaaattaatttcttaggaaaaaatttaaaagtatatttaagtactctggatagactgaaacgtttccatgttatttctgcagttgtagacttaggcttatttgtaaagaagcatgctccattgactgccatctctagtcttgcagtgggtggtattaacccatagaaagcaagcagttgtgtatcacatagacaatggttatgatgtaaacagattcagttgttttgttgttcattcgtcatatgtttgtgatagggatgttgggagcacagctctattctgcctgctcagacttaagttagacccttatcttttatattatgtcatgaaaaaagtctcctaaaattgtgaaactagttcttgatgagtgatgtgatcatcagcaataaagatataataactctgttttcttagcctgtatagaggagaggaacttgcttggctttaaaatatatttatttgccatttaagtataaatatgaaatctgtttcttattgggaagatagaatatatatattttcctttaaactttttaaggtcacttttaaataaccaaatttgatttatggtttttaacaaaggactaaagagctgaaaccaacctagttttgtttttgtgatataaactttaagtgtcgagggaccatgccagcaactaccaaaaatctcttaaatcttcaggtacagctggcattttggcagatgcatagagacatcattaaaatatctggactgagttttgccaaatgttaaagggagaagagttactgaagactttgaacacttgctttttgtgattgcttatgtcattagtgcctcatgactgtgtttgatgtcctttattgatacaaagtgagcctgtgccttcattatcttgcccattttaatacaaatggaaacctggtgtttgaaaatctctgaactgtgtgggttttggaggaatatacctgaattttattcaataacagtttctggacaggaagaaaaatacagttacatatttataaaatagtcgttatcagta

SEQ ID NO: 303071 - DNA, 2362 bp, Homo sapiens
gcctgtgccccgcggtgcgcgccccgctccgggacctgccgccaccgccgccccgccctcggcggcacccacacccaggcgcgcccgcgcgcgcgcccggccccgtccctgcctggaagcacagctgaagatggcgagcccggcgcctccggagcacgccgaggagggatgcccggctcctgccgccgaggagcaggcgccgccgtcgccgccaccgccccaggcatcccccgcagagcggcagcagcaggaggaggaagcgcaggaagctggggcggcggagggcgcggggttgcaggtggaggaggccgcgggccgggcggcggccgcggtaacctggctgctcggggagccggtgctgtggctgggctgccgcgccgacgagctgctgagctggaagaggccgctgcggagcctgctcggcttcgtcgctgccaacctgctgttctggttccttgcattgactccatggagagtatatcacctgatttccgtcatgatacttgggcgtgttattatgcaaataataaaggatatggttttgtctagaacaagaggtgcacagttgtggagaagcctcagtgaaagctgggaagttatcaattccaaaccagatgaaagacccaggctcagccactgtattgcagaatcatggatgaatttcagcatatttcttcaagaaatgtctctttttaaacagcagagccctggcaagttttgtctcctggtctgtagtgtgtgcacattttttacgatcttgggaagttacattcctggggttatactcagctatctactgttactgtgtgcatttttgtgtccattgtttaaatgtaatgatattggacaaaaaatttacagcaaaattaagtcagttctgctgaaactggattttggaattggagaatatattaatcagaagaaacgtgagagatctgaagcagataaagaaaaaagtcacaaagatgacagtgaattagacttttcagctctttgtcctaagattagcctcacggttgctgccaaagagttatctgtgtctgacacagacgtctcagaggtatcctggactgataatgggaccttcaacctttcagaaggatacactccacagacagacacttctgatgatcttgaccgacccagtgaggaagttttctctagagatctttcagattttccatctctagaaaatggcatgggaacaaatgatgaagatgaattaagccttggtttgcccactgagctcaagagaaagaaggaacagttggacagtggtcacagaccaagcaaagagacgcaatcagcagctggtctcacccttcctctgaacagtgaccaaacctttcacctgatgagcaacctggctggggatgttatcacagctgcagtgactgcagctatcaaagaccagttagagggtgtgcagcaagcactttctcaggctgcccccatcccagaagaggacacagacactgaagaaggtgatgactttgaactacttgaccagtcagagctggatcaaattgagagtgaattgggacttacacaagaccaggaagcagaagcacagcaaaataagaagtcttcaggtttcctttcaaatctgctgggaggccattaatctaggaatcagcttgcaacagagcacaaaaaacaccaaaaaaatttcaaacaagaaaaaaaaaatttattttccctcctgcagtgaattaattggatatatatcagctgacactgatagattgatatttctgatcgttatttttgtgtaataagcatggaaatgaactttatacacaccactgtgttgtcagagataaatattaggggttgtttttaaagcaaaaagaaaaaaacaaaaaccaaactattaaaatcctcctataaatattctttttctttacagtttttcaagcatgcaaaacagtttattgtaacttactgaaaaatattaacaattaattgtgaatacatgctgttaccagcttccttattcctaatacctggaaaatttttttttcaacggatagattttgatgtaaaaaagaccgaaattatcaaggtatcttagttgaaggacttgggaaatactatcaaaattaatttcttaggaaaaaatttaaaagtatatttaagtactctggatagactgaaacgtttccatgttatttctgcagtgtagacttaggctaatggccagaagctggccattgatggcactctatctgccgggggggattaccataaagacaagtgggttcacttgcctgggttgtttacgattcaggtagtgcatcgctagtggaaggtgtgggcagcatagcggctagtaccatctttttgcggtcctatgcttctt

SEQ ID NO: 303072 - DNA, 1648 bp, Homo sapiens
ctccccaggatgaggaattgcccaaaaaattttctccaataacttgtatccatccattgtatttgttttattttccctcctgcagtgaattaattggatatatatcagctgacactgatagattgatatttctgatcgttatttttgtgtaataagcatggaaatgaactttatacacaccactgtgttgtcagagataaatattaggggttgtttttaaagcaaaaagaaaaaaacaaaaaccaaactattaaaatcctcctataaatattctttttctttacagtttttcaagcatgcaaaacagtttattgtaacttactgaaaaatattaacaattaattgtgaatacatgctgttaccagcttccttattcctaatacctggaaaatttttttttcaacggatagattttgatgtaaaaaagaccgaaattatcaaggtatcttagttgaaggacttgggaaatactatcaaaattaatttcttaggaaaaaatttaaaagtatatttaagtactctggatagactgaaacgtttccatgttatttctgcagttgtagacttaggcttatttgtaaagaagcatgctccattgactgccatctctagtcttgcagtgggtggtattaacccatagaaagcaagcagttgtgtatcacatagacaatggttatgatgtaaacagattcagttgttttgttgttcattcgtcatatgtttgtgatagggatgttgggagcacagctctattctgcctgctcagacttaagttagacccttatcttttatattatgtcatgaaaaaagtctcctaaaattgtgaaactagttcttgatgagtgatgtgatcatcagcaataaagatataataactctgttttcttagcctgtatagaggagaggaacttgcttggctttaaaatatatttatttgccatttaagtataaatatgaaatctgtttcttattgggaagatagaatatatatattttcctttaaactttttaaggtcacttttaaataaccaaatttgatttatggtttttaacaaaggactaaagagctgaaaccaacctagttttgtttttgtgatataaactttaagtgtcgagggaccatgccagcaactaccaaaaatctcttaaatcttcaggtacagctggcattttggcagatgcatagagacatctgagaccctcagaaaggaaggataatccaagaatataggaaatctgtgttctcttcctttcattttatcccttatatttctaaagactaattataagtaatctgacattttaatgtagctactcttatttattttttctttctgaggtattaaaatatctggactgagttttgccaaatgttaaagggagaagagttactgaagactttgaacacttgctttttgtgattgcttatgtcattagtgcctcatgactgtgtttgatgtcctttattgatacaaagtgagcctgtgccttcattatcttgcccattttaatacaaatggaaacctggtgtttgaaaatctctgaactgtgtgggttttggaggaatatacctgaattttattcaataacagtttctggacaggaagaaaaatacagttacatatttataaaatagtcgttatcagta

SEQ ID NO: 303073 - DNA, 3328 bp, Homo sapiens
gcctgtgccccgcggtgcgcgccccgctccgggacctgccgccaccgccgccccgccctcggcggcacccacacccaggcgcgcccgcgcgcgcgcccggccccgtccctgcctggaagcacagctgaagatggcgagcccggcgcctccggagcacgccgaggagggatgcccggctcctgccgccgaggagcaggcgccgccgtcgccgccaccgccccaggcatcccccgcagagcggcagcagcaggaggaggaagcgcaggaagctggggcggcggagggcgcggggttgcaggtggaggaggccgcgggccgggcggcggccgcggtaacctggctgctcggggagccggtgctgtggctgggctgccgcgccgacgagctgctgagctggaagaggccgctgcggagcctgctcggcttcgtcgctgccaacctgctgttctggttccttgcattgactccatggagagtatatcacctgatttccgtcatgatacttgggcgtgttattatgcaaataataaaggatatggttttgtctagaacaagaggtgcacagttgtggagaagcctcagtgaaagctgggaagttatcaattccaaaccagatgaaagacccaggctcagccactgtattgcagaatcatggatgaatttcagcatatttcttcaagaaatgtctctttttaaacagcagagccctggcaagttttgtctcctggtctgtagtgtgtgcacattttttacgatcttgggaagttacattcctggggttatactcagctatctactgttactgtgtgcatttttgtgtccattgtttaaatgtaatgatattggacaaaaaatttacagcaaaattaagtcagttctgctgaaactggattttggaattggagaatatattaatcagaagaaacgtgagagatctgaagcagataaagaaaaaagtcacaaagatgacagtgaattagacttttcagctctttgtcctaagattagcctcacggttgctgccaaagagttatctgtgtctgacacagacgtctcagaggtatcctggactgataatgggaccttcaacctttcagaaggatacactccacagacagacacttctgatgatcttgaccgacccagtgaggaagttttctctagagatctttcagattttccatctctagaaaatggcatgggaacaaatgatgaagatgaattaagccttggtttgcccactgagctcaagagaaagaaggaacagttggacagtggtcacagaccaagcaaagagacgcaatcagcagctggtctcacccttcctctgaacagtgaccaaacctttcacctgatgagcaacctggctggggatgttatcacagctgcagtgactgcagctatcaaagaccagttagagggtgtgcagcaagcactttctcaggctgcccccatcccagaagaggacacagacactgaagaaggtgatgactttgaactacttgaccagtcagagctggatcaaattgagagtgaattgggacttacacaagaccaggaagcagaagcacagcaaaataagaagtcttcaggtttcctttcaaatctgctgggaggccattaatctaggaatcagcttgcaacagagcacaaaaaacaccaaaaaaatttcaaacaagaaaaaaaaaaaaaaaaaggaaaagaaaaaaattgaactgtaagctttaatgattactttagatttgttttattttccctcctgcagtgaattaattggatatatatcagctgacactgatagattgatatttctgatcgttatttttgtgtaataagcatggaaatgaactttatacacaccactgtgttgtcagagataaatattaggggttgtttttaaagcaaaaagaaaaaaacaaaaaccaaactattaaaatcctcctataaatattctttttctttacagtttttcaagcatgcaaaacagtttattgtaacttactgaaaaatattaacaattaattgtgaatacatgctgttaccagcttccttattcctaatacctggaaaatttttttttcaacggatagattttgatgtaaaaaagaccgaaattatcaaggtatcttagttgaaggacttgggaaatactatcaaaattaatttcttaggaaaaaatttaaaagtatatttaagtactctggatagactgaaacgtttccatgttatttctgcagttgtagacttaggcttatttgtaaagaagcatgctccattgactgccatctctagtcttgcagtgggtggtattaacccatagaaagcaagcagttgtgtatcacatagacaatggttatgatgtaaacagattcagttgttttgttgttcattcgtcatatgtttgtgatagggatgttgggagcacagctctattctgcctgctcagacttaagttagacccttatcttttatattatgtcatgaaaaaagtctcctaaaattgtgaaactagttcttgatgagtgatgtgatcatcagcaataaagatataataactctgttttcttagcctgtatagaggagaggaacttgcttggctttaaaatatatttatttgccatttaagtataaatatgaaatctgtttcttattgggaagatagaatatatatattttcctttaaactttttaaggtcacttttaaataaccaaatttgatttatggtttttaacaaaggactaaagagctgaaaccaacctagttttgtttttgtgatataaactttaagtgtcgagggaccatgccagcaactaccaaaaatctcttaaatcttcaggtacagctggcattttggcagatgcatagagacatctgagaccctcagaaaggaaggataatccaagaatataggaaatctgtgttctcttcctttcattttatcccttatatttctaaagactaattataagtaatctgacattttaatgtagctactcttatttattttttctttctgaggtattaaaatatctggactgagttttgccaaatgttaaagggagaagagttactgaagactttgaacacttgctttttgtgattgcttatgtcattagtgcctcatgactgtgtttgatgtcctttattgatacaaagtgagcctgtgccttcattatcttgcccattttaatacaaatggaaacctggtgtttgaaaatctctgaactgtgtgggttttggaggaatatacctgaattttattcaataacagtttctggacaggaagaaaaatacagttacatatttataaaatagtcgttatcagta

SEQ ID NO: 303074 - DNA, 3393 bp, Homo sapiens
gcctgtgccccgcggtgcgcgccccgctccgggacctgccgccaccgccgccccgccctcggcggcacccacacccaggcgcgcccgcgcgcgcgcccggccccgtccctgcctggaagcacagctgaagatggcgagcccggcgcctccggagcacgccgaggagggatgcccggctcctgccgccgaggagcaggcgccgccgtcgccgccaccgccccaggcatcccccgcagagcggcagcagcaggaggaggaagcgcaggaagctggggcggcggagggcgcggggttgcaggtggaggaggccgcgggccgggcggcggccgcggtaacctggctgctcggggagccggtgctgtggctgggctgccgcgccgacgagctgctgagctggaagaggccgctgcggagcctgctcggcttcgtcgctgccaacctgctgttctggttccttgcattgactccatggagagtatatcacctgatttccgtcatgatacttgggcgtgttattatgcaaataataaaggatatggttttgtctagaacaagaggtgcacagttgtggagaagcctcagtgaaagctgggaagttatcaattccaaaccagatgaaagacccaggctcagccactgtattgcagaatcatggatgaatttcagcatatttcttcaagaaatgtctctttttaaacagcagagccctggcaagttttgtctcctggtctgtagtgtgtgcacattttttacgatcttgggaagttacattcctggggttatactcagctatctactgttactgtgtgcatttttgtgtccattgtttaaatgtaatgatattggacaaaaaatttacagcaaaattaagtcagttctgctgaaactggattttggaattggagaatatattaatcagaagaaacgtgagagatctgaagcagataaagaaaaaagtcacaaagatgacagtgaattagacttttcagctctttgtcctaagattagcctcacggttgctgccaaagagttatctgtgtctgacacagacgtctcagaggtatcctggactgataatgggaccttcaacctttcagaaggatacactccacagacagacacttctgatgatcttgaccgacccagtgaggaagttttctctagagatctttcagattttccatctctagaaaatggcatgggaacaaatgatgaagatgaattaagccttggtttgcccactgagctcaagagaaagaaggaacagttggacagtggtcacagaccaagcaaagagacgcaatcagcagctggtctcacccttcctctgaacagtgaccaaacctttcacctgatgagcaacctggctggggatgttatcacagctgcagtgactgcagctatcaaagaccagttagagggtgtgcagcaagcactttctcaggctgcccccatcccagaagaggacacagacactgaagaaggtgatgactttgaactacttgaccagtcagagctggatcaaattgagagtgaattgggacttacacaagaccaggaagcagaagcacagcaaaataagaagtcttcaggtttcctttcaaatctgctgggaggccattaatctaggaatcagcttgcaacagagcacaaaaaacaccaaaaaaatttcaaacaagaaaaaaaaaaaaaaaaaggaaaagaaaaaaattgaactgtaagctttaatgattactttagatttgttttattttccctcctgcagtgaattaattggatatatatcagctgacactgatagattgatatttctgatcgttatttttgtgtaataagcatggaaatgaactttatacacaccactgtgttgtcagagataaatattaggggttgtttttaaagcaaaaagaaaaaaacaaaaaccaaactattaaaatcctcctataaatattctttttctttacagtttttcaagcatgcaaaacagtttattgtaacttactgaaaaatattaacaattaattgtgaatacatgctgttaccagcttccttattcctaatacctggaaaatttttttttcaacggatagattttgatgtaaaaaagaccgaaattatcaaggtatcttagttgaaggacttgggaaatactatcaaaattaatttcttaggaaaaaatttaaaagtatatttaagtactctggatagactgaaacgtttccatgttatttctgcagttgtagacttaggcttatttgtaaagaagcatgctccattgactgccatctctagtcttgcagtgggtggtattaacccatagaaagcaagcagttgtgtatcacatagacaatggttatgatgtaaacagattcagttgttttgttgttcattcgtcatatgtttgtgatagggatgttgggagcacagctctattctgcctgctcagacttaagttagacccttatcttttatattatgtcatgaaaaaagtctcctaaaattgtgaaactagttcttgatgagtgatgtgatcatcagcaataaagatataataactctgttttcttagcctgtatagaggagaggaacttgcttggctttaaaatatatttatttgccatttaagtataaatatgaaatctgtttcttattgggaagatagaatatatatattttcctttaaactttttaaggtcacttttaaataaccaaatttgatttatggtttttaacaaaggactaaagagctgaaaccaacctagttttgtttttgtgatataaactttaagtgtcgagggaccatgccagcaactaccaaaaatctcttaaatcttcaggtacagctggcattttggcagatgcatagagacatctgagaccctcagaaaggaaggataatccaagaatataggaaatctgtgttctcttcctttcattttatcccttatatttctaaagactaattataagtaatctgacattttaatgtagctactcttatttattttttctttctgaggtattaaaatatctggactgagttttgccaaatgttaaagggagaagagttactgaagactttgaacacttgctttttgtgattgcttatgtcattagtgcctcatgactgtgtttgatgtcctttattgatacaaagtgagcctgtgccttcattatcttgcccattttaatacaaatggaaacctggtgtttgaaaatctctgaactgtgtgggttttggaggaatatacctgaattttattcaataacagtttctggacaggaagaaaaatacagttacatatttataaaatagtcgttatcagtaaaaaaaaacaattaacttggccggcggttttaccaccgccgtgacttggaccctggcggtaaccc

SEQ ID NO: 303075 - DNA, 3272 bp, Homo sapiens
gcctgtgccccgcggtgcgcgccccgctccgggacctgccgccaccgccgccccgccctcggcggcacccacacccaggcgcgcccgcgcgcgcgcccggccccgtccctgcctggaagcacagctgaagatggcgagcccggcgcctccggagcacgccgaggagggatgcccggctcctgccgccgaggagcaggcgccgccgtcgccgccaccgccccaggcatcccccgcagagcggcagcagcaggaggaggaagcgcaggaagctggggcggcggagggcgcggggttgcaggtggaggaggccgcgggccgggcggcggccgcggtaacctggctgctcggggagccggtgctgtggctgggctgccgcgccgacgagctgctgagctggaagaggccgctgcggagcctgctcggcttcgtcgctgccaacctgctgttctggttccttgcattgactccatggagagtatatcacctgatttccgtcatgatacttgggcgtgttattatgcaaataataaaggatatggttttgtctagaacaagaggtgcacagttgtggagaagcctcagtgaaagctgggaagttatcaattccaaaccagatgaaagacccaggctcagccactgtattgcagaatcatggatgaatttcagcatatttcttcaagaaatgtctctttttaaacagcagagccctggcaagttttgtctcctggtctgtagtgtgtgcacattttttacgatcttgggaagttacattcctggggttatactcagctatctactgttactgtgtgcatttttgtgtccattgtttaaatgtaatgatattggacaaaaaatttacagcaaaattaagtcagttctgctgaaactggattttggaattggagaatatattaatcagaagaaacgtgagagatctgaagcagataaagaaaaaagtcacaaagatgacagtgaattagacttttcagctctttgtcctaagattagcctcacggttgctgccaaagagttatctgtgtctgacacagacgtctcagaggtatcctggactgataatgggaccttcaacctttcagaaggatacactccacagacagacacttctgatgatcttgaccgacccagtgaggaagttttctctagagatctttcagattttccatctctagaaaatggcatgggaacaaatgatgaagatgaattaagccttggtttgcccactgagctcaagagaaagaaggaacagttggacagtggtcacagaccaagcaaagagacgcaatcagcagctggtctcacccttcctctgaacagtgaccaaacctttcacctgatgagcaacctggctggggatgttatcacagctgcagtgactgcagctatcaaagaccagttagagggtgtgcagcaagcactttctcaggctgcccccatcccagaagaggacacagacactgaagaaggtgatgactttgaactacttgaccagtcagagctggatcaaattgagagtgaattgggacttacacaagaccaggaagcagaagcacagcaaaataagaagtcttcaggtttcctttcaaatctgctgggaggccattaatctaggaatcagcttgcaacagagcacaaaaaacaccaaaaaaatttcaaacaagaaaaaaaaaaaaaaaaaggaaaagaaaaaaattgaactgtaagctttaatgattactttagatttgttttattttccctcctgcagtgaattaattggatatatatcagctgacactgatagattgatatttctgatcgttatttttgtgtaataagcatggaaatgaactttatacacaccactgtgttgtcagagataaatattaggggttgtttttaaagcaaaaagaaaaaaacaaaaaccaaactattaaaatcctcctataaatattctttttctttacagtttttcaagcatgcaaaacagtttattgtaacttactgaaaaatattaacaattaattgtgaatacatgctgttaccagcttccttattcctaatacctggaaaatttttttttcaacggatagattttgatgtaaaaaagaccgaaattatcaaggtatcttagttgaaggacttgggaaatactatcaaaattaatttcttaggaaaaaatttaaaagtatatttaagtactctggatagactgaaacgtttccatgttatttctgcagttgtagacttaggcttatttgtaaagaagcatgctccattgactgccatctctagtcttgcagtgggtggtattaacccatagaaagcaagcagttgtgtatcacatagacaatggttatgatgtaaacagattcagttgttttgttgttcattcgtcatatgtttgtgatagggatgttgggagcacagctctattctgcctgctcagacttaagttagacccttatcttttatattatgtcatgaaaaaagtctcctaaaattgtgaaactagttcttgatgagtgatgtgatcatcagcaataaagatataataactctgttttcttagcctgtatagaggagaggaacttgcttggctttaaaatatatttatttgccatttaagtataaatatgaaatctgtttcttattgggaagatagaatatatatattttcctttaaactttttaaggtcacttttaaataaccaaatttgatttatggtttttaacaaaggactaaagagctgaaaccaacctagttttgtttttgtgatataaactttaagtgtcgagggaccatgccagcaactaccaaaaatctcttaaatcttcaggtacagctggcattttggcagatgcatagagacatctgagaccctcagaaaggaaggataatccaagaatataggaaatctgtgttctcttcctttcattttatcccttatatttctaaagactaattataagtaatctgacattttaatgtagctactcttatttattttttctttctgaggtactttgaacacttgctttttgtgattgcttatgtcattagtgcctcatgactgtgtttgatgtcctttattgatacaaagtgagcctgtgccttcattatcttgcccattttaatacaaatggaaacctggtgtttgaaaatctctgaactgtgtgggttttggaggaatatacctgaattttattcaataacagtttctggacaggaagaaaaatacagttacatatttataaaatagtcgttatcagta

SEQ ID NO: 303076 - DNA, 1213 bp, Homo sapiens
gcctgtgccccgcggtgcgcgccccgctccgggacctgccgccaccgccgccccgccctcggcggcacccacacccaggcgcgcccgcgcgcgcgcccggccccgtccctgcctggaagcacagctgaagatggcgagcccggcgcctccggagcacgccgaggagggatgcccggctcctgccgccgaggagcaggcgccgccgtcgccgccaccgccccaggcatcccccgcagagcggcagcagcaggaggaggaagcgcaggaagctggggcggcggagggcgcggggttgcaggtggaggaggccgcgggccgggcggcggccgcggtaacctggctgctcggggagccggtgctgtggctgggctgccgcgccgacgagctgctgagctggaagaggccgctgcggagcctgctcggcttcgtcgctgccaacctgctgttctggtagacactcaccgcaactttcctccggacgcacgtccctgtgagcagttgtcgttctccgtgtgcggatccagcctcagatgcgaggtggtcggccgaccctcaggcacctgcacctacaggtgttcccatcgtgcttgaaaacttcgcccctgctttctaaaactctgaggtcttgacctgctcgcccaagcttgccggagcaaacgtgcttgaacgtgtcttggttcttgcggccccagcaggcatatctggaccagattaggtacccgttcaaaacggtgccgcattcatcagtcacctgagatgggccctgaatgatttgttttttccttcccctggaacgttaggtttactgtgtttactccctgatgagaaaacgggaggcaaacaagcaggtggagtatgcccagcacccacccccgggtgtgcacagtgtggaaaacaggcatatttttaggtgaagtacagggagaacacacgggaatgctcagcccctgagcaacaggtttgtctctccaaaaagcgctcttcagaaaggccagggaaatgtctgtctccttcgttgaaagtggtgtcctgtcatccgttaccacgctattgagggcggagaaaaaccttctttgtttgctaagtgtcctcataacaaacatgacctacacagtgcagaataatcagactccggtaacagataccttgttacaggacagagatttctgaaccttaaagttgagaaataaataaattgcacaaaaaaaaaaac

SEQ ID NO: 303077 - DNA, 395 bp, Homo sapiens
tattaatcagaattccctacagaaacagatccaataggatgcatattgcagagagagatttatttgaaggaattctgattaatataccctttcaaggaacagctttggaagattaagataattgtctgcttctggaacaaaagacaggtttgttgctgttcagtttaataaagagagtgtcaccttctggggcaaaggctgagcatgttggcttgcagttcactgttcaagactgggctttcctaaacttggtgtacctgggcggtaaaaccaatcacatgtgcagcatccacctggactgtccccatgggacttggaagggacaggggaaccgaagggaatatgaagcccaggctactggctgtgctgtgaaaaataaagccctttctctctga

SEQ ID NO: 303078 - DNA, 803 bp, Homo sapiens
gggcggggagggaaaggctcgcggccagtagatgcaggagggaggagggcctagaggggctccgggctggcggcctctgtgaggaaggggaaggatatggaaccaagatcctttaaatcctgatgaactcatccgtaaagcagatgcccaaaggatgatacaaggcaatttacttctatagaagggtgcgccctcacagatggagcaatgagatggatttcaccgtgttaggatggcctccatctcctgacttcatgatcttcccgcctcggcctcctgggattacaggtgtgagccaccgcatctggccagaagttaagtttaaaagtagaagacaaagaattgaacatactgacattgattcttcgaagagaaatttagaactcatatctaacaccagcctccaattgattgagccaattccttcaaataaatctctctctgcaatatgcatcctattggatctgtttctgtagggaattctgattaatataccctttcaaggaacagctttggaagattaagataattgtctgcttctggaacaaaagacaggtttgttgctgttcagtttaataaagagagtgtcaccttctggggcaaaggctgagcatgttggcttgcagttcactgttcaagactgggctttcctaaacttggtgtacctgggcggtaaaaccaatcacatgtgcagcatccacctggactgtccccatgggacttggaagggacaggggaaccgaagggaatatgaagcccaggctactggctgtgctgtgaaaaataaagccctttctctctga

SEQ ID NO: 303079 - DNA, 638 bp, Homo sapiens
gggcggggagggaaaggctcgcggccagtagatgcaggagggaggagggcctagaggggctccgggctggcggcctctgtgaggaaggggaaggatatggaaccaagatcctttaaatcctgatgaactcatccgtaaagcagatgcccaaaggatgatacaaggcaatttacttctatagaagggtgcgccctcacagatggagcaatgagatggatttcaccgtgttaggatggcctccatctcctgacttcatgatcttcccgcctcggcctcctgggattacaggtgtgagccaccgcatctggccagaagttaagtttaaaagtagaagacaaagaattgaacatactgacattgattcttcgaagagaaatttagaactcatatctaacaccagcctccaattgattgagccaattccttcaaataaatctctctctgcaatatgcatcctattggatctgtttctgtagggaattctgattaatataccctttcaaggaacagctttggaagattaagataattgtctgcttctggaacaaaagacaggtttgttgctgttcagtttaataaagagagatgcggccggcctgtgtactctcacaccacgctctaccttctacacttcttca

SEQ ID NO: 303080 - DNA, 935 bp, Homo sapiens
agtgggtgggggcggagaacggcgggtcagagagaaggcagcccggtccccctcagtggaagggagtggcgatgatagtaagcttactgtgacataactcccggagccgcagcacgagccttgtgaaccttggaagcccgttttccgcgcagtcactaactcgcttagtcaccctgtgtaaaagttattctgggatgacacctgcctgggaagtctcacctttccccccacctcctcctgtctgcgtattgttctgtagcaccccgtgcgcaccttgattgtagcgcttaagcaaggcaatttacttctatagaagggtgcgccctcacagatggagcaatgagatggatttcaccgtgttaggatggcctccatctcctgacttcatgatcttcccgcctcggcctcctgggattacaggtgtgagccaccgcatctggccagaagttaagtttaaaagtagaagacaaagaattgaacatactgacattgattcttcgaagagaaatttagaactcatatctaacaccagcctccaattgattgagccaattccttcaaataaatctctctctgcaatatgcatcctattggatctgtttctgtagggaattctgattaatataccctttcaaggaacagctttggaagattaagataattgtctgcttctggaacaaaagacaggtttgttgctgttcagtttaataaagagagtgtcaccttctggggcaaaggctgagcatgttggcttgcagttcactgttcaagactgggctttcctaaacttggtgtacctgggcggtaaaaccaatcacatgtgcagcatccacctggactgtccccatgggacttggaagggacaggggaaccgaagggaatatgaagcccaggctactggctgtgctgtgaaaaataaagccctttctctctga

SEQ ID NO: 303081 - DNA, 879 bp, Homo sapiens
gggcggggagggaaaggctcgcggccagtagatgcaggagggaggagggcctagaggggctccgggctggcggcctctgtgaggaaggggaaggatatggaaccaagatcctttaaatcctgatgaactcatccgtaaagcagatgcccaaaggatgatatagtgttggccgggcgcagtggctcatgcctataatcccagcactttgggaggctgaggctggcggatcacctgagcaaggcaatttacttctatagaagggtgcgccctcacagatggagcaatgagatggatttcaccgtgttaggatggcctccatctcctgacttcatgatcttcccgcctcggcctcctgggattacaggtgtgagccaccgcatctggccagaagttaagtttaaaagtagaagacaaagaattgaacatactgacattgattcttcgaagagaaatttagaactcatatctaacaccagcctccaattgattgagccaattccttcaaataaatctctctctgcaatatgcatcctattggatctgtttctgtagggaattctgattaatataccctttcaaggaacagctttggaagattaagataattgtctgcttctggaacaaaagacaggtttgttgctgttcagtttaataaagagagtgtcaccttctggggcaaaggctgagcatgttggcttgcagttcactgttcaagactgggctttcctaaacttggtgtacctgggcggtaaaaccaatcacatgtgcagcatccacctggactgtccccatgggacttggaagggacaggggaaccgaagggaatatgaagcccaggctactggctgtgctgtgaaaaataaagccctttctctctga

SEQ ID NO: 303082 - DNA, 717 bp, Homo sapiens
agtgggtgggggcggagaacggcgggtcagagagaaggcagcccggtccccctcagtggaagggagtggcgatgatagtaagcttactgtgacataactcccggagccgcagcacgagccttgtgaaccttggaagcccgttttccgcgcagtcactaactcgcttagtcaccctgtgtaaaagttattctgggatgacacctgcctgggaagtctcacctttccccccacctcctcctgtctgcgtattgttctgtagcaccccgtgcgcaccttgattgtagcgcttaagcaaggcaatttacttctatagaagggtgcgccctcacagatggagcaatggtgagcacacacctggacaagggaggcgaaggggtttttattcctgacgcttgtggcacctgctgctgtgtccttcccctgttggctaaggttagacggcacaggctaaactaattctgattgactaatttaaagagagtgaccgggtaagtggtttggtgggaaaaatagttatggcagagcaggaaatcggaatgagtcagggtggagaatgagtcagggcagagcaggtaatcagaatgagtcagggtggagcaggtagttgaaaaagattgctttacgaggaagttaagctttttttgttttgttttgttttttttaattgagacagagtctcgctctatagcctagactggagtgcagtggcggcatctc

SEQ ID NO: 303083 - DNA, 244 bp, Homo sapiens
ctcctcctgtctgcgtattgttctgtagcaccccgtgcgcaccttgattgtagcgcttaaggtgtccgttttatttactagacagggattgaaccattgtgtcccaaccacctagaacctgggtcatagtgtaaagcttaatcaatgtaatataaatgggggaattaaattcataattgtttaatgtttaagttttgtcttaaattttaaaagtaaatgttggggatggaggggagggacagag

SEQ ID NO: 303084 - DNA, 907 bp, Homo sapiens
gaatgcttgagtagaaaggcaagggagtgaccactaagccctgttatttaaaaagaaaaaccaaacagtaaaacacacacccacacttataaaaggaaaatcacagctaacaaacgcctatttctatcctggggatgactgtcatttcctgggaggtcaattctctgagtagagggcttggtcaaatgagcaatggaaacagttggaagttgtggggaggcacaggagggttggcatctcaaaccctcatttccacccacaaggctgccttagcagtaactccagattctcatttcctgatcacggtcatgccatgctgagaatggtctcagtcaggcttctcaaacttgaagagggatccgaacctttctgggaagcctcctgcatggcaaatgttggctgccaaggcacaaagccaagcgcagtcatgtaagctcaactgaaagaccccgcaaagttagtataaggcttgtgaactgccttgaataaatataggtaacaacttcttcaaacaggcttttttgtgagtttcaatcctgcacaactcccaagacacggttcctcggctccacaactcttgataaataaaggtagcaaaaggtttctattaccatctacccaacagcatgagcatttcgcttgatgaaagacaagctgcaaactaacctggaaattcctgtccttttgcgaagacagtgggaaaactaagccaattagaaagcagattgaaagattccttacctggcccttcctggacatccctaaagcaacccttaatatgagcaaaatccccttcgaaaaatcacagtatatactatggacgcatcttctaagaggtgctgagtgggtgctgcgtgctgtggatggaaaggatggagcgccaactctctaaatacaagtcaccagg

SEQ ID NO: 303085 - DNA, 426 bp, Homo sapiens
tgttaatgccgggcacggcagcagaggaccctgtgaactgtccaacctgctgtgggaagctgccttgtgtcggttcttggtactggggtggtgggcggggtcagatggcgctgaaactgttgcttctcctgttccgcgagaaggttgcagttgcctctgaaggaactgctgttgctgtaaatgcctcttgccgccgttcctaggaacggcggctaggggagatccagcacatgagccaagcctgcctcctgtccctgctgcccgtgccccgggacgtcctggagacagaggatgaggagcctccaccaaggcgctggtgcaacacctgccagctctactacatgggggacctgatccaacaccgcaggacacaggaccacaaggtaggagggcctgcacgctgcagaggcacccgcactgccgtct

SEQ ID NO: 303086 - DNA, 428 bp, Homo sapiens
ttcgcgatgcggaggacgcgggacagaggccaccatgttcagccagcagcagcagcagcagctccagcaacagcagcagcagctccagcagttacagcagcagcagctccagcagcagcaattgcagcagcagcagttactgcagctccagcagctgctccagcagtccccaccacaggccccgttgcccatggctgtcagccgggggctccccccgcagcagccacagcagccgcttctgaatctccagggcaccaactcagcctccctcctcaacggctccatgctgcagagagctttgcttttacagcagttgcaagactggaccagtttgcaatgccacctggcagtgtctctacatacttcctcagggagatagcaattgaaaatgtaattgaataaataaggaaaggaactgcaaaaaaaaa

SEQ ID NO: 303087 - DNA, 2853 bp, Homo sapiens
aacacgattcctctggccaggccaaggggagggcgacactgacaggcgccccccacccaggggccgtggcgaagcaaggggccggctgctcagaaaaggataagaagtggtttctcctcccctcttcccttcctcatcctgcagcccgcgcctcccccctcgccgcgctgcgcacggatggcggcgggagccgcagagccaccatgttcagccagcagcagcagcagcagctccagcaacagcagcagcagctccagcagttacagcagcagcagctccagcagcagcaattgcagcagcagcagttactgcagctccagcagctgctccagcagtccccaccacaggccccgttgcccatggctgtcagccgggggctccccccgcagcagccacagcagccgcttctgaatctccagggcaccaactcagcctccctcctcaacggctccatgctgcagagagctttgcttttacagcagttgcaaggactggaccagtttgcaatgccaccagccacgtatgacactgccggtctcaccatgcccacagcaacactgggtaacctccgaggctatggcatggcatccccaggcctcgcagcccccagcctcacacccccacaactggccactccaaatttgcaacagttctttccccaggccactcgccagtccttgctgggacctcctcctgttggggtccccatgaacccttcccagttcaacctttcaggacggaacccccagaaacaggcccggacctcctcctctaccacccccaatcgaaaggattcttcttctcagacaatgcctgtggaagacaagtcagaccccccagaggggtctgaggaagccgcagagccccggatggacacaccagaagaccaagatttaccgccctgcccagaggacatcgccaaggaaaaacgcactccagcacctgagcctgagccttgtgaggcgtccgagctgccagcaaagagattgaggagctcagaagagcccacagagaaggaacctccagggcagttacaggtgaaggcccagccgcaggcccggatgacagtaccgaaacagacacagacaccagacctgctgcctgaggccctggaagcccaagtgctgccacgattccagccacgggtcctgcaggtccaggcccaggtgcagtcacagactcagccgcggataccatccacagacacccaggtgcagccaaagctgcagaagcaggcgcaaacacagacctctccagagcacttagtgctgcaacagaagcaggtgcagccacagctgcagcaggaggcagagccacagaagcaggtgcagccagtccacacacaggcacagccaagcgtccagccacaggagcatcctccagcgcaggtgtcagtacagccaccagagcagacccatgagcagcctcacacccagccgcaggtgtcgttgctggctccagagcaaacaccagttgtggttcatgtctgcgggctggagatgccacctgatgcagtagaagctggtggaggcatggaaaagaccttgccagagcctgtgggcacccaagtcagcatggaagagattcagaatgagtcggcctgtggcctagatgtgggagaatgtgaaaacagagcgagagagatgccaggggtatggggcgccgggggctccctgaaggtcaccattctgcagagcagtgacagccgggcctttagcactgtacccctgacacctgtcccccgccccagtgactccgtctcctccacccctgcggctaccagcactccctctaagcaggccctccagttcttctgctacatctgcaaggccagctgctccagccagcaggagttccaggaccacatgtcggagcctcagcaccagcagcggctaggggagatccagcacatgagccaagcctgcctcctgtccctgctgcccgtgccccgggacgtcctggagacagaggatgaggagcctccaccaaggcgctggtgcaacacctgccagctctactacatgggggacctgatccaacaccgcaggacacaggaccacaagattgccaaacaatccttgcgacccttctgcaccgtttgcaaccgctacttcaaaacccctcgcaagtttgtggagcacgtgaagtcccaggggcataaggacaaagccaaggagctgaagtcgcttgagaaagaaattgctggccaagatgaggaccacttcattacagtggacgctgtgggttgcttcgagggtgatgaagaagaggaagaggatgatgaggatgaagaagagatcgaggttgaggaggaactctgcaagcaggtgaggtccagagatatatccagagaggagtggaagggctcggagacctacagccccaatactgcatatggtgtggacttcctggtgcccgtgatgggctatatctgccgcatctgccacaagttctatcacagcaactcaggggcacagctctcccactgcaagtccctgggccactttgagaacctgcagaaatacaaggcggccaagaaccccagccccaccacccgacctgtgagccgccggtgcgcaatcaacgcccggaacgctttgacagccctgttcacctccagcggccgcccaccctcccagcccaacacccaggacaaaacacccagcaaggtgacggctcgaccctcccagcccccactacctcggcgctcaacccgcctcaaaacctgatagagggacctccctgtccctggcctgcctgggtccagatctgctaatgctttttaggagtctgcctggaaactttgacatggttcatgtttttactcaaaatccaataaaacaaggtagtttg

SEQ ID NO: 303088 - DNA, 517 bp, Homo sapiens
cgggctgcaggaattcggcacggccgcccaccctcccagcccaacacccaggacaaaacacccagcaaggtgacggctcgaccctcccagcccccactacctcggcgctcaacccgcctcaaaacctgatagagggacctccctgtccctggcctgcctgggtccagatctgctaatgctttttaggagtctgcctggaaactttgacatggttcatgtttttactcaaaatccaataaaacaaggtagtttgggggaaggaaatataaaaaaaactcgtgccggtcgggccgaattcgggacgagctctgatggggatctacaagggggataacgggggggggtaaagccggctaacacaacagccattttggagcccagggagcaagggggaaatacgatttgccggccaagtattgagggaaaaaacagcccggcgcaaggggctaaaacgggggggcccggccctttggggaaaacaaggcgggggggatggtggagccccgaagtttaggac

SEQ ID NO: 303089 - DNA, 2982 bp, Homo sapiens
ggctggtctggtcgggattttgggatccaggccccggagtagcagcggggaggccgggagcccgcgggccggagccgcccggccgaggcgtgggggctgcggggccggcccatccgtgggggcgacttgagcgttgagggcgcgcggggaggcgagccaccatgttcagccagcagcagcagcagcagctccagcaacagcagcagcagctccagcagttacagcagcagcagctccagcagcagcaattgcagcagcagcagttactgcagctccagcagctgctccagcagtccccaccacaggccccgttgcccatggctgtcagccgggggctccccccgcagcagccacagcagccgcttctgaatctccagggcaccaactcagcctccctcctcaacggctccatgctgcagagagctttgcttttacagcagttgcaaggactggaccagtttgcaatgccaccagccacgtatgacactgccggtctcaccatgcccacagcaacactgggtaacctccgaggctatggcatggcatccccaggcctcgcagcccccagcctcacacccccacaactggccactccaaatttgcaacagttctttccccaggccactcgccagtccttgctgggacctcctcctgttggggtccccatgaacccttcccagttcaacctttcaggacggaacccccagaaacaggcccggacctcctcctctaccacccccaatcgaaaggattcttcttctcagacaatgcctgtggaagacaagtcagaccccccagaggggtctgaggaagccgcagagccccggatggacacaccagaagaccaagatttaccgccctgcccagaggacatcgccaaggaaaaacgcactccagcacctgagcctgagccttgtgaggcgtccgagctgccagcaaagagattgaggagctcagaagagcccacagagaaggaacctccagggcagttacaggtgaaggcccagccgcaggcccggatgacagtaccgaaacagacacagacaccagacctgctgcctgaggccctggaagcccaagtgctgccacgattccagccacgggtcctgcaggtccaggcccaggtgcagtcacagactcagccgcggataccatccacagacacccaggtgcagccaaagctgcagaagcaggcgcaaacacagacctctccagagcacttagtgctgcaacagaagcaggtgcagccacagctgcagcaggaggcagagccacagaagcaggtgcagccacaggtacagccacaggcacattcacagggcccaaggcaggtgcagctgcagcaggaggcagagccgctgaagcaggtgcagccacaggtgcagccccaggcacattcacagcccccaaggcaggtgcagctgcagctgcagaagcaggtccagacacagacatatccacaggtccacacacaggcacagccaagcgtccagccacaggagcatcctccagcgcaggtgtcagtacagccaccagagcagacccatgagcagcctcacacccagccgcaggtgtcgttgctggctccagagcaaacaccagttgtggttcatgtctgcgggctggagatgccacctgatgcagtagaagctggtggaggcatggaaaagaccttgccagagcctgtgggcacccaagtcagcatggaagagattcagaatgagtcggcctgtggcctagatgtgggagaatgtgaaaacagagcgagagagatgccaggggtatggggcgccgggggctccctgaaggtcaccattctgcagagcagtgacagccgggcctttagcactgtacccctgacacctgtcccccgccccagtgactccgtctcctccacccctgcggctaccagcactccctctaagcaggccctccagttcttctgctacatctgcaaggccagctgctccagccagcaggagttccaggaccacatgtcggagcctcagcaccagcagcggctaggggagatccagcacatgagccaagcctgcctcctgtccctgctgcccgtgccccgggacgtcctggagacagaggatgaggagcctccaccaaggcgctggtgcaacacctgccagctctactacatgggggacctgatccaacaccgcaggacacaggaccacaagattgccaaacaatccttgcgacccttctgcaccgtttgcaaccgctacttcaaaacccctcgcaagtttgtggagcacgtgaagtcccaggggcataaggacaaagccaaggagctgaagtcgcttgagaaagaaattgctggccaagatgaggaccacttcattacagtggacgctgtgggttgcttcgagggtgatgaagaagaggaagaggatgatgaggatgaagaagagatcgaggttgaggaggaactctgcaagcaggtgaggtccagagatatatccagagaggagtggaagggctcggagacctacagccccaatactgcatatggtgtggacttcctggtgcccgtgatgggctatatctgccgcatctgccacaagttctatcacagcaactcaggggcacagctctcccactgcaagtccctgggccactttgagaacctgcagaaatacaaggcggccaagaaccccagccccaccacccgacctgtgagccgccggtgcgcaatcaacgcccggaacgctttgacagccctgttcacctccagcggccgcccaccctcccagcccaacacccaggacaaaacacccagcaaggtgacggctcgaccctcccagcccccactacctcggcgctcaacccgcctcaaaacctgatagagggacctccctgtccctggcctgcctgggtccagatctgctaatgctttttaggagtctgcctggaaactttgacatggttcatgtttttactcaaaatccaataaaacaaggtagtttg

SEQ ID NO: 303090 - DNA, 3134 bp, Homo sapiens
ggctggtctggtcgggattttgggatccaggccccggagtagcagcggggaggccgggagcccgcgggccggagccgcccggccgaggcgtgggggctgcggggccggcccatccgtgggggcgacttgagcgttgagggcgcgcggggaggcgaggtgcggggccgggggcggctgggtcgtggggctccgcctgcgagctggctgtgtctgcggaggaggcggctggcggggtgggagcgggcggagtggggcgcgaggaggtggcggtggtggagagaagccgtcccacggagctcaggaccacgccaccatgttcagccagcagcagcagcagcagctccagcaacagcagcagcagctccagcagttacagcagcagcagctccagcagcagcaattgcagcagcagcagttactgcagctccagcagctgctccagcagtccccaccacaggccccgttgcccatggctgtcagccgggggctccccccgcagcagccacagcagccgcttctgaatctccagggcaccaactcagcctccctcctcaacggctccatgctgcagagagctttgcttttacagcagttgcaaggactggaccagtttgcaatgccaccagccacgtatgacactgccggtctcaccatgcccacagcaacactgggtaacctccgaggctatggcatggcatccccaggcctcgcagcccccagcctcacacccccacaactggccactccaaatttgcaacagttctttccccaggccactcgccagtccttgctgggacctcctcctgttggggtccccatgaacccttcccagttcaacctttcaggacggaacccccagaaacaggcccggacctcctcctctaccacccccaatcgaaaggattcttcttctcagacaatgcctgtggaagacaagtcagaccccccagaggggtctgaggaagccgcagagccccggatggacacaccagaagaccaagatttaccgccctgcccagaggacatcgccaaggaaaaacgcactccagcacctgagcctgagccttgtgaggcgtccgagctgccagcaaagagattgaggagctcagaagagcccacagagaaggaacctccagggcagttacaggtgaaggcccagccgcaggcccggatgacagtaccgaaacagacacagacaccagacctgctgcctgaggccctggaagcccaagtgctgccacgattccagccacgggtcctgcaggtccaggcccaggtgcagtcacagactcagccgcggataccatccacagacacccaggtgcagccaaagctgcagaagcaggcgcaaacacagacctctccagagcacttagtgctgcaacagaagcaggtgcagccacagctgcagcaggaggcagagccacagaagcaggtgcagccacaggtacagccacaggcacattcacagggcccaaggcaggtgcagctgcagcaggaggcagagccgctgaagcaggtgcagccacaggtgcagccccaggcacattcacagcccccaaggcaggtgcagctgcagctgcagaagcaggtccagacacagacatatccacaggtccacacacaggcacagccaagcgtccagccacaggagcatcctccagcgcaggtgtcagtacagccaccagagcagacccatgagcagcctcacacccagccgcaggtgtcgttgctggctccagagcaaacaccagttgtggttcatgtctgcgggctggagatgccacctgatgcagtagaagctggtggaggcatggaaaagaccttgccagagcctgtgggcacccaagtcagcatggaagagattcagaatgagtcggcctgtggcctagatgtgggagaatgtgaaaacagagcgagagagatgccaggggtatggggcgccgggggctccctgaaggtcaccattctgcagagcagtgacagccgggcctttagcactgtacccctgacacctgtcccccgccccagtgactccgtctcctccacccctgcggctaccagcactccctctaagcaggccctccagttcttctgctacatctgcaaggccagctgctccagccagcaggagttccaggaccacatgtcggagcctcagcaccagcagcggctaggggagatccagcacatgagccaagcctgcctcctgtccctgctgcccgtgccccgggacgtcctggagacagaggatgaggagcctccaccaaggcgctggtgcaacacctgccagctctactacatgggggacctgatccaacaccgcaggacacaggaccacaagattgccaaacaatccttgcgacccttctgcaccgtttgcaaccgctacttcaaaacccctcgcaagtttgtggagcacgtgaagtcccaggggcataaggacaaagccaaggagctgaagtcgcttgagaaagaaattgctggccaagatgaggaccacttcattacagtggacgctgtgggttgcttcgagggtgatgaagaagaggaagaggatgatgaggatgaagaagagatcgaggttgaggaggaactctgcaagcaggtgaggtccagagatatatccagagaggagtggaagggctcggagacctacagccccaatactgcatatggtgtggacttcctggtgcccgtgatgggctatatctgccgcatctgccacaagttctatcacagcaactcaggggcacagctctcccactgcaagtccctgggccactttgagaacctgcagaaatacaaggcggccaagaaccccagccccaccacccgacctgtgagccgccggtgcgcaatcaacgcccggaacgctttgacagccctgttcacctccagcggccgcccaccctcccagcccaacacccaggacaaaacacccagcaaggtgacggctcgaccctcccagcccccactacctcggcgctcaacccgcctcaaaacctgatagagggacctccctgtccctggcctgcctgggtccagatctgctaatgctttttaggagtctgcctggaaactttgacatggttcatgtttttactcaaaatccaataaaacaaggtagtttg

SEQ ID NO: 303091 - DNA, 3001 bp, Homo sapiens
  misc_feature (2984)..(2986): n is a, c, g, or t
  misc_feature (2988)..(2988): n is a, c, g, or t
  misc_feature (2992)..(2993): n is a, c, g, or t
  misc_feature (2996)..(2996): n is a, c, g, or t
  misc_feature (2998)..(2998): n is a, c, g, or t
  misc_feature (3001)..(3001): n is a, c, g, or t
ggctggtctggtcgggattttgggatccaggccccggagtagcagcggggaggccgggagcccgcgggccggagccgcccggccgaggcgtgggggctgcggggccggcccatccgtgggggcgacttgagcgttgagggcgcgcggggaggcgagccaccatgttcagccagcagcagcagcagcagctccagcaacagcagcagcagctccagcagttacagcagcagcagctccagcagcagcaattgcagcagcagcagttactgcagctccagcagctgctccagcagtccccaccacaggccccgttgcccatggctgtcagccgggggctccccccgcagcagccacagcagccgcttctgaatctccagggcaccaactcagcctccctcctcaacggctccatgctgcagagagctttgcttttacagcagttgcaaggactggaccagtttgcaatgccaccagccacgtatgacactgccggtctcaccatgcccacagcaacactgggtaacctccgaggctatggcatggcatccccaggcctcgcagcccccagcctcacacccccacaactggccactccaaatttgcaacagttctttccccaggccactcgccagtccttgctgggacctcctcctgttggggtccccatgaacccttcccagttcaacctttcaggacggaacccccagaaacaggcccggacctcctcctctaccacccccaatcgaaaggattcttcttctcagacaatgcctgtggaagacaagtcagaccccccagaggggtctgaggaagccgcagagccccggatggacacaccagaagaccaagatttaccgccctgcccagaggacatcgccaaggaaaaacgcactccagcacctgagcctgagccttgtgaggcgtccgagctgccagcaaagagattgaggagctcagaagagcccacagagaaggaacctccagggcagttacaggtgaaggcccagccgcaggcccggatgacagtaccgaaacagacacagacaccagacctgctgcctgaggccctggaagcccaagtgctgccacgattccagccacgggtcctgcaggtccaggcccaggtgcagtcacagactcagccgcggataccatccacagacacccaggtgcagccaaagctgcagaagcaggcgcaaacacagacctctccagagcacttagtgctgcaacagaagcaggtgcagccacagctgcagcaggaggcagagccacagaagcaggtgcagccacaggtacagccacaggcacattcacagggcccaaggcaggtgcagctgcagcaggaggcagagccgctgaagcaggtgcagccacaggtgcagccccaggcacattcacagcccccaaggcaggtgcagctgcagctgcagaagcaggtccagacacagacatatccacaggtccacacacaggcacagccaagcgtccagccacaggagcatcctccagcgcaggtgtcagtacagccaccagagcagacccatgagcagcctcacacccagccgcaggtgtcgttgctggctccagagcaaacaccagttgtggttcatgtctgcgggctggagatgccacctgatgcagtagaagctggtggaggcatggaaaagaccttgccagagcctgtgggcacccaagtcagcatggaagagattcagaatgagtcggcctgtggcctagatgtgggagaatgtgaaaacagagcgagagagatgccaggggtatggggcgccgggggctccctgaaggtcaccattctgcagagcagtgacagccgggcctttagcactgtacccctgacacctgtcccccgccccagtgactccgtctcctccacccctgcggctaccagcactccctctaagcaggccctccagttcttctgctacatctgcaaggccagctgctccagccagcaggagttccaggaccacatgtcggagcctcagcaccagcagcggctaggggagatccagcacatgagccaagcctgcctcctgtccctgctgcccgtgccccgggacgtcctggagacagaggatgaggagcctccaccaaggcgctggtgcaacacctgccagctctactacatgggggacctgatccaacaccgcaggacacaggaccacaagattgccaaacaatccttgcgacccttctgcaccgtttgcaaccgctacttcaaaacccctcgcaagtttgtggagcacgtgaagtcccaggggcataaggacaaagccaaggagctgaagtcgcttgagaaagaaattgctggccaagatgaggaccacttcattacagtggacgctgtgggttgcttcgagggtgatgaagaagaggaagaggatgatgaggatgaagaagagatcgaggttgaggaggaactctgcaagcaggtgaggtccagagatatatccagagaggagtggaagggctcggagacctacagccccaatactgcatatggtgtggacttcctggtgcccgtgatgggctatatctgccgcatctgccacaagttctatcacagcaactcaggggcacagctctcccactgcaagtccctgggccactttgagaacctgcagaaatacaaggcggccaagaaccccagccccaccacccgacctgtgagccgccggtgcgcaatcaacgcccggaacgctttgacagccctgttcacctccagcggccgcccaccctcccagcccaacacccaggacaaaacacccagcaaggtgacggctcgaccctcccagcccccactacctcggcgctcaacccgcctcaaaacctgatagagggacctccctgtccctggcctgcctgggtccagatctgctaatgctttttaggagtctgcctggaaactttgacatggttcatgtttttactcaaaatccaataaaacaaggtagtttggnnntncgtnnccncnagn

SEQ ID NO: 303092 - DNA, 2910 bp, Homo sapiens
ggctggtctggtcgggattttgggatccaggccccggagtagcagcggggaggccgggagcccgcgggccggagccgcccggccgaggcgtgggggctgcggggccggcccatccgtgggggcgacttgagcgttgagggcgcgcggggaggcgagccaccatgttcagccagcagcagcagcagcagctccagcaacagcagcagcagctccagcagttacagcagcagcagctccagcagcagcaattgcagcagcagcagttactgcagctccagcagctgctccagcagtccccaccacaggccccgttgcccatggctgtcagccgggggctccccccgcagcagccacagcagccgcttctgaatctccagggcaccaactcagcctccctcctcaacggctccatgctgcagagagctttgcttttacagcagttgcaaggtaacctccgaggctatggcatggcatccccaggcctcgcagcccccagcctcacacccccacaactggccactccaaatttgcaacagttctttccccaggccactcgccagtccttgctgggacctcctcctgttggggtccccatgaacccttcccagttcaacctttcaggacggaacccccagaaacaggcccggacctcctcctctaccacccccaatcgaaaggattcttcttctcagacaatgcctgtggaagacaagtcagaccccccagaggggtctgaggaagccgcagagccccggatggacacaccagaagaccaagatttaccgccctgcccagaggacatcgccaaggaaaaacgcactccagcacctgagcctgagccttgtgaggcgtccgagctgccagcaaagagattgaggagctcagaagagcccacagagaaggaacctccagggcagttacaggtgaaggcccagccgcaggcccggatgacagtaccgaaacagacacagacaccagacctgctgcctgaggccctggaagcccaagtgctgccacgattccagccacgggtcctgcaggtccaggcccaggtgcagtcacagactcagccgcggataccatccacagacacccaggtgcagccaaagctgcagaagcaggcgcaaacacagacctctccagagcacttagtgctgcaacagaagcaggtgcagccacagctgcagcaggaggcagagccacagaagcaggtgcagccacaggtacagccacaggcacattcacagggcccaaggcaggtgcagctgcagcaggaggcagagccgctgaagcaggtgcagccacaggtgcagccccaggcacattcacagcccccaaggcaggtgcagctgcagctgcagaagcaggtccagacacagacatatccacaggtccacacacaggcacagccaagcgtccagccacaggagcatcctccagcgcaggtgtcagtacagccaccagagcagacccatgagcagcctcacacccagccgcaggtgtcgttgctggctccagagcaaacaccagttgtggttcatgtctgcgggctggagatgccacctgatgcagtagaagctggtggaggcatggaaaagaccttgccagagcctgtgggcacccaagtcagcatggaagagattcagaatgagtcggcctgtggcctagatgtgggagaatgtgaaaacagagcgagagagatgccaggggtatggggcgccgggggctccctgaaggtcaccattctgcagagcagtgacagccgggcctttagcactgtacccctgacacctgtcccccgccccagtgactccgtctcctccacccctgcggctaccagcactccctctaagcaggccctccagttcttctgctacatctgcaaggccagctgctccagccagcaggagttccaggaccacatgtcggagcctcagcaccagcagcggctaggggagatccagcacatgagccaagcctgcctcctgtccctgctgcccgtgccccgggacgtcctggagacagaggatgaggagcctccaccaaggcgctggtgcaacacctgccagctctactacatgggggacctgatccaacaccgcaggacacaggaccacaagattgccaaacaatccttgcgacccttctgcaccgtttgcaaccgctacttcaaaacccctcgcaagtttgtggagcacgtgaagtcccaggggcataaggacaaagccaaggagctgaagtcgcttgagaaagaaattgctggccaagatgaggaccacttcattacagtggacgctgtgggttgcttcgagggtgatgaagaagaggaagaggatgatgaggatgaagaagagatcgaggttgaggaggaactctgcaagcaggtgaggtccagagatatatccagagaggagtggaagggctcggagacctacagccccaatactgcatatggtgtggacttcctggtgcccgtgatgggctatatctgccgcatctgccacaagttctatcacagcaactcaggggcacagctctcccactgcaagtccctgggccactttgagaacctgcagaaatacaaggcggccaagaaccccagccccaccacccgacctgtgagccgccggtgcgcaatcaacgcccggaacgctttgacagccctgttcacctccagcggccgcccaccctcccagcccaacacccaggacaaaacacccagcaaggtgacggctcgaccctcccagcccccactacctcggcgctcaacccgcctcaaaacctgatagagggacctccctgtccctggcctgcctgggtccagatctgctaatgctttttaggagtctgcctggaaactttgacatggttcatgtttttactcaaaatccaataaaacaaggtagtttg

SEQ ID NO: 303093 - DNA, 2956 bp, Homo sapiens
ggctggtctggtcgggattttgggatccaggccccggagtagcagcggggaggccgggagcccgcgggccggagccgcccggccgaggcgtgggggctgcggggccggcccatccgtgggggcgacttgagcgttgagggcgcgcggggaggcgagccaccatgttcagccagcagcagcagcagcagctccagcaacagcagcagcagctccagcagttacagcagcagcagctccagcagcagcaattgcagcagcagcagttactgcagctccagcagctgctccagcagtccccaccacaggccccgttgcccatggctgtcagccgggggctccccccgcagcagccacagcagccgcttctgaatctccagggcaccaactcagcctccctcctcaacggctccatgctgcagagagctttgcttttacagcagttgcaaggactggaccagtttgcaatgccaccagccacgtatgacactgccggtctcaccatgcccacagcaacactgggtaacctccgaggctatggcatggcatccccaggcctcgcagcccccagcctcacacccccacaactggccactccaaatttgcaacagttctttccccaggccactcgccagtccttgctgggacctcctcctgttggggtccccatgaacccttcccagttcaacctttcaggacggaacccccagaaacaggcccggacctcctcctctaccacccccaatcgaaaggattcttcttctcagacaatgcctgtggaagacaagtcagaccccccagaggggtctgaggaagccgcagagccccggatggacacaccagaagaccaagatttaccgccctgcccagaggacatcgccaaggaaaaacgcactccagcacctgagcctgagccttgtgaggcgtccgagctgccagcaaagagattgaggagctcagaagagcccacagagaaggaacctccagggcagttacaggtgaaggcccagccgcaggcccggatgacagtaccgaaacagacacagacaccagacctgctgcctgaggccctggaagcccaagtgctgccacgattccagccacgggtcctgcaggtccaggcccaggtgcagtcacagactcagccgcggataccatccacagacacccaggtgcagccaaagctgcagaagcaggcgcaaacacagacctctccagagcacttagtgctgcaacagaagcaggtgcagccacagctgcagcaggaggcagagccacagaagcaggtgcagccacaggtacagccacaggcacattcacagggcccaaggcaggtgcagctgcagcaggaggcagagccgctgaagcaggtgcagccacaggtgcagccccaggcacattcacagcccccaaggcaggtgcagctgcagctgcagaagcaggtccagacacagacatatccacaggtccacacacaggcacagccaagcgtccagccacaggagcatcctccagcgcaggtgtcagtacagccaccagagcagacccatgagcagcctcacacccagccgcaggtgtcgttgctggctccagagcaaacaccagttgtggttcatgtctgcgggctggagatgccacctgatgcagtagaagctggtggaggcatggaaaagaccttgccagagcctgtgggcacccaagtcagcatggaagagattcagaatgagtcggcctgtggcctagatgtgggagaatgtgaaaacagagcgagagagatgccaggggtatggggcgccgggggctccctgaaggtcaccattctgcagagcagtgacagccgggcctttagcactgtacccctgacacctgtcccccgccccagtgactccgtctcctccacccctgcggctaccagcactccctctaagcaggccctccagttcttctgctacatctgcaaggccagctgctccagccagcaggagttccaggaccacatgtcggagcctcagcaccagcagcggctaggggagatccagcacatgagccaagcctgcctcctgtccctgctgcccgtgccccgggacgtcctggagacagaggatgaggagcctccaccaaggcgctggtgcaacacctgccagctctactacatgggggacctgatccaacaccgcaggacacaggaccacaagattgccaaacaatccttgcgacccttctgcaccgtttgcaaccgctacttcaaaacccctcgcaagtttgtggagcacgtgaagtcccaggggcataaggacaaagccaaggagctgaagtcgcttgagaaagaaattgctggccaagatgaggaccacttcattacagtggacgctgtgggttgcttcgagggtgatgaagaagaggaagaggatgatgaggatgaagaagagatcgaggttgaggaggaactctgcaagcaggtgaggtccagagatatatccagagaggagtggaagggctcggagacctacagccccaatactgcatatggtgtggacttcctggtgcccgtgatgggctatatctgccgcatctgccacaagttctatcacagcaactcaggggcacagctctcccactgcaagtccctgggccactttgagaacctgcagaaatacaaggcggccaagaaccccagccccaccacccgacctgtgagccgccggtgcgcaatcaacgcccggaacgctttgacagccctgttcacctccagcggccgcccaccctcccagcccaacacccaggacaaaacacccacccccactacctcggcgctcaacccgcctcaaaacctgatagagggacctccctgtccctggcctgcctgggtccagatctgctaatgctttttaggagtctgcctggaaactttgacatggttcatgtttttactcaaaatccaataaaacaaggtagtttg

SEQ ID NO: 303094 - DNA, 3035 bp, Homo sapiens
ggctggtctggtcgggattttgggatccaggccccggagtagcagcggggaggccgggagcccgcgggccggagccgcccggccgaggcgtgggggctgcggggccggcccatccgtgggggcgacttgagcgttgagggcgcgcggggaggcgaggtgcggggccgggggcggctgggtcgtggggctccgcctgcgagctggctgtgtctgcggaggaggcggctggcggggtgggagcgggcggagtggggcgcgaggaggtggcggtggtggagagaagccgtcccacggagctcaggaccacgccaccatgttcagccagcagcagcagcagcagctccagcaacagcagcaggccccgttgcccatggctgtcagccgggggctccccccgcagcagccacagcagccgcttctgaatctccagggcaccaactcagcctccctcctcaacggctccatgctgcagagagctttgcttttacagcagttgcaaggactggaccagtttgcaatgccaccagccacgtatgacactgccggtctcaccatgcccacagcaacactgggtaacctccgaggctatggcatggcatccccaggcctcgcagcccccagcctcacacccccacaactggccactccaaatttgcaacagttctttccccaggccactcgccagtccttgctgggacctcctcctgttggggtccccatgaacccttcccagttcaacctttcaggacggaacccccagaaacaggcccggacctcctcctctaccacccccaatcgaaaggattcttcttctcagacaatgcctgtggaagacaagtcagaccccccagaggggtctgaggaagccgcagagccccggatggacacaccagaagaccaagatttaccgccctgcccagaggacatcgccaaggaaaaacgcactccagcacctgagcctgagccttgtgaggcgtccgagctgccagcaaagagattgaggagctcagaagagcccacagagaaggaacctccagggcagttacaggtgaaggcccagccgcaggcccggatgacagtaccgaaacagacacagacaccagacctgctgcctgaggccctggaagcccaagtgctgccacgattccagccacgggtcctgcaggtccaggcccaggtgcagtcacagactcagccgcggataccatccacagacacccaggtgcagccaaagctgcagaagcaggcgcaaacacagacctctccagagcacttagtgctgcaacagaagcaggtgcagccacagctgcagcaggaggcagagccacagaagcaggtgcagccacaggtacagccacaggcacattcacagggcccaaggcaggtgcagctgcagcaggaggcagagccgctgaagcaggtgcagccacaggtgcagccccaggcacattcacagcccccaaggcaggtgcagctgcagctgcagaagcaggtccagacacagacatatccacaggtccacacacaggcacagccaagcgtccagccacaggagcatcctccagcgcaggtgtcagtacagccaccagagcagacccatgagcagcctcacacccagccgcaggtgtcgttgctggctccagagcaaacaccagttgtggttcatgtctgcgggctggagatgccacctgatgcagtagaagctggtggaggcatggaaaagaccttgccagagcctgtgggcacccaagtcagcatggaagagattcagaatgagtcggcctgtggcctagatgtgggagaatgtgaaaacagagcgagagagatgccaggggtatggggcgccgggggctccctgaaggtcaccattctgcagagcagtgacagccgggcctttagcactgtacccctgacacctgtcccccgccccagtgactccgtctcctccacccctgcggctaccagcactccctctaagcaggccctccagttcttctgctacatctgcaaggccagctgctccagccagcaggagttccaggaccacatgtcggagcctcagcaccagcagcggctaggggagatccagcacatgagccaagcctgcctcctgtccctgctgcccgtgccccgggacgtcctggagacagaggatgaggagcctccaccaaggcgctggtgcaacacctgccagctctactacatgggggacctgatccaacaccgcaggacacaggaccacaagattgccaaacaatccttgcgacccttctgcaccgtttgcaaccgctacttcaaaacccctcgcaagtttgtggagcacgtgaagtcccaggggcataaggacaaagccaaggagctgaagtcgcttgagaaagaaattgctggccaagatgaggaccacttcattacagtggacgctgtgggttgcttcgagggtgatgaagaagaggaagaggatgatgaggatgaagaagagatcgaggttgaggaggaactctgcaagcaggtgaggtccagagatatatccagagaggagtggaagggctcggagacctacagccccaatactgcatatggtgtggacttcctggtgcccgtgatgggctatatctgccgcatctgccacaagttctatcacagcaactcaggggcacagctctcccactgcaagtccctgggccactttgagaacctgcagaaatacaaggcggccaagaaccccagccccaccacccgacctgtgagccgccggtgcgcaatcaacgcccggaacgctttgacagccctgttcacctccagcggccgcccaccctcccagcccaacacccaggacaaaacacccagcaaggtgacggctcgaccctcccagcccccactacctcggcgctcaacccgcctcaaaacctgatagagggacctccctgtccctggcctgcctgggtccagatctgctaatgctttttaggagtctgcctggaaactttgacatggttcatgtttttactcaaaatccaataaaacaaggtagtttg

SEQ ID NO: 303095 - DNA, 2811 bp, Homo sapiens
ggctggtctggtcgggattttgggatccaggccccggagtagcagcggggaggccgggagcccgcgggccggagccgcccggccgaggcgtgggggctgcggggccggcccatccgtgggggcgacttgagcgttgagggcgcgcggggaggcgagccaccatgttcagccagcagcagcagcagcagctccagcaacagcagcagcagctccagcagttacagcagcagcagctccagcagcagcaattgcagcagcagcagttactgcagctccagcagctgctccagcagtccccaccacaggccccgttgcccatggctgtcagccgggggctccccccgcagcagccacagcagccgcttctgaatctccagggcaccaactcagcctccctcctcaacggctccatgctgcagagagctttgcttttacagcagttgcaaggactggaccagtttgcaatgccaccagccacgtatgacactgccggtctcaccatgcccacagcaacactgggtaacctccgaggctatggcatggcatccccaggcctcgcagcccccagcctcacacccccacaactggccactccaaatttgcaacagttctttccccaggccactcgccagtccttgctgggacctcctcctgttggggtccccatgaacccttcccagttcaacctttcaggacggaacccccagaaacaggcccggacctcctcctctaccacccccaatcgaaaggattcttcttctcagacaatgcctgtggaagacaagtcagaccccccagaggggtctgaggaagccgcagagccccggatggacacaccagaagaccaagatttaccgccctgcccagaggacatcgccaaggaaaaacgcactccagcacctgagcctgagccttgtgaggcgtccgagctgccagcaaagagattgaggagctcagaagagcccacagagaaggaacctccagggcagttacaggtgaaggcccagccgcaggcccggatgacagtaccgaaacagacacagacaccagacctgctgcctgaggccctggaagcccaagtgctgccacgattccagccacgggtcctgcaggtccaggcccaggtgcagtcacagactcagccgcggataccatccacagacacccaggtgcagccaaagctgcagaagcaggcgcaaacacagacctctccagagcacttagtgctgcaacagaagcaggtgcagccacagctgcagcaggaggcagagccacagaagcaggtgcagccagtccacacacaggcacagccaagcgtccagccacaggagcatcctccagcgcaggtgtcagtacagccaccagagcagacccatgagcagcctcacacccagccgcaggtgtcgttgctggctccagagcaaacaccagttgtggttcatgtctgcgggctggagatgccacctgatgcagtagaagctggtggaggcatggaaaagaccttgccagagcctgtgggcacccaagtcagcatggaagagattcagaatgagtcggcctgtggcctagatgtgggagaatgtgaaaacagagcgagagagatgccaggggtatggggcgccgggggctccctgaaggtcaccattctgcagagcagtgacagccgggcctttagcactgtacccctgacacctgtcccccgccccagtgactccgtctcctccacccctgcggctaccagcactccctctaagcaggccctccagttcttctgctacatctgcaaggccagctgctccagccagcaggagttccaggaccacatgtcggagcctcagcaccagcagcggctaggggagatccagcacatgagccaagcctgcctcctgtccctgctgcccgtgccccgggacgtcctggagacagaggatgaggagcctccaccaaggcgctggtgcaacacctgccagctctactacatgggggacctgatccaacaccgcaggacacaggaccacaagattgccaaacaatccttgcgacccttctgcaccgtttgcaaccgctacttcaaaacccctcgcaagtttgtggagcacgtgaagtcccaggggcataaggacaaagccaaggagctgaagtcgcttgagaaagaaattgctggccaagatgaggaccacttcattacagtggacgctgtgggttgcttcgagggtgatgaagaagaggaagaggatgatgaggatgaagaagagatcgaggttgaggaggaactctgcaagcaggtgaggtccagagatatatccagagaggagtggaagggctcggagacctacagccccaatactgcatatggtgtggacttcctggtgcccgtgatgggctatatctgccgcatctgccacaagttctatcacagcaactcaggggcacagctctcccactgcaagtccctgggccactttgagaacctgcagaaatacaaggcggccaagaaccccagccccaccacccgacctgtgagccgccggtgcgcaatcaacgcccggaacgctttgacagccctgttcacctccagcggccgcccaccctcccagcccaacacccaggacaaaacacccagcaaggtgacggctcgaccctcccagcccccactacctcggcgctcaacccgcctcaaaacctgatagagggacctccctgtccctggcctgcctgggtccagatctgctaatgctttttaggagtctgcctggaaactttgacatggttcatgtttttactcaaaatccaataaaacaaggtagtttg

SEQ ID NO: 303096 - DNA, 2901 bp, Homo sapiens
ggctggtctggtcgggattttgggatccaggccccggagtagcagcggggaggccgggagcccgcgggccggagccgcccggccgaggcgtgggggctgcggggccggcccatccgtgggggcgacttgagcgttgagggcgcgcggggaggcgagccaccatgttcagccagcagcagcagcagcagctccagcaacagcagcagcagctccagcagttacagcagcagcagctccagcagcagcaattgcagcagcagcagttactgcagctccagcagctgctccagcagtccccaccacaggccccgttgcccatggctgtcagccgggggctccccccgcagcagccacagcagccgcttctgaatctccagggcaccaactcagcctccctcctcaacggctccatgctgcagagagctttgcttttacagcagttgcaaggactggaccagtttgcaatgccaccagccacgtatgacactgccggtctcaccatgcccacagcaacactgggtaacctccgaggctatggcatggcatccccaggcctcgcagcccccagcctcacacccccacaactggccactccaaatttgcaacagttctttccccaggccactcgccagtccttgctgggacctcctcctgttggggtccccatgaacccttcccagttcaacctttcaggacggaacccccagaaacaggcccggacctcctcctctaccacccccaatcgaaaggattcttcttctcagacaatgcctgtggaagacaagtcagaccccccagaggggtctgaggaagccgcagagccccggatggacacaccagaagaccaagatttaccgccctgcccagaggacatcgccaaggaaaaacgcactccagcacctgagcctgagccttgtgaggcgtccgagctgccagcaaagagattgaggagctcagaagagcccacagagaaggaacctccagggcagttacaggtgaaggcccagccgcaggcccggatgacagtaccgaaacagacacagacaccagacctgctgcctgaggccctggaagcccaagtgctgccacgattccagccacgggtcctgcaggtccaggcccaggtgcagtcacagactcagccgcggataccatccacagacacccaggtgcagccaaagctgcagaagcaggcgcaaacacagacctctccagagcacttagtgctgcaacagaagcaggtgcagccacagctgcagcaggaggcagagccacagaagcaggtgcagccaccacaggtgcagccccaggcacattcacagcccccaaggcaggtgcagctgcagctgcagaagcaggtccagacacagacatatccacaggtccacacacaggcacagccaagcgtccagccacaggagcatcctccagcgcaggtgtcagtacagccaccagagcagacccatgagcagcctcacacccagccgcaggtgtcgttgctggctccagagcaaacaccagttgtggttcatgtctgcgggctggagatgccacctgatgcagtagaagctggtggaggcatggaaaagaccttgccagagcctgtgggcacccaagtcagcatggaagagattcagaatgagtcggcctgtggcctagatgtgggagaatgtgaaaacagagcgagagagatgccaggggtatggggcgccgggggctccctgaaggtcaccattctgcagagcagtgacagccgggcctttagcactgtacccctgacacctgtcccccgccccagtgactccgtctcctccacccctgcggctaccagcactccctctaagcaggccctccagttcttctgctacatctgcaaggccagctgctccagccagcaggagttccaggaccacatgtcggagcctcagcaccagcagcggctaggggagatccagcacatgagccaagcctgcctcctgtccctgctgcccgtgccccgggacgtcctggagacagaggatgaggagcctccaccaaggcgctggtgcaacacctgccagctctactacatgggggacctgatccaacaccgcaggacacaggaccacaagattgccaaacaatccttgcgacccttctgcaccgtttgcaaccgctacttcaaaacccctcgcaagtttgtggagcacgtgaagtcccaggggcataaggacaaagccaaggagctgaagtcgcttgagaaagaaattgctggccaagatgaggaccacttcattacagtggacgctgtgggttgcttcgagggtgatgaagaagaggaagaggatgatgaggatgaagaagagatcgaggttgaggaggaactctgcaagcaggtgaggtccagagatatatccagagaggagtggaagggctcggagacctacagccccaatactgcatatggtgtggacttcctggtgcccgtgatgggctatatctgccgcatctgccacaagttctatcacagcaactcaggggcacagctctcccactgcaagtccctgggccactttgagaacctgcagaaatacaaggcggccaagaaccccagccccaccacccgacctgtgagccgccggtgcgcaatcaacgcccggaacgctttgacagccctgttcacctccagcggccgcccaccctcccagcccaacacccaggacaaaacacccagcaaggtgacggctcgaccctcccagcccccactacctcggcgctcaacccgcctcaaaacctgatagagggacctccctgtccctggcctgcctgggtccagatctgctaatgctttttaggagtctgcctggaaactttgacatggttcatgtttttactcaaaatccaataaaacaaggtagtttg

SEQ ID NO: 303097 - DNA, 2945 bp, Homo sapiens
ggctggtctggtcgggattttgggatccaggccccggagtagcagcggggaggccgggagcccgcgggccggagccgcccggccgaggcgtgggggctgcggggccggcccatccgtgggggcgacttgagcgttgagggcgcgcggggaggcgaggtgcggggccgggggcggctgggtcgtggggctccgcctgcgagctggctgtgtctgcggaggaggcggctggcggggtgggagcgggcggagtggggcgcgaggaggtggcggtggtggagagaagccgtcccacggagctcaggaccacgccaccatgttcagccagcagcagcagcagcagctccagcaacagcagcaggccccgttgcccatggctgtcagccgggggctccccccgcagcagccacagcagccgcttctgaatctccagggcaccaactcagcctccctcctcaacggctccatgctgcagagagctttgcttttacagcagttgcaaggactggaccagtttgcaatgccaccagccacgtatgacactgccggtctcaccatgcccacagcaacactgggtaacctccgaggctatggcatggcatccccaggcctcgcagcccccagcctcacacccccacaactggccactccaaatttgcaacagttctttccccaggccactcgccagtccttgctgggacctcctcctgttggggtccccatgaacccttcccagttcaacctttcaggacggaacccccagaaacaggcccggacctcctcctctaccacccccaatcgaaaggattcttcttctcagacaatgcctgtggaagacaagtcagaccccccagaggggtctgaggaagccgcagagccccggatggacacaccagaagaccaagatttaccgccctgcccagaggacatcgccaaggaaaaacgcactccagcacctgagcctgagccttgtgaggcgtccgagctgccagcaaagagattgaggagctcagaagagcccacagagaaggaacctccagggcagttacaggtgaaggcccagccgcaggcccggatgacagtaccgaaacagacacagacaccagacctgctgcctgaggccctggaagcccaagtgctgccacgattccagccacgggtcctgcaggtccaggcccaggtgcagtcacagactcagccgcggataccatccacagacacccaggtgcagccaaagctgcagaagcaggcgcaaacacagacctctccagagcacttagtgctgcaacagaagcaggtgcagccacagctgcagcaggaggcagagccacagaagcaggtgcagccacaggtacagccacaggcacattcacagggcccaaggcaggtgcagctgcagcaggaggcagagccgctgaagcaggtgcaggtccacacacaggcacagccaagcgtccagccacaggagcatcctccagcgcaggtgtcagtacagccaccagagcagacccatgagcagcctcacacccagccgcaggtgtcgttgctggctccagagcaaacaccagttgtggttcatgtctgcgggctggagatgccacctgatgcagtagaagctggtggaggcatggaaaagaccttgccagagcctgtgggcacccaagtcagcatggaagagattcagaatgagtcggcctgtggcctagatgtgggagaatgtgaaaacagagcgagagagatgccaggggtatggggcgccgggggctccctgaaggtcaccattctgcagagcagtgacagccgggcctttagcactgtacccctgacacctgtcccccgccccagtgactccgtctcctccacccctgcggctaccagcactccctctaagcaggccctccagttcttctgctacatctgcaaggccagctgctccagccagcaggagttccaggaccacatgtcggagcctcagcaccagcagcggctaggggagatccagcacatgagccaagcctgcctcctgtccctgctgcccgtgccccgggacgtcctggagacagaggatgaggagcctccaccaaggcgctggtgcaacacctgccagctctactacatgggggacctgatccaacaccgcaggacacaggaccacaagattgccaaacaatccttgcgacccttctgcaccgtttgcaaccgctacttcaaaacccctcgcaagtttgtggagcacgtgaagtcccaggggcataaggacaaagccaaggagctgaagtcgcttgagaaagaaattgctggccaagatgaggaccacttcattacagtggacgctgtgggttgcttcgagggtgatgaagaagaggaagaggatgatgaggatgaagaagagatcgaggttgaggaggaactctgcaagcaggtgaggtccagagatatatccagagaggagtggaagggctcggagacctacagccccaatactgcatatggtgtggacttcctggtgcccgtgatgggctatatctgccgcatctgccacaagttctatcacagcaactcaggggcacagctctcccactgcaagtccctgggccactttgagaacctgcagaaatacaaggcggccaagaaccccagccccaccacccgacctgtgagccgccggtgcgcaatcaacgcccggaacgctttgacagccctgttcacctccagcggccgcccaccctcccagcccaacacccaggacaaaacacccagcaaggtgacggctcgaccctcccagcccccactacctcggcgctcaacccgcctcaaaacctgatagagggacctccctgtccctggcctgcctgggtccagatctgctaatgctttttaggagtctgcctggaaactttgacatggttcatgtttttactcaaaatccaataaaacaaggtagtttg

SEQ ID NO: 303098 - DNA, 3200 bp, Homo sapiens
ggctggtctggtcgggattttgggatccaggccccggagtagcagcggggaggccgggagcccgcgggccggagccgcccggccgaggcgtgggggctgcggggccggcccatccgtgggggcgacttgagcgttgagggcgcgcggggaggcgagccaccatgttcagccagcagcagcagcagcagctccagcaacagcagcagcagctccagcagttacagcagcagcagctccagcagcagcaattgcagcagcagcagttactgcagctccagcagctgctccagcagtccccaccacaggccccgttgcccatggctgtcagccgggggctccccccgcagcagccacagcagccgcttctgaatctccagggcaccaactcagcctccctcctcaacggctccatgctgcagagagctttgcttttacagcagttgcaaggactggaccagtttgcaatgccaccagccacgtatgacactgccggtctcaccatgcccacagcaacactgggtaacctccgaggctatggcatggcatccccaggcctcgcagcccccagcctcacacccccacaactggccactccaaatttgcaacagttctttccccaggccactcgccagtccttgctgggacctcctcctgttggggtccccatgaacccttcccagttcaacctttcaggacggaacccccagaaacaggcccggacctcctcctctaccacccccaatcgaaaggattcttcttctcagacaatgcctgtggaagacaagtcagaccccccagaggggtctgaggaagccgcagagccccggatggacacaccagaagaccaagatttaccgccctgcccagaggacatcgccaaggaaaaacgcactccagcacctgagcctgagccttgtgaggcgtccgagctgccagcaaagagattgaggagctcagaagagcccacagagaaggaacctccagggcagttacaggtgaaggcccagccgcaggcccggatgacagtaccgaaacagacacagacaccagacctgctgcctgaggccctggaagcccaagtgctgccacgattccagccacgggtcctgcaggtccaggcccaggtgcagtcacagactcagccgcggataccatccacagacacccaggtgcagccaaagctgcagaagcaggcgcaaacacagacctctccagagcacttagtgctgcaacagaagcaggtgcagccacagctgcagcaggaggcagagccacagaagcaggtgcagccacaggtacagccacaggcacattcacagggcccaaggcaggtgcagctgcagcaggaggcagagccgctgaagcaggtgcagccacaggtgcagccccaggcacattcacagcccccaaggcaggtgcagctgcagctgcagaagcaggtccagacacagacatatccacaggtccacacacaggcacagccaagcgtccagccacaggagcatcctccagcgcaggtgtcagtacagccaccagagcagacccatgagcagcctcacacccagccgcaggtgtcgttgctggctccagagcaaacaccagttgtggttcatgtctgcgggctggagatgccacctgatgcagtagaagctggtggaggtaagtgagcactggctcccagctggtctggtgatgggacagctctgcccagacccttcattcctcccctgactgggtgctgcctgggactgagggctaggcctggaacccaggtccagggccatccatgctgggggcctcaaggttctggctgcggacggagaaggcagctcttgggcctggggactctgggaaatacagcacatctgtcatttcaggcatggaaaagaccttgccagagcctgtgggcacccaagtcagcatggaagagattcagaatgagtcggcctgtggcctagatgtgggagaatgtgaaaacagagcgagagagatgccaggggtatggggcgccgggggctccctgaaggtcaccattctgcagagcagtgacagccgggcctttagcactgtacccctgacacctgtcccccgccccagtgactccgtctcctccacccctgcggctaccagcactccctctaagcaggccctccagttcttctgctacatctgcaaggccagctgctccagccagcaggagttccaggaccacatgtcggagcctcagcaccagcagcggctaggggagatccagcacatgagccaagcctgcctcctgtccctgctgcccgtgccccgggacgtcctggagacagaggatgaggagcctccaccaaggcgctggtgcaacacctgccagctctactacatgggggacctgatccaacaccgcaggacacaggaccacaagattgccaaacaatccttgcgacccttctgcaccgtttgcaaccgctacttcaaaacccctcgcaagtttgtggagcacgtgaagtcccaggggcataaggacaaagccaaggagctgaagtcgcttgagaaagaaattgctggccaagatgaggaccacttcattacagtggacgctgtgggttgcttcgagggtgatgaagaagaggaagaggatgatgaggatgaagaagagatcgaggttgaggaggaactctgcaagcaggtgaggtccagagatatatccagagaggagtggaagggctcggagacctacagccccaatactgcatatggtgtggacttcctggtgcccgtgatgggctatatctgccgcatctgccacaagttctatcacagcaactcaggggcacagctctcccactgcaagtccctgggccactttgagaacctgcagaaatacaaggcggccaagaaccccagccccaccacccgacctgtgagccgccggtgcgcaatcaacgcccggaacgctttgacagccctgttcacctccagcggccgcccaccctcccagcccaacacccaggacaaaacacccagcaaggtgacggctcgaccctcccagcccccactacctcggcgctcaacccgcctcaaaacctgatagagggacctccctgtccctggcctgcctgggtccagatctgctaatgctttttaggagtctgcctggaaactttgacatggttcatgtttttactcaaaatccaataaaacaaggtagtttg

SEQ ID NO: 303099 - DNA, 2680 bp, Homo sapiens
ggctggtctggtcgggattttgggatccaggccccggagtagcagcggggaggccgggagcccgcgggccggagccgcccggccgaggcgtgggggctgcggggccggcccatccgtgggggcgacttgagcgttgagggcgcgcggggaggcgagccaccatgttcagccagcagcagcagcagcagctccagcaacagcagcagcagctccagcagttacagcagcagcagctccagcagcagcaattgcagcagcagcagttactgcagctccagcagctgctccagcagtccccaccacaggccccgttgcccatggctgtcagccgggggctccccccgcagcagccacagcagccgcttctgaatctccagggcaccaactcagcctccctcctcaacggctccatgctgcagagagctttgcttttacagcagttgcaaggattcttcttctcagacaatgcctgtggaagacaagtcagaccccccagaggggtctgaggaagccgcagagccccggatggacacaccagaagaccaagatttaccgccctgcccagaggacatcgccaaggaaaaacgcactccagcacctgagcctgagccttgtgaggcgtccgagctgccagcaaagagattgaggagctcagaagagcccacagagaaggaacctccagggcagttacaggtgaaggcccagccgcaggcccggatgacagtaccgaaacagacacagacaccagacctgctgcctgaggccctggaagcccaagtgctgccacgattccagccacgggtcctgcaggtccaggcccaggtgcagtcacagactcagccgcggataccatccacagacacccaggtgcagccaaagctgcagaagcaggcgcaaacacagacctctccagagcacttagtgctgcaacagaagcaggtgcagccacagctgcagcaggaggcagagccacagaagcaggtgcagccacaggtacagccacaggcacattcacagggcccaaggcaggtgcagctgcagcaggaggcagagccgctgaagcaggtgcagccacaggtgcagccccaggcacattcacagcccccaaggcaggtgcagctgcagctgcagaagcaggtccagacacagacatatccacaggtccacacacaggcacagccaagcgtccagccacaggagcatcctccagcgcaggtgtcagtacagccaccagagcagacccatgagcagcctcacacccagccgcaggtgtcgttgctggctccagagcaaacaccagttgtggttcatgtctgcgggctggagatgccacctgatgcagtagaagctggtggaggcatggaaaagaccttgccagagcctgtgggcacccaagtcagcatggaagagattcagaatgagtcggcctgtggcctagatgtgggagaatgtgaaaacagagcgagagagatgccaggggtatggggcgccgggggctccctgaaggtcaccattctgcagagcagtgacagccgggcctttagcactgtacccctgacacctgtcccccgccccagtgactccgtctcctccacccctgcggctaccagcactccctctaagcaggccctccagttcttctgctacatctgcaaggccagctgctccagccagcaggagttccaggaccacatgtcggagcctcagcaccagcagcggctaggggagatccagcacatgagccaagcctgcctcctgtccctgctgcccgtgccccgggacgtcctggagacagaggatgaggagcctccaccaaggcgctggtgcaacacctgccagctctactacatgggggacctgatccaacaccgcaggacacaggaccacaagattgccaaacaatccttgcgacccttctgcaccgtttgcaaccgctacttcaaaacccctcgcaagtttgtggagcacgtgaagtcccaggggcataaggacaaagccaaggagctgaagtcgcttgagaaagaaattgctggccaagatgaggaccacttcattacagtggacgctgtgggttgcttcgagggtgatgaagaagaggaagaggatgatgaggatgaagaagagatcgaggttgaggaggaactctgcaagcaggtgaggtccagagatatatccagagaggagtggaagggctcggagacctacagccccaatactgcatatggtgtggacttcctggtgcccgtgatgggctatatctgccgcatctgccacaagttctatcacagcaactcaggggcacagctctcccactgcaagtccctgggccactttgagaacctgcagaaatacaaggcggccaagaaccccagccccaccacccgacctgtgagccgccggtgcgcaatcaacgcccggaacgctttgacagccctgttcacctccagcggccgcccaccctcccagcccaacacccaggacaaaacacccagcaaggtgacggctcgaccctcccagcccccactacctcggcgctcaacccgcctcaaaacctgatagagggacctccctgtccctggcctgcctgggtccagatctgctaatgctttttaggagtctgcctggaaactttgacatggttcatgtttttactcaaaatccaataaaacaaggtagtttg

SEQ ID NO: 303100 - DNA, 2643 bp, Homo sapiens
ggctggtctggtcgggattttgggatccaggccccggagtagcagcggggaggccgggagcccgcgggccggagccgcccggccgaggcgtgggggctgcggggccggcccatccgtgggggcgacttgagcgttgagggcgcgcggggaggcgagccaccatgttcagccagcagcagcagcagcagctccagcaacagcagcagcagctccagcagttacagcagcagcagctccagcagcagcaattgcagcagcagcagttactgcagctccagcagctgctccagcagtccccaccacaggccccgttgcccatggctgtcagccgggggctccccccgcagcagccacagcagccgcttctgaatctccagggcaccaactcagcctccctcctcaacggctccatgctgcagagagctttgcttttacagcagttgcaaggactggaccagtttgcaatgccaccagccacgtatgacactgccggtctcaccatgcccacagcaacactgggtaacctccgaggctatggcatggcatccccaggcctcgcagcccccagcctcacacccccacaactggccactccaaatttgcaacagttctttccccaggccactcgccagtccttgctgggacctcctcctgttggggtccccatgaacccttcccagttcaacctttcaggacggaacccccagaaacaggcccggacctcctcctctaccacccccaatcgaaaggattcttcttctcagacaatgcctgtggaagacaagtcagaccccccagaggggtctgaggaagccgcagagccccggatggacacaccagaagaccaagatttaccgccctgcccagaggacatcgccaaggaaaaacgcactccagcacctgagcctgagccttgtgaggcgtccgagctgccagcaaagagattgaggagctcagaagagcccacagagaaggaacctccagggcagttacaggtgaaggcccagccgcaggcccggatgacagtaccgaaacagacacagacaccagacctgctgcctgaggccctggaagcccaagtgctgccacgattccagccacgggtcctgcaggtccaggcccaggtccacacacaggcacagccaagcgtccagccacaggagcatcctccagcgcaggtgtcagtacagccaccagagcagacccatgagcagcctcacacccagccgcaggtgtcgttgctggctccagagcaaacaccagttgtggttcatgtctgcgggctggagatgccacctgatgcagtagaagctggtggaggcatggaaaagaccttgccagagcctgtgggcacccaagtcagcatggaagagattcagaatgagtcggcctgtggcctagatgtgggagaatgtgaaaacagagcgagagagatgccaggggtatggggcgccgggggctccctgaaggtcaccattctgcagagcagtgacagccgggcctttagcactgtacccctgacacctgtcccccgccccagtgactccgtctcctccacccctgcggctaccagcactccctctaagcaggccctccagttcttctgctacatctgcaaggccagctgctccagccagcaggagttccaggaccacatgtcggagcctcagcaccagcagcggctaggggagatccagcacatgagccaagcctgcctcctgtccctgctgcccgtgccccgggacgtcctggagacagaggatgaggagcctccaccaaggcgctggtgcaacacctgccagctctactacatgggggacctgatccaacaccgcaggacacaggaccacaagattgccaaacaatccttgcgacccttctgcaccgtttgcaaccgctacttcaaaacccctcgcaagtttgtggagcacgtgaagtcccaggggcataaggacaaagccaaggagctgaagtcgcttgagaaagaaattgctggccaagatgaggaccacttcattacagtggacgctgtgggttgcttcgagggtgatgaagaagaggaagaggatgatgaggatgaagaagagatcgaggttgaggaggaactctgcaagcaggtgaggtccagagatatatccagagaggagtggaagggctcggagacctacagccccaatactgcatatggtgtggacttcctggtgcccgtgatgggctatatctgccgcatctgccacaagttctatcacagcaactcaggggcacagctctcccactgcaagtccctgggccactttgagaacctgcagaaatacaaggcggccaagaaccccagccccaccacccgacctgtgagccgccggtgcgcaatcaacgcccggaacgctttgacagccctgttcacctccagcggccgcccaccctcccagcccaacacccaggacaaaacacccagcaaggtgacggctcgaccctcccagcccccactacctcggcgctcaacccgcctcaaaacctgatagagggacctccctgtccctggcctgcctgggtccagatctgctaatgctttttaggagtctgcctggaaactttgacatggttcatgtttttactcaaaatccaataaaacaaggtagtttg

SEQ ID NO: 303101 - DNA, 2169 bp, Homo sapiens
aaacatacggctaggtacgaggcctgggttaccaagatttaccgccctgcccagaggacatcgccaaggaaaaacgcactccagcacctgagcctgagccttgtgaggcgtccgagctgccagcaaagagattgaggagctcagaagagcccacagagaaggaacctccagggcagttacaggtgaaggcccagccgcaggcccggatgacagtaccgaaacagacacagacaccagacctgctgcctgaggccctggaagcccaagtgctgccacgattccagccacgggtcctgcaggtccaggcccaggtgcagtcacagactcagccgcggataccatccacagacacccaggtgcagccaaagctgcagaagcaggcgcaaacacagacctctccagagcacttagtgctgcaacagaagcaggtgcagccacagctgcagcaggaggcagagccacagaagcaggtgcagccacaggtacagccacaggcacattcacagggcccaaggcaggtgcagctgcagcaggaggcagagccgctgaagcaggtgcagccacaggtgcagccccaggcacattcacagcccccaaggcaggtgcagctgcagctgcagaagcaggtccagacacagacatatccacaggtccacacacaggcacagccaagcgtccagccacaggagcatcctccagcgcaggtgtcagtacagccaccagagcagacccatgagcagcctcacacccagccgcaggtgtcgttgctggctccagagcaaacaccagttgtggttcatgtctgcgggctggagatgccacctgatgcagtagaagctggtggaggcatggaaaagaccttgccagagcctgtgggcacccaagtcagcatggaagagattcagaatgagtcggcctgtggcctagatgtgggagaatgtgaaaacagagcgagagagatgccaggggtatggggcgccgggggctccctgaaggtcaccattctgcagagcagtgacagccgggcctttagcactgtacccctgacacctgtcccccgccccagtgactccgtctcctccacccctgcggctaccagcactccctctaagcaggccctccagttcttctgctacatctgcaaggccagctgctccagccagcaggagttccaggaccacatgtcggagcctcagcaccagcagcggctaggggagatccagcacatgagccaagcctgcctcctgtccctgctgcccgtgccccgggacgtcctggagacagaggatgaggagcctccaccaaggcgctggtgcaacacctgccagctctactacatgggggacctgatccaacaccgcaggacacaggaccacaagattgccaaacaatccttgcgacccttctgcaccgtttgcaaccgctacttcaaaacccctcgcaagtttgtggagcacgtgaagtcccaggggcataaggacaaagccaaggagctgaagtcgcttgagaaagaaattgctggccaagatgaggaccacttcattacagtggacgctgtgggttgcttcgagggtgatgaagaagaggaagaggatgatgaggatgaagaagagatcgaggttgaggaggaactctgcaagcaggtgaggtccagagatatatccagagaggagtggaagggctcggagacctacagccccaatactgcatatggtgtggacttcctggtgcccgtgatgggctatatctgccgcatctgccacaagttctatcacagcaactcaggggcacagctctcccactgcaagtccctgggccactttgagaacctgcagaaatacaaggcggccaagaaccccagccccaccacccgacctgtgagccgccggtgcgcaatcaacgcccggaacgctttgacagccctgttcacctccagcggccgcccaccctcccagcccaacacccaggacaaaacacccagcaaggtgacggctcgaccctcccagcccccactacctcggcgctcaacccgcctcaaaacctgatagagggacctccctgtccctggcctgcctgggtccagatctgctaatgctttttaggagtctgcctggaaactttgacatggttcatgtttttactcaaaatccaataaaacaaggtagtttg

SEQ ID NO: 303102 - DNA, 2958 bp, Homo sapiens
ggctggtctggtcgggattttgggatccaggccccggagtagcagcggggaggccgggagcccgcgggccggagccgcccggccgaggcgtgggggctgcggggccggcccatccgtgggggcgacttgagcgttgagggcgcgcggggaggcgagccaccatgttcagccagcagcagcagcagcagctccagcaacagcagcagcagctccagcagttacagcagcagcagctccagcagcagcaattgcagcagcagcagttactgcagctccagcagctgctccagcagtccccaccacaggccccgttgcccatggctgtcagccgggggctccccccgcagcagccacagcagccgcttctgaatctccagggcaccaactcagcctccctcctcaacggctccatgctgcagagagctttgcttttacagcagttgcaaggactggaccagtttgcaatgccaccagccacgtatgacactgccggtctcaccatgcccacagcaacactgggtaacctccgaggctatggcatggcatccccaggcctcgcagcccccagcctcacacccccacaactggccactccaaatttgcaacagttctttccccaggccactcgccagtccttgctgggacctcctcctgttggggtccccatgaacccttcccagttcaacctttcaggacggaacccccagaaacaggcccggacctcctcctctaccacccccaatcgaaaggattcttcttctcagacaatgcctgtggaagacaagtcagaccccccagaggggtctgaggaagccgcagagccccggatggacacaccagaagaccaagatttaccgccctgcccagaggacatcgccaaggaaaaacgcactccagcacctgagcctgagccttgtgaggcgtccgagctgccagcaaagagattgaggagctcagaagagcccacagagaaggaacctccagggcagttacaggtgaaggcccagccgcaggcccggatgacagtaccgaaacagacacagacaccagacctgctgcctgaggccctggaagcccaagtgctgccacgattccagccacgggtcctgcaggtccaggcccaggtgcagtcacagactcagccgcggataccatccacagacacccaggtgcagccaaagctgcagaagcaggcgcaaacacagacctctccagagcacttagtgctgcaacagaagcaggtgcagccacagctgcagcaggaggcagagccacagaagcaggtgcagccacaggtacagccacaggcacattcacagggcccaaggcaggtgcagctgcagcaggaggcagagccgctgaagcaggtgcagccacaggtgcagccccaggcacattcacagcccccaaggcaggtgcagctgcagctgcagaagcaggtccagacacagacatatccacaggtccacacacaggcacagccaagcgtccagccacaggagcatcctccagcgcaggtgtcagtacagccaccagagcagacccatgagcagcctcacacccagccgcaggtgtcgttgctggctccagagcaaacaccagttgtggttcatgtctgcgggctggagatgccacctgatgcagtagaagctggtggaggcatggaaaagaccttgccagagcctgtgggcacccaagtcagcatggaagagattcagaatgagtcggcctgtggcctagatgtgggagaatgtgaaaacagagcgagagagatgccaggggtatggggcgccgggggctccctgaaggtcaccattctgcagagcagtgacagccgggcctttagcactgtacccctgacacctgtcccccgccccagtgactccgtctcctccacccctgcggctaccagcactccctctaagcaggccctccagttcttctgctacatctgcaaggccagctgctccagccagcaggagttccaggaccacatgtcggagcctcagcaccagcagcggctaggggagatccagcacatgagccaagcctgcctcctgtccctgctgcccgtgccccgggacgtcctggagacagaggatgaggagcctccaccaaggcgctggtgcaacacctgccagctctactacatgggggacctgatccaacaccgcaggacacaggaccacaagattgccaaacaatccttgcgacccttctgcaccgtttgcaaccgctacttcaaaacccctcgcaagtttgtggagcacgtgaagtcccaggggcataaggacaaagccaaggagctgaagtcgcttgagaaagaaattgctggccaagatgaggaccacttcattacagtggacgctgtgggttgcttcgagggtgatgaagaagaggaagaggatgatgaggatgaagaagagatcgaggtgaggtccagagatatatccagagaggagtggaagggctcggagacctacagccccaatactgcatatggtgtggacttcctggtgcccgtgatgggctatatctgccgcatctgccacaagttctatcacagcaactcaggggcacagctctcccactgcaagtccctgggccactttgagaacctgcagaaatacaaggcggccaagaaccccagccccaccacccgacctgtgagccgccggtgcgcaatcaacgcccggaacgctttgacagccctgttcacctccagcggccgcccaccctcccagcccaacacccaggacaaaacacccagcaaggtgacggctcgaccctcccagcccccactacctcggcgctcaacccgcctcaaaacctgatagagggacctccctgtccctggcctgcctgggtccagatctgctaatgctttttaggagtctgcctggaaactttgacatggttcatgtttttactcaaaatccaataaaacaaggtagtttg

SEQ ID NO: 303103 - DNA, 2750 bp, Homo sapiens
ggctggtctggtcgggattttgggatccaggccccggagtagcagcggggaggccgggagcccgcgggccggagccgcccggccgaggcgtgggggctgcggggccggcccatccgtgggggcgacttgagcgttgagggcgcgcggggaggcgagccaccatgttcagccagcagcagcagcagcagctccagcaacagcagcagcagctccagcagttacagcagcagcagctccagcagcagcaattgcagcagcagcagttactgcagctccagcagctgctccagcagtccccaccacaggccccgttgcccatggctgtcagccgggggctccccccgcagcagccacagcagccgcttctgaatctccagggcaccaactcagcctccctcctcaacggctccatgctgcagagagctttgcttttacagcagttgcaaggactggaccagtttgcaatgccaccagccacgtatgacactgccggtctcaccatgcccacagcaacactgggtaacctccgaggctatggcatggcatccccaggcctcgcagcccccagcctcacacccccacaactggccactccaaatttgcaacagttctttccccaggccactcgccagtccttgctgggacctcctcctgttggggtccccatgaacccttcccagttcaacctttcaggacggaacccccagaaacaggcccggacctcctcctctaccacccccaatcgaaaggattcttcttctcagacaatgcctgtggaagacaagtcagaccccccagaggggtctgaggaagccgcagagccccggatggacacaccagaagaccaagatttaccgccctgcccagaggacatcgccaaggaaaaacgcactccagcacctgagcctgagccttgtgaggcgtccgagctgccagcaaagagattgaggagctcagaagagcccacagagaaggaacctccagggcagttacaggtgaaggcccagccgcaggcccggatgacagtaccgaaacagacacagacaccagacctgctgcctgaggccctggaagcccaagtgctgccacgattccagccacgggtcctgcaggtccaggcccaggtgcagtcacagactcagccgcggataccatccacagacacccaggtgcagccaaagctgcagaagcaggcgcaaacacagacctctccagagcacttagtgctgcaacagaagcaggtgcagccacagctgcagcaggaggcagagccacagaagcaggtgcagccacaggtacagccacaggcacattcacagggcccaaggcaggtgcagctgcagcaggaggcagagccgctgaagcaggtgcagccacaggtgcagccccaggcacattcacagcccccaaggcaggtgcagctgcagctgcagaagcaggtccagacacagacatatccacaggtccacacacaggcacagccaagcgtccagccacaggagcatcctccagcgcaggtgtcagtacagccaccagagcagacccatgagcagcctcacacccagccgcaggtgtcgttgctggctccagagcaaacaccagttgtggttcatgtctgcgggctggagatgccacctgatgcagtagaagctggtggaggcatggaaaagaccttgccagagcctgtgggcacccaagtcagcatggaagagattcagaatgagtcggcctgtggcctagatgtgggagaatgtgaaaacagagcgagagagatgccaggggtatggggcgccgggggctccctgaaggtcaccattctgcagagcagtgacagccgggcctttagcactgtacccctgacacctgtcccccgccccagtgactccgtctcctccacccctgcggctaccagcactccctctaagcaggccctccagttcttctgctacatctgcaaggccagctgctccagccagcaggagttccaggaccacatgtcggagcctcagcaccagcagcggctaggggagatccagcacatgagccaagcctgcctcctgtccctgctgcccgtgccccgggacgtcctggagacagaggatgaggagcctccaccaaggcgctggtgcaacacctgccagctctactacatgggggacctgatccaacaccgcaggacacaggaccacaagattgccaaacaatccttgcgacccttctgcaccgtttgcaaccgctacttcaaaacccctcgcaagtttgtggagcacgtgaagtcccaggggcataaggacaaagccaaggagctgaagtcgcttgagaaagaaattgctggccaagatgaggaccacttcattacagtggacgctgtgggttgcttcgagggtgatgaagaagaggaagaggatgatgaggatgaagaagagatcgaggttgaggaggaactctgcaagcaggtgaggtccagagatatatccagagaggagtggaagggctcggagacctacagccccaatactgcatatggtgtggacttcctggtgcccgtgatgggctatatctgccgcatctgccacaagttctatcacagcaactcaggggcacagctctcccactgcaagtccctgggccactttgagaacctgcagaaatacaaggcggccaagaaccccagccccaccacccgacctgtgagccgccggtgggccacaggatctgttcccagatcacgacgctagtcaaagcgacag

SEQ ID NO: 303104 - DNA, 2691 bp, Homo sapiens
  misc_feature (2616)..(2616): n is a, c, g, or t
ggctggtctggtcgggattttgggatccaggccccggagtagcagcggggaggccgggagcccgcgggccggagccgcccggccgaggcgtgggggctgcggggccggcccatccgtgggggcgacttgagcgttgagggcgcgcggggaggcgagccaccatgttcagccagcagcagcagcagcagctccagcaacagcagcagcagctccagcagttacagcagcagcagctccagcagcagcaattgcagcagcagcagttactgcagctccagcagctgctccagcagtccccaccacaggccccgttgcccatggctgtcagccgggggctccccccgcagcagccacagcagccgcttctgaatctccagggcaccaactcagcctccctcctcaacggctccatgctgcagagagctttgcttttacagcagttgcaaggactggaccagtttgcaatgccaccagccacgtatgacactgccggtctcaccatgcccacagcaacactgggtaacctccgaggctatggcatggcatccccaggcctcgcagcccccagcctcacacccccacaactggccactccaaatttgcaacagttctttccccaggccactcgccagtccttgctgggacctcctcctgttggggtccccatgaacccttcccagttcaacctttcaggacggaacccccagaaacaggcccggacctcctcctctaccacccccaatcgaaaggattcttcttctcagacaatgcctgtggaagacaagtcagaccccccagaggggtctgaggaagccgcagagccccggatggacacaccagaagaccaagatttaccgccctgcccagaggacatcgccaaggaaaaacgcactccagcacctgagcctgagccttgtgaggcgtccgagctgccagcaaagagattgaggagctcagaagagcccacagagaaggaacctccagggcagttacaggtgaaggcccagccgcaggcccggatgacagtaccgaaacagacacagacaccagacctgctgcctgaggccctggaagcccaagtgctgccacgattccagccacgggtcctgcaggtccaggcccaggtgcagtcacagactcagccgcggataccatccacagacacccaggtgcagccaaagctgcagaagcaggcgcaaacacagacctctccagagcacttagtgctgcaacagaagcaggtgcagccacagctgcagcaggaggcagagccacagaagcaggtgcagccacaggtacagccacaggcacattcacagggcccaaggcaggtgcagctgcagcaggaggcagagccgctgaagcaggtgcagccacaggtgcagccccaggcacattcacagcccccaaggcaggtgcagctgcagctgcagaagcaggtccagacacagacatatccacaggtccacacacaggcacagccaagcgtccagccacaggagcatcctccagcgcaggtgtcagtacagccaccagagcagacccatgagcagcctcacacccagccgcaggtgtcgttgctggctccagagcaaacaccagttgtggttcatgtctgcgggctggagatgccacctgatgcagtagaagctggtggaggcatggaaaagaccttgccagagcctgtgggcacccaagtcagcatggaagagattcagaatgagtcggcctgtggcctagatgtgggagaatgtgaaaacagagcgagagagatgccaggggtatggggcgccgggggctccctgaaggtcaccattctgcagagcagtgacagccgggcctttagcactgtacccctgacacctgtcccccgccccagtgactccgtctcctccacccctgcggctaccagcactccctctaagcaggccctccagttcttctgctacatctgcaaggccagctgctccagccagcaggagttccaggaccacatgtcggagcctcagcaccagcagcggctaggggagatccagcacatgagccaagcctgcctcctgtccctgctgcccgtgccccgggacgtcctggagacagaggatgaggagcctccaccaaggcgctggtgcaacacctgccagctctactacatgggggacctgatccaacaccgcaggacacaggaccacaagattgccaaacaatccttgcgacccttctgcaccgtttgcaaccgctacttcaaaacccctcgcaagtttgtggagcacgtgaagtcccaggggcataaggacaaagccaaggagctgaagtcgcttgagaaagaaattgctggccaagatgaggaccacttcattacagtggacgctgtgggttgcttcgagggtgatgaagaagaggaagaggatgatgaggatgaagaagagatcgaggttgaggaggaactctgcaagcaggtgaggtccagagatatatccagagaggagtggaagggctcggagacctacagccccaatactgcatatggtgtggacttcctggtgcccgtgatgggctatatctgccgcatctgccacaagttctatcacagcaactcaggggcacagctctcccatntaaaaagaataagacaagaattaataaagcggccagaatctagtttaaatcgagatatgtgagccgccggtgcgc

SEQ ID NO: 303105 - DNA, 2785 bp, Homo sapiens
ggctggtctggtcgggattttgggatccaggccccggagtagcagcggggaggccgggagcccgcgggccggagccgcccggccgaggcgtgggggctgcggggccggcccatccgtgggggcgacttgagcgttgagggcgcgcggggaggcgagccaccatgttcagccagcagcagcagcagcagctccagcaacagcagcagcagctccagcagttacagcagcagcagctccagcagcagcaattgcagcagcagcagttactgcagctccagcagctgctccagcagtccccaccacaggccccgttgcccatggctgtcagccgggggctccccccgcagcagccacagcagccgcttctgaatctccagggcaccaactcagcctccctcctcaacggctccatgctgcagagagctttgcttttacagcagttgcaaggactggaccagtttgcaatgccaccagccacgtatgacactgccggtctcaccatgcccacagcaacactgggtaacctccgaggctatggcatggcatccccaggcctcgcagcccccagcctcacacccccacaactggccactccaaatttgcaacagttctttccccaggccactcgccagtccttgctgggacctcctcctgttggggtccccatgaacccttcccagttcaacctttcaggacggaacccccagaaacaggcccggacctcctcctctaccacccccaatcgaaaggattcttcttctcagacaatgcctgtggaagacaagtcagaccccccagaggggtctgaggaagccgcagagccccggatggacacaccagaagaccaagatttaccgccctgcccagaggacatcgccaaggaaaaacgcactccagcacctgagcctgagccttgtgaggcgtccgagctgccagcaaagagattgaggagctcagaagagcccacagagaaggaacctccagggcagttacaggtgaaggcccagccgcaggcccggatgacagtaccgaaacagacacagacaccagacctgctgcctgaggccctggaagcccaagtgctgccacgattccagccacgggtcctgcaggtccaggcccaggtgcagtcacagactcagccgcggataccatccacagacacccaggtgcagccaaagctgcagaagcaggcgcaaacacagacctctccagagcacttagtgctgcaacagaagcaggtgcagccacagctgcagcaggaggcagagccacagaagcaggtgcagccacaggtacagccacaggcacattcacagggcccaaggcaggtgcagctgcagcaggaggcagagccgctgaagcaggtgcagccacaggtgcagccccaggcacattcacagcccccaaggcaggtgcagctgcagctgcagaagcaggtccagacacagacatatccacaggtccacacacaggcacagccaagcgtccagccacaggagcatcctccagcgcaggtgtcagtacagccaccagagcagacccatgagcagcctcacacccagccgcaggtgtcgttgctggctccagagcaaacaccagttgtggttcatgtctgcgggctggagatgccacctgatgcagtagaagctggtggaggcatggaaaagaccttgccagagcctgtgggcacccaagtcagcatggaagagattcagaatgagtcggcctgtggcctagatgtgggagaatgtgaaaacagagcgagagagatgccaggggtatggggcgccgggggctccctgaaggtcaccattctgcagagcagtgacagccgggcctttagcactgtacccctgacacctgtcccccgccccagtgactccgtctcctccacccctgcggctaccagcactccctctaagcaggccctccagttcttctgctacatctgcaaggccagctgctccagccagcaggagttccaggaccacatgtcggagcctcagcaccagcagcggctaggggagatccagcacatgagccaagcctgcctcctgtccctgctgcccgtgccccgggacgtcctggagacagaggatgaggagcctccaccaaggcgctggtgcaacacctgccagctctactacatgggggacctgatccaacaccgcaggacacaggaccacaagattgccaaacaatccttgcgacccttctgcaccgtttgcaaccgctacttcaaaacccctcgcaagtttgtggagcacgtgaagtcccaggggcataaggacaaagccaaggagctgaagtcgcttgagaaagaaattgctggccaagatgaggaccacttcattacagtggacgctgtgggttgcttcgagggtgatgaagaagaggaagaggatgatgaggatgaagaagagatcgaggttgaggaggaactctgcaagcaggtgctggggggagggtgtgggaggcgggcttggtgctggattcccagcccaggacagacctcatcccacctcccggaggccagacactgggctggcatctgtgggcactaatgcatgccacaactgattactgtcaactgccttctgcatgactatgtaattatgcatgatgactagagagtggcagttaaaatatgcaaagcctgactgaaatttggacctgtgtggaggaagggaaagggaacagcatcagtaaaggcacggaggtgggaaactatgtagtgtgcaaaggaaaagtcagatgatggtgatgataatggagagactga

SEQ ID NO: 303106 - DNA, 1796 bp, Homo sapiens
ggctggtctggtcgggattttgggatccaggccccggagtagcagcggggaggccgggagcccgcgggccggagccgcccggccgaggcgtgggggctgcggggccggcccatccgtgggggcgacttgagcgttgagggcgcgcggggaggcgagccaccatgttcagccagcagcagcagcagcagctccagcaacagcagcagcagctccagcagttacagcagcagcagctccagcagcagcaattgcagcagcagcagttactgcagctccagcagctgctccagcagtccccaccacaggccccgttgcccatggctgtcagccgggggctccccccgcagcagccacagcagccgcttctgaatctccagggcaccaactcagcctccctcctcaacggctccatgctgcagagagctttgcttttacagcagttgcaaggactggaccagtttgcaatgccaccagccacgtatgacactgccggtctcaccatgcccacagcaacactgggtaacctccgaggctatggcatggcatccccaggcctcgcagcccccagcctcacacccccacaactggccactccaaatttgcaacagttctttccccaggccactcgccagtccttgctgggacctcctcctgttggggtccccatgaacccttcccagttcaacctttcaggacggaacccccagaaacaggcccggacctcctcctctaccacccccaatcgaaaggattcttcttctcagacaatgcctgtggaagacaagtcagaccccccagaggggtctgaggaagccgcagagccccggatggacacaccagaagaccaagatttaccgccctgcccagaggacatcgccaaggaaaaacgcactccagcacctgagcctgagccttgtgaggcgtccgagctgccagcaaagagattgaggagctcagaagagcccacagagaaggaacctccagggcagttacaggtgaaggcccaattgccaaacaatccttgcgacccttctgcaccgtttgcaaccgctacttcaaaacccctcgcaagtttgtggagcacgtgaagtcccaggggcataaggacaaagccaaggagctgaagtcgcttgagaaagaaattgctggccaagatgaggaccacttcattacagtggacgctgtgggttgcttcgagggtgatgaagaagaggaagaggatgatgaggatgaagaagagatcgaggttgaggaggaactctgcaagcaggtgaggtccagagatatatccagagaggagtggaagggctcggagacctacagccccaatactgcatatggtgtggacttcctggtgcccgtgatgggctatatctgccgcatctgccacaagttctatcacagcaactcaggggcacagctctcccactgcaagtccctgggccactttgagaacctgcagaaatacaaggcggccaagaaccccagccccaccacccgacctgtgagccgccggtgcgcaatcaacgcccggaacgctttgacagccctgttcacctccagcggccgcccaccctcccagcccaacacccaggacaaaacacccagcaaggtgacggctcgaccctcccagcccccactacctcggcgctcaacccgcctcaaaacctgatagagggacctccctgtccctggcctgcctgggtccagatctgctaatgctttttaggagtctgcctggaaactttgacatggttcatgtttttactcaaaatccaataaaacaaggtagtttg

SEQ ID NO: 303107 - DNA, 2816 bp, Homo sapiens
ggctggtctggtcgggattttgggatccaggccccggagtagcagcggggaggccgggagcccgcgggccggagccgcccggccgaggcgtgggggctgcggggccggcccatccgtgggggcgacttgagcgttgagggcgcgcggggaggcgagccaccatgttcagccagcagcagcagcagcagctccagcaacagcagcagcagctccagcagttacagcagcagcagctccagcagcagcaattgcagcagcagcagttactgcagctccagcagctgctccagcagtccccaccacaggccccgttgcccatggctgtcagccgggggctccccccgcagcagccacagcagccgcttctgaatctccagggcaccaactcagcctccctcctcaacggctccatgctgcagagagctttgcttttacagcagttgcaaggactggaccagtttgcaatgccaccagccacgtatgacactgccggtctcaccatgcccacagcaacactgggtaacctccgaggctatggcatggcatccccaggcctcgcagcccccagcctcacacccccacaactggccactccaaatttgcaacagttctttccccaggccactcgccagtccttgctgggacctcctcctgttggggtccccatgaacccttcccagttcaacctttcaggacggaacccccagaaacaggcccggacctcctcctctaccacccccaatcgaaaggattcttcttctcagacaatgcctgtggaagacaagtcagaccccccagaggggtctgaggaagccgcagagccccggatggacacaccagaagaccaagatttaccgccctgcccagaggacatcgccaaggaaaaacgcactccagcacctgagcctgagccttgtgaggcgtccgagctgccagcaaagagattgaggagctcagaagagcccacagagaaggaacctccagggcagttacaggtgaaggcccagccgcaggcccggatgacagtaccgaaacagacacagacaccagacctgctgcctgaggccctggaagcccaagtgctgccacgattccagccacgggtcctgcaggtccaggcccaggtgcagtcacagactcagccgcggataccatccacagacacccaggtgcagccaaagctgcagaagcaggcgcaaacacagacctctccagagcacttagtgctgcaacagaagcaggtgcagccacagctgcagcaggaggcagagccacagaagcaggtgcagccacaggtacagccacaggcacattcacagggcccaaggcaggtgcagctgcagcaggaggcagagccgctgaagcaggtgcagccacaggtgcagccccaggcacattcacagcccccaaggcaggtgcagctgcagctgcagaagcaggtccagacacagacatatccacaggtccacacacaggcacagccaagcgtccagccacaggagcatcctccagcgcaggtgtcagtacagccaccagagcagacccatgagcagcctcacacccagccgcaggtgtcgttgctggctccagagcaaacaccagttgtggttcatgtctgcgggctggagatgccacctgatgcagtagaagctggtggaggcatggaaaagaccttgccagagcctgtgggcacccaagtcagcatggaagagattcagaatgagtcggcctgtggcctagatgtgggagaatgtgaaaacagagcgagagagatgccaggggtatggggcgccgggggctccctgaaggtcaccattctgcagagcagtgacagccgggcctttagcactgtacccctgacacctgtcccccgccccagtgactccgtctcctccacccctgcggctaccagcactccctctaagcaggccctccagttcttctgctacatctgcaaggccagctgctccagccagcaggagttccaggaccacatgtcggagcctcagcaccagcagcggctaggggagatccagcacatgagccaagcctgcctcctgtccctgctgcccgtgccccgggacgtcctggagacagaggatgaggagcctccaccaaggcgctggtgcaacacctgccagctctactacatgggggacctgatccaacaccgcaggacacaggaccacaagattgccaaacaatccttgcgacccttctgcaccgtttgcaaccgctacttcaaaacccctcgcaagtttgtggagcacgtgaagtcccaggggcataaggacaaagccaaggagctgaagtcgcttgagaaagaaattgctggccaagatgaggaccacttcattacagtgtggacttcctggtgcccgtgatgggctatatctgccgcatctgccacaagttctatcacagcaactcaggggcacagctctcccactgcaagtccctgggccactttgagaacctgcagaaatacaaggcggccaagaaccccagccccaccacccgacctgtgagccgccggtgcgcaatcaacgcccggaacgctttgacagccctgttcacctccagcggccgcccaccctcccagcccaacacccaggacaaaacacccagcaaggtgacggctcgaccctcccagcccccactacctcggcgctcaacccgcctcaaaacctgatagagggacctccctgtccctggcctgcctgggtccagatctgctaatgctttttaggagtctgcctggaaactttgacatggttcatgtttttactcaaaatccaataaaacaaggtagtttg

SEQ ID NO: 303108 - DNA, 2377 bp, Homo sapiens
ggctggtctggtcgggattttgggatccaggccccggagtagcagcggggaggccgggagcccgcgggccggagccgcccggccgaggcgtgggggctgcggggccggcccatccgtgggggcgacttgagcgttgagggcgcgcggggaggcgagccaccatgttcagccagcagcagcagcagcagctccagcaacagcagcagcagctccagcagttacagcagcagcagctccagcagcagcaattgcagcagcagcagttactgcagctccagcagctgctccagcagtccccaccacaggccccgttgcccatggctgtcagccgggggctccccccgcagcagccacagcagccgcttctgaatctccagggcaccaactcagcctccctcctcaacggctccatgctgcagagagctttgcttttacagcagttgcaaggactggaccagtttgcaatgccaccagccacgtatgacactgccggtctcaccatgcccacagcaacactgggtaacctccgaggctatggcatggcatccccaggcctcgcagcccccagcctcacacccccacaactggccactccaaatttgcaacagttctttccccaggccactcgccagtccttgctgggacctcctcctgttggggtccccatgaacccttcccagttcaacctttcaggacggaacccccagaaacaggcccggacctcctcctctaccacccccaatcgaaaggattcttcttctcagacaatgcctgtggaagacaagtcagaccccccagaggggtctgaggaagccgcagagccccggatggacacaccagaagaccaagatttaccgccctgcccagaggacatcgccaaggaaaaacgcactccagcacctgagcctgagccttgtgaggcgtccgagctgccagcaaagagattgaggagctcagaagagcccacagagaaggaacctccagggcagttacaggtgaaggcccagccgcaggcccggatgacagtaccgaaacagacacagacaccagacctgctgcctgaggccctggaagcccaagtgctgccacgattccagccacgggtcctgcaggtccaggcccaggtgcagtcacagactcagccgcggataccatccacagacacccaggtgcagccaaagctgcagaagcaggcgcaaacacagacctctccagagcacttagtgctgcaacagaagcaggtgcagccacagctgcagcaggaggcagagccacagaagcaggtgcagccacaggtacagccacaggcacattcacagggcccaaggcaggtgcagctgcagcaggaggcagagccgctgaagcaggtgcagccacaggtgcagccccaggcacattcacagcccccaaggcaggtgcagctgcagctgcagaagcaggtccagacacagacatatccacaggtccacacacaggcacagccaagcgtccagccacaggagcatcctccagcgcaggtgtcagtacagccaccagagcagacccatgagcagcctcacacccagccgcaggtgtcgttgctggctccagagcaaacaccagttgtggttcatgtctgcgggctggagatgccacctgatgcagtagaagctggtggaggcatggaaaagaccttgccagagcctgtgggcacccaagtcagcatggaagagattcagaatgagtcggcctgtggcctagatgtgggagaatgtgaaaacagagcgagagagatgccaggggtatggggcgccgggggctccctgaaggtcaccattctgcagagcagtgacagccgggcctttagcactgtacccctgacacctgtcccccgccccagtgactccgtctcctccacccctgcggctaccagcactccctctaagcaggccctccagttcttctgctacatctgcaaggccagctgctccagccagcaggagttccaggaccacatgtcggagcctcagcaccagcagcggctaggggagatccagcacatgagccaagcctgcctcctgtccctgctgcccgtgccccgggacgtcctggagacagaggatgaggagcctccaccaaggcgctggtgcaacacctgccagctctactacatgggggacctgatccaacacccaggacaaaacacccagcaaggtgacggctcgaccctcccagcccccactacctcggcgctcaacccgcctcaaaacctgatagagggacctccctgtccctggcctgcctgggtccagatctgctaatgctttttaggagtctgcctggaaactttgacatggttcatgtttttactcaaaatccaataaaacaaggtagtttg

SEQ ID NO: 303109 - DNA, 2110 bp, Homo sapiens
ggctggtctggtcgggattttgggatccaggccccggagtagcagcggggaggccgggagcccgcgggccggagccgcccggccgaggcgtgggggctgcggggccggcccatccgtgggggcgacttgagcgttgagggcgcgcggggaggcgagccaccatgttcagccagcagcagcagcagcagctccagcaacagcagcagcagctccagcagttacagcagcagcagctccagcagcagcaattgcagcagcagcagttactgcagctccagcagctgctccagcagtccccaccacaggccccgttgcccatggctgtcagccgggggctccccccgcagcagccacagcagccgcttctgaatctccagggcaccaactcagcctccctcctcaacggctccatgctgcagagagctttgcttttacagcagttgcaaggactggaccagtttgcaatgccaccagccacgtatgacactgccggtctcaccatgcccacagcaacactgggtaacctccgaggctatggcatggcatccccaggcctcgcagcccccagcctcacacccccacaactggccactccaaatttgcaacagttctttccccaggccactcgccagtccttgctgggacctcctcctgttggggtccccatgaacccttcccagttcaacctttcaggacggaacccccagaaacaggcccggacctcctcctctaccacccccaatcgaaaggattcttcttctcagacaatgcctgtggaagacaagtcagaccccccagaggggtctgaggaagccgcagagccccggatggacacaccagaagaccaagatttaccgccctgcccagaggacatcgccaaggaaaaacgcactccagcacctgagcctgagccttgtgaggcgtccgagctgccagcaaagagattgaggagctcagaagagcccacagagaaggaacctccagggcagttacaggtgaaggcccagccgcaggcccggatgacagtaccgaaacagacacagacaccagacctgctgcctgaggccctggaagcccaagtgctgccacgattccagccacgggtcctgcaggtccaggcccaggtgcagtcacagactcagccgcggataccatccacagacacccaggtgcagccaaagctgcagaagcaggcgcaaacacagacctctccagagcacttagtgctgcaacagaagcaggtgcagccacagctgcagcaggaggcagagccacagaagcaggtgcagccacaggtacagccacaggcacattcacagggcccaaggcaggtgcagctgcagcaggaggcagagccgctgaagcaggtgcagccacaggtgcagccccaggcacattcacagcccccaaggcaggtgcagctgcagctgcagaagcaggtccagacacagacatatccacaggtccacacacaggcacagccaagcgtccagccacaggagcatcctccagcgcaggtgtcagtacagccaccagagcagacccatgagcagcctcacacccagccgcaggtgtcgttgctgggtgaggtccagagatatatccagagaggagtggaagggctcggagacctacagccccaatactgcatatggtgtggacttcctggtgcccgtgatgggctatatctgccgcatctgccacaagttctatcacagcaactcaggggcacagctctcccactgcaagtccctgggccactttgagaacctgcagaaatacaaggcggccaagaaccccagccccaccacccgacctgtgagccgccggtgcgcaatcaacgcccggaacgctttgacagccctgttcacctccagcggccgcccaccctcccagcccaacacccaggacaaaacacccagcaaggtgacggctcgaccctcccagcccccactacctcggcgctcaacccgcctcaaaacctgatagagggacctccctgtccctggcctgcctgggtccagatctgctaatgctttttaggagtctgcctggaaactttgacatggttcatgtttttactcaaaatccaataaaacaaggtagtttg

SEQ ID NO: 303110 - DNA, 1564 bp, Homo sapiens
ggctggtctggtcgggattttgggatccaggccccggagtagcagcggggaggccgggagcccgcgggccggagccgcccggccgaggcgtgggggctgcggggccggcccatccgtgggggcgacttgagcgttgagggcgcgcggggaggcgagccaccatgttcagccagcagcagcagcagcagctccagcaacagcagcagcagctccagcagttacagcagcagcagctccagcagcagcaattgcagcagcagcagttactgcagctccagcagctgctccagcagtccccaccacaggccccgttgcccatggctgtcagccgggggctccccccgcagcagccacagcagccgcttctgaatctccagggcaccaactcagcctccctcctcaacggctccatgctgcagagagctttgcttttacagcagttgcaaggactggaccagtttgcaatgccaccagccacgtatgacactgccggtctcaccatgcccacagcaacactgggtaacctccgaggctatggcatggcatccccaggcctcgcagcccccagcctcacacccccacaactggccactccaaatttgcaacagttctttccccaggccactcgccagtccttgctgggacctcctcctgttggggtccccatgaacccttcccagttcaacctttcaggacggaacccccagaaacaggcccggacctcctcctctaccacccccaatcgaaaggattcttcttctcagacaatgcctgtggaagacaagtcagaccccccagaggggtctgaggaagccgcagagccccggatggacacaccagaagaccaagatttaccgccctgcccagaggacatcgccaaggaaaaacgcactccagcacctgagcctgagccttgtgaggcgtccgagctgccagcaaagagattgaggagctcagaagagcccacagagaaggaacctccagggcagttacaggtgaaggcccagccgcaggcccggatgacagtaccgaaacagacacagacaccagacctgctgcctgaggccctggaagcccaagtgctgccacgattccagccacgggtcctgcaggtccaggcccaggtgcagtcacagactcagccgcggataccatccacagacacccaggtgcagccaaagctgcagaagcaggcgcaaacacagacctctccagagcacttagtgctgcaacagaagcaggtgcagccacagctgcagcaggaggcagagccacagaagcaggtgcagccagtccacacacaggcacagccaagcgtccagccacaggagcatcctccagcgcaggtgtcagtacagccaccagagcagacccatgagcagcctcacacccagccgcaggtgtcgttgctggctccagagcaaacaccagttgtggttcatgtctgcgggctggagatgccacctgatgcagtagaagctggtggaggcatggaaaagaccctggccagagcactgtggcacccaagtcagcatgggaccgacattgggatcctctagataag

SEQ ID NO: 303111 - DNA, 1791 bp, Homo sapiens
ggctggtctggtcgggattttgggatccaggccccggagtagcagcggggaggccgggagcccgcgggccggagccgcccggccgaggcgtgggggctgcggggccggcccatccgtgggggcgacttgagcgttgagggcgcgcggggaggcgagccaccatgttcagccagcagcagcagcagcagctccagcaacagcagcagcagctccagcagttacagcagcagcagctccagcagcagcaattgcagcagcagcagttactgcagctccagcagctgctccagcagtccccaccacaggccccgttgcccatggctgtcagccgggggctccccccgcagcagccacagcagccgcttctgaatctccagggcaccaactcagcctccctcctcaacggctccatgctgcagagagctttgcttttacagcagttgcaaggactggaccagtttgcaatgccaccagccacgtatgacactgccggtctcaccatgcccacagcaacactgggtaacctccgaggctatggcatggcatccccaggcctcgcagcccccagcctcacacccccacaactggccactccaaatttgcaacagttctttccccaggccactcgccagtccttgctgggacctcctcctgttggggtccccatgaacccttcccagttcaacctttcaggacggaacccccagaaacaggcccggacctcctcctctaccacccccaatcgaaaggattcttcttctcagacaatgcctgtggaagacaagtcagaccccccagaggggtctgaggaagccgcagagccccggatggacacaccagaagaccaagatttaccgccctgcccagaggacatcgccaaggaaaaacgcactccagcacctgagcctgagccttgtgaggcgtccgagctgccagcaaagagattgaggagctcagaagagcccacagagaaggaacctccagggcagttacaggtgaaggcccagccgcaggcccggatgacagtaccgaaacagacacagacaccagacctgctgcctgaggccctggaagcccaagtgctgccacgattccagccacgggtcctgcaggtccaggcccaggtgcagtcacagactcagccgcggataccatccacagacacccaggtgcagccaaagctgcagaagcaggcgcaaacacagacctctccagagcacttagtgctgcaacagaagcaggtgcagccacagctgcagcaggaggcagagccacagaagcaggtgcagccacaggtacagccacaggcacattcacagggcccagcactccctctaagcaggccctccagttcttctgctacatctgcaaggccagctgctccagccagcaggagttccaggaccacatgtcggagcctcagcaccagcagcggctaggggagatccagcacatgagccaagcctgcctcctgtccctgctgcccgtgccccgggacgtcctggagacagaggatgaggagcctccaccaaggcgctggtgcaacacctgccagctctactacatgggggacctgatccaacacccaggacaaaacacccagcaaggtgacggctcgaccctcccagcccccactacctcggcgctcaacccgcctcaaaacctgatagagggacctccctgtccctggcctgcctgggtccagatctgctaatgctttttaggagtctgcctggaaactttgacatggttcatgtttttactcaaaatccaataaaacaaggtagtttg

SEQ ID NO: 303112 - DNA, 1486 bp, Homo sapiens
ggctggtctggtcgggattttgggatccaggccccggagtagcagcggggaggccgggagcccgcgggccggagccgcccggccgaggcgtgggggctgcggggccggcccatccgtgggggcgacttgagcgttgagggcgcgcggggaggcgagccaccatgttcagccagcagcagcagcagcagctccagcaacagcagcagcagctccagcagttacagcagcagcagctccagcagcagcaattgcagcagcagcagttactgcagctccagcagctgctccagcagtccccaccacaggccccgttgcccatggctgtcagccgggggctccccccgcagcagccacagcagccgcttctgaatctccagggcaccaactcagcctccctcctcaacggctccatgctgcagagagctttgcttttacagcagttgcaaggactggaccagtttgcaatgccaccagccacgtatgacactgccggtctcaccatgcccacagcaacactgggtaacctccgaggctatggcatggcatccccaggcctcgcagcccccagcctcacacccccacaactggccactccaaatttgcaacagttctttccccaggccactcgccagtccttgctgggacctcctcctgttggggtccccatgaacccttcccagttcaacctttcaggacggaacccccagaaacaggcccggacctcctcctctaccacccccaatcgaaaggattcttcttctcagacaatgcctgtggaagacaagtcagaccccccagaggggtctgaggaagccgcagagccccggatggacacaccagaagaccaagatttaccgccctgcccagaggacatcgccaaggaaaaacgcactccagcacctgagcctgagccttgtgaggcgtccgagctgccagcaaagagattgaggagctcagaagagcccacagagaaggaacctccagggcagttacaggtgaaggcccagccgcaggcccggatgacagtaccgaaacagacacagacaccagacctgctgcctgaggccctggaagcccaagtgctgccacgattccagccacgggtcctgcaggtccaggcccaggtgcagtcacagactcagccgcggataccatccacagacacccaggtgcagccaaagctgcagaagcaggcgcaaacacagacctctccagagcacttagtgctgcaacagaagcaggtgcagccacagctgcagcaggaggcagagccacagaagcaggtgcagccaccacaggtgcagccccaggcacattcacagcccccaaggcaggtgcagctgcagctgcagaagcaggtccagacacagacatatccacaggtccacacacaggcacagccaagcgtccagccacaggagcatcctccagcgcaggtgtcagtacagccaccagagcagaaggtcgacggagatcctgctagagt

SEQ ID NO: 303113 - DNA, 1563 bp, Homo sapiens
ggctggtctggtcgggattttgggatccaggccccggagtagcagcggggaggccgggagcccgcgggccggagccgcccggccgaggcgtgggggctgcggggccggcccatccgtgggggcgacttgagcgttgagggcgcgcggggaggcgagccaccatgttcagccagcagcagcagcagcagctccagcaacagcagcagcagctccagcagttacagcagcagcagctccagcagcagcaattgcagcagcagcagttactgcagctccagcagctgctccagcagtccccaccacaggccccgttgcccatggctgtcagccgggggctccccccgcagcagccacagcagccgcttctgaatctccagggcaccaactcagcctccctcctcaacggctccatgctgcagagagctttgcttttacagcagttgcaaggactggaccagtttgcaatgccaccagccacgtatgacactgccggtctcaccatgcccacagcaacactgggtaacctccgaggctatggcatggcatccccaggcctcgcagcccccagcctcacacccccacaactggccactccaaatttgcaacagttctttccccaggccactcgccagtccttgctgggacctcctcctgttggggtccccatgaacccttcccagttcaacctttcaggacggaacccccagaaacaggcccggacctcctcctctaccacccccaatcgaaaggattcttcttctcagacaatgcctgtggaagacaagtcagaccccccagaggggtctgaggaagccgcagagccccggatggacacaccagaagaccaagatttaccgccctgcccagaggacatcgccaaggaaaaacgcactccagcacctgagcctgagccttgtgaggcgtccgagctgccagcaaagagattgaggagctcagaagagcccacagagaaggaacctccagggcagttacaggtgaaggcccagccgcaggcccggatgacagtaccgaaacaggtgaggtccagagatatatccagagaggagtggaagggctcggagacctacagccccaatactgcatatggtgtggacttcctggtgcccgtgatgggctatatctgccgcatctgccacaagttctatcacagcaactcaggggcacagctctcccactgcaagtccctgggccactttgagaacctgcagaaatacaaggcggccaagaaccccagccccaccacccgacctgtgagccgccggtgcgcaatcaacgcccggaacgctttgacagccctgttcacctccagcggccgcccaccctcccagcccaacacccaggacaaaacacccagcaaggtgacggctcgaccctcccagcccccactacctcggcgctcaacccgcctcaaaacctgatagagggacctccctgtccctggcctgcctgggtccagatctgctaatgctttttaggagtctgcctggaaactttgacatggttcatgtttttactcaaaatccaataaaacaaggtagtttg

SEQ ID NO: 303114 - DNA, 1750 bp, Homo sapiens
ggctggtctggtcgggattttgggatccaggccccggagtagcagcggggaggccgggagcccgcgggccggagccgcccggccgaggcgtgggggctgcggggccggcccatccgtgggggcgacttgagcgttgagggcgcgcggggaggcgagccaccatgttcagccagcagcagcagcagcagctccagcaacagcagcagcagctccagcagttacagcagcagcagctccagcagcagcaattgcagcagcagcagttactgcagctccagcagctgctccagcagtccccaccacaggccccgttgcccatggctgtcagccgggggctccccccgcagcagccacagcagccgcttctgaatctccagggcaccaactcagcctccctcctcaacggctccatgctgcagagagctttgcttttacagcagttgcaaggtaacctccgaggctatggcatggcatccccaggcctcgcagcccccagcctcacacccccacaactggccactccaaatttgcaacagttctttccccaggccactcgccagtccttgctgggacctcctcctgttggggtccccatgaacccttcccagttcaacctttcaggacggaacccccagaaacaggcccggacctcctcctctaccacccccaatcgaaaggattcttcttctcagacaatgcctgtggaagacaagtcagaccccccagaggggtctgaggaagccgcagagccccggatggacacaccagaagaccaagatttaccgccctgcccagaggacatcgccaaggaaaaacgcactccagcacctgagcctgagccttgtgaggcgtccgagctgccagcaaagagattgaggagctcagaagagcccacagagaaggaacctccagggcagttacaggtgaaggcccagccgcaggcccggatgacagtaccgaaacagacacagacaccagacctgctgcctgaggccctggaagcccaagtgctgccacgattccagccacgggtcctgcaggtccaggcccaggtgcagtcacagactcagccgcggataccatccacagacacccaggtgcagccaaagctgcagaagcaggcgcaaacacagacctctccagagcacttagtgctgcaacagaagcaggtgcagccacagctgcagcaggaggcagagccacagaagcaggtgcagccacaggtacagccacaggcacattcacagggcccaaggcaggtgcagctgcagcaggaggcagagccgctgaagcaggtgcagccacaggtgcagccccaggcacattcacagccgcatctgccacaagttctatcacagcaactcaggggcacagctctcccactgcaagtccctgggccactttgagaacctgcagaaatacaaggcggccaagaaccccagccccaccacccgacctgtgagccgccggtgcgcaatcaacgcccggaacgctttgacagccctgttcacctccagcggccgcccaccctcccagcccaacacccaggacaaaacacccagcaaggtgacggctcgaccctcccagcccccactacctcggcgctcaacccgcctcaaaacctgatagagggacctccctgtccctggcctgcctgggtccagatctgctaatgctttttaggagtctgcctggaaactttgacatggttcatgtttttactcaaaatccaataaaacaaggtagtttg

SEQ ID NO: 303115 - DNA, 1529 bp, Homo sapiens
ggctggtctggtcgggattttgggatccaggccccggagtagcagcggggaggccgggagcccgcgggccggagccgcccggccgaggcgtgggggctgcggggccggcccatccgtgggggcgacttgagcgttgagggcgcgcggggaggcgagccaccatgttcagccagcagcagcagcagcagctccagcaacagcagcagcagctccagcagttacagcagcagcagctccagcagcagcaattgcagcagcagcagttactgcagctccagcagctgctccagcagtccccaccacaggccccgttgcccatggctgtcagccgggggctccccccgcagcagccacagcagccgcttctgaatctccagggcaccaactcagcctccctcctcaacggctccatgctgcagagagctttgcttttacagcagttgcaaggactggaccagtttgcaatgccaccagccacgtatgacactgccggtctcaccatgcccacagcaacactgggtaacctccgaggctatggcatggcatccccaggcctcgcagcccccagcctcacacccccacaactggccactccaaatttgcaacagttctttccccaggccactcgccagtccttgctgggacctcctcctgttggggtccccatgaacccttcccagttcaacctttcaggacggaacccccagaaacaggcccggacctcctcctctaccacccccaatcgaaaggattcttcttctcagacaatgcctgtggaagacaagtcagaccccccagaggggtctgaggaagccgcagagccccggatggacacaccagaagaccaagatttaccgccctgcccagaggacatcgccaaggaaaaacgcactccagcacctgagcctgagccttgtgaggcgtccgagctgccagcaaagagattgaggagctcagaagagcccacagagaaggaacctccagggcagttacaggtgaaggcccagccgcaggcccggatgacagtaccgaaacagacacagacaccagacctgctgcctgaggccctggaagcccaagtgctgccacgattccagccacgggtcctgcaggtccaggcccaggtgcagtcacagactcagccgcggataccatccacagctgcaagtccctgggccactttgagaacctgcagaaatacaaggcggccaagaaccccagccccaccacccgacctgtgagccgccggtgcgcaatcaacgcccggaacgctttgacagccctgttcacctccagcggccgcccaccctcccagcccaacacccaggacaaaacacccagcaaggtgacggctcgaccctcccagcccccactacctcggcgctcaacccgcctcaaaacctgatagagggacctccctgtccctggcctgcctgggtccagatctgctaatgctttttaggagtctgcctggaaactttgacatggttcatgtttttactcaaaatccaataaaacaaggtagtttg

SEQ ID NO: 303116 - DNA, 901 bp, Homo sapiens
ggctggtctggtcgggattttgggatccaggccccggagtagcagcggggaggccgggagcccgcgggccggagccgcccggccgaggcgtgggggctgcggggccggcccatccgtgggggcgacttgagcgttgagggcgcgcggggaggcgagccaccatgttcagccagcagcagcagcagcagctccagcaacagcagcagcagctccagcagttacagcagcagcagctccagcagcagcaattgcagcagcagcagttactgcagctccagcagctgctccagcagtccccaccacaggccccgttgcccatggctgtcagccgggggctccccccgcagcagccacagcagccgcttctgaatctccagggcaccaactcagcctccctcctcaacggctccatgctgcagagagctttgcttttacagcagttgcaaggactggaccagtttgcaatgccaccagccacgtatgacactgccggtctcaccatgcccacagcaacactgggtaacctccgaggctatggcatggcatccccaggcctcgcagcccccagcctcacacccccacaactggccactccaaatttgcaacagttctttccccaggccactcgccagtccttgctgggacctcctcctgttggggtccccatgaacccttcccagttcaacctttcaggacggaacccccagaagtgcgcctgggtgcgcacccatggcgcacttctggggcagccatttgaggtggcatatgggatgcatgttgggtcacgtaagtgaataggaaaagaaagggactgaaagcatttaacaggagacaacctcacaaatctgtgggggtgatgaatgctggtcaaggggccaaggtggagaagtgcgcctgggtg

SEQ ID NO: 303117 - DNA, 321 bp, Homo sapiens
tccgatttgtgtgctcgatcaacctagccctgtttctcagtgctgttttgctaatatctctaatagtcttacttaatcttgttgaaagtagcacttttgaggttaataaggtttaaattaataacccccattgactgtagtctataatactataattttttaaatggcaaaatgccctctgggagctaaggtgtcttaaaagcttagagcaaatcctgttaaatgggacaaagtcacgaatcaagttaatggacaaggagaacccacttggatgtactgtaccgagggtgatggatgtcagcaagccaattacagattatt

SEQ ID NO: 303118 - DNA, 1340 bp, Homo sapiens
tccgatttgtgtgctcgatcaacctagccctgtttctcagtgctgttttgctaatatctctaatagtcttacttaatcttgttgaaagtagcacttttgaggttaataaggtttaaattaataacccccattgactgtagtctataatactataattttttaaatggcaaaatgccctctgggagctaaggtgtcttaaaagcttagagcaaatcctgttaaatgggacaaagtctcaattcttttttaataagacaaaaacactttatgtagtctcttttctttttcagtgtttctcgaaatttcaattttattccatgctgctacagaatacaaacttacccaataaaaatagcagctccattgaaagagctttcccacaaattgaaatatttaaagcacagttacaggcttgtgtactgttggtgcatacattgtttgatttgttcagttcctcagttttgcagggaaagatgtcaacattatctgatttttcaagctatctattcaatgattctaattttctaaaagacttggaagctgggttgttttttgttctggcccctcagtttgttgagagcctattttaaagatttccggtggatttaacaaaatgaacaaaatttagaggactcatttatttcccccaaccaagtcagtgccatagtgggacccttacataaatttgtcactgtgtttaaatttgatgtagtgaatgaaaataatcatctgaagccagtataaaataggcattaaacattgttgtccaagctagagtgcagtggctctccaccagcatgatcatttaacacacaaaaacctgaaacacctgggcttaatcctgcctcagccttccgagtagctgggactacaggcacatgccactatgccttgttaaattaagatttgtagctcttcttcccattccctgcacccttctgagagagcttatactgaaagttctgcattttgtgtccttgattttgcacaggaaggcaaaagatcacagttgaggaaaaaaagttacccactttgaaaatctgtttccatttttaaattcctgtagttatagggaataagttgttctagtagaccaaaagaagattaatgtttttagttatacacggatgcattgatattgtggtagacagttgatactggctttatcgtaatttttttttctttttatggagaatggggtctcactatgttatccaagctggtctcgaactcctgcgctcaagctgtcctctcgcctctgcttctctgttgtatcttttttatttaggcatcctttcttttgctttctagtacttggtcttttgtatatgaatacgttc
